United States Patent Application Publication US 2020/0377945 A1 - sequence listing, part 7

SEQ ID NO: 1063 - DNA, 3063 bp, Unknown
  gut microbiota DNA sequence
atatcattttaagaagatttttctattgcacatatcgtttcactgcaatctttcccataaccataaatactgctaccaggactatacttacatacccagcataaaaataatcttgcagatccagacaaaacaaaatgataagaacacatacctgcaatgccgttatgcaatgtgttacccttgcataataccttctttcttcctcatcaagcggtttattgatactttccactggggcaaggacaataataattaccacggcaagaactccgatcaataaaatcaaggcattaggaacatttttcattacaggctcatatgtataaaccggaataaataaaattgccattgatatcaaaaaacagccgattctactcttacagtggctgcccccactatagcttctcaacgaggcataaaataacaggaagaccagaacaagtcccggtctccccgtcacaatgccaaatattccagaagccaaaaggtttcctgcaacaacaatgccattttctatcccatattggtacagttctgcatcctctttttgcacaatccccttttgtatcaatatttcatttatcttctttgcaaatttagcaatcataccctgttaccaccttaaaattttctaagttttttcgcattatccggtaacttgtcctgtccgaaaataaaccagcagcaacggttcatatttgttgcagttaccgtaagggcaagtgctgccacgctgcttaatgctccatgactgagtcggttcatcaatcttcttaattttgacatatatgtatgtcctccttttcatttgatgaatgcactatatcatactttacaggaaaatccgtcaaagtgtaacagattgacatttaagtgtaacgctttgcatttattccttcacttcaattccatagagcattgcagaaacctcaaatatatcccctttatctgtaaaactgaccgttccattgtatttttctaccactttacgaacactctgaacaccatgcccatgtctgatattatctttcttggttgttttcaggcttttatttttctttcctgttttgctgtttgttattataagaagcaaaatcccggactggtacttattttcaatctttacaaaacgctgtccctccggcaccttgctgcaggcttctaccgcattatccacaagatttccatacaatacacctatatccccgtgatcaagctgcatctgctttggaatacgaatagatgtttctacttttattccccttgcctttgccctgccgaatttaatgcggagcacagaatctacgattggattatcagaatactgcttttcatctatctgctcaaattccatgcacatcgcaccgattttctctgaaagttcctgcccatcactattttccaccagatgatacagttcatgcaatttatgtttcatatcgtgctttaacttctgcacttccttattctgtttttctgcttcttcataatagatgtctttatagtgcatttcttccctgtacattgcatcctcatactgtttttgcacaagataattaaaacgttccatcatatacagcataaaataatctgtcaggacaatggaaattacaatactggcacacataagcaggcttttttcactgccagcttccaatgacaaaagaataacaaagcaacagttcaacaccgtaaaggcaaataccataacaagcacacccaaaatttctttcggaaaatcagcaatctgcatccctttctttgaaatcaattttgacagaatatacatcacatttccacgaacaaagctgcatattaccattacaaaataatatttataactttctcccatatgaaaattcatcgcatggagtaacagcaaagctacaggttcaaacagcattccaatacccatgaatgtcacaatatttataattctcgtccacattcctgatatataataaaatgataacagtataagcacaatcaaaagagtcgcaagattcagatacggattttttatgctactgacaaatgtccatataactgcagcaatggtaaatccagcccatatccatacctttgatactggtttcattttcttattggaatgaaaataatacataaacactgccagatcaaacaggctgatggcaaagcgtatcacatattccatccttaaaccatcctccttacaaactccatatgtttttcttttaaattctgcttatgggaacgggcaatcagaagtctttcttcattgtccatcactacttcatctccctcaatcgccctgatatgcccaagattgatgatatatgatacatgaatatgggcaaaaaccttatcatcaagctgtttccatatttcttcagttgtcatatttgccttgaaattttctgagatcgtatgtatcactgcctgacgacctttcttctcaaaatacacaatatcatcgcagctaatacgaaactgattttttcggaactgaaagacaaagtcacgctttatcatatgaagatactgcatggcttttaaaaggacggactccagcttttccactgtaatcggtttagaaatatagtcaaaggtaataacctcaaaaacatccataacatactgcgtatatccagtcaggaatacaaacaatgctttggcatctattttccggatttcttttgcaagctgcaaaccattcatctccggcatttcaatgtcaaatatatacagatgatacatttccccatcatctataacatgcttcagcaactccttcgctgtaaaatacacttcataagaaaactggtactgcgctaacttatcaaaagcactttccagcatttctacatctgttctgctgtcatcacagaccgcaatattaagcataacacttcctccttttcgggcttggaagtaggaagcacttcaatttatctaatcaacttagataaataagccagcacacggtcaaaaaaatcatttctctgctcctttgtgctgttcgcaacatagtaatccagattaaaatctttcatactgctctcacctgttaatttccataat

SEQ ID NO: 1064 - DNA, 501 bp, Unknown
  gut microbiota DNA sequence
catctgaattttgtcataggaaaaaaatttgcctatgaaacgtaagcgcctagtttcagggtggatttaaaatcatcacaaaatttgccataattatagatgatagatgccagcattttactacagtatcggcgctagatactataaatgcgagcgttttactataactatggaggtttcctgtatgaaaacgcaaagacgcacagcagacgaacaatatcaacttatcatggaatgccgcagcagcggtcttagtgactaccaatggtgtacagaacataacatcaatcccggcaccttttacaactgggttaaaagactgagaaaaaaagcttgttatgatatcccctctgccacaggacgcggcgattataagccagcccttaaaccggatgttgtaaaacttgaggtgatacctgatcatcaaaacccgggcattccaactgtcgaaagcacaatgcttccgctggaagaaccctgccccgccatcgaggtcatgct

SEQ ID NO: 1065 - DNA, 815 bp, Unknown
  gut microbiota DNA sequence
ctggatagtttctgtgcgaaactaaattccacaggccgcattcaaaaaatgtgaattgttaagttccagcctgacagcagatttttatgctaagttagtggttaaagcgtatcagcttaggcgtcagattgacctcatcgggtggaatcggcctaagctgaagtgcttttaagatgtctataccatagttttcaagtgctacatcatacggtgttcgaccaccaaggctttctcttggggttgaatttatgtggtctacgatagctcttaaatcccactgggtgaggtattcaaagctggtctttttaggaagaatcattcgaagcatggtatgtgcctgttcgatgccgcctttttgaccgcttctcatcggatcacagtaatagatgcttgaccgcataatgccattaatgccgttttcgagagactccggatctccgaattcggatccgcgatccgtaagaatcgtgttgaataaggttaaaaaatcatatgtgccaagctggtgttccaacttgttaaaaacaagttttacggcacctttggtgcatctgttcataatgaatgcaagaaacagtttttcacgggttaagaagaatgtcaggatgacacgctttgagtcctgtgatgagtgaacggtatccatttcagcaaaatggtcaagttcaagggcttgaaaatcagaaaacatacgtctgataaaaacggatctgtctttgatctgggtcttgtgtactttgcggggtttgaattttacctgacgtttcagatcgatgtttcttgcggacaggattcctttatcaaggtaagaatat

SEQ ID NO: 1066 - DNA, 637 bp, Unknown
  gut microbiota DNA sequence
gttgaattttacctgacgtttcagatcgatgtttcttgcggacaggattcctttatcaaggtaagaatacaagagttctcacggacatatcgagttctggatgattcgttataatctgatatggagactgtccctgaaaaatcaggggcgtgatgaccatatctttctgatgcagttcgtgtctggtcatgtttataccggccctggactgtgagagacattctttgtatttgcggtcagcaaaaatagcatcatagcggtatttgtgggcaatcgtgcagtgattgattgcttttggacaaccattacacacataaggtgctttatcgagtcggttacatcgttctttgacaaagtccggacatgtctggttgcaggttggacaggtggtacatttgacaccgcagagaataatcttgccacaggcattgacttttttgcaatgatatctgtggacgcaaaagttatgtgcattgttaaaacagcctttgtgataccagtcgctgagcctgtgcagcctgatttcttttgagattgttgttggatctttacaaagatatcttgcaatgtccttaaaagaacagccagcgtttagggatttttcaatgtatttgcgatcttcgagagtaagatgttt

SEQ ID NO: 1067 - DNA, 272 bp, Unknown
  gut microbiota DNA sequence
gacggaagaagggggacattctctttctacagaaaaatttacaagtcagcgccgatgttgatttcaggttggtttggcaaaggttttacttttatgctattaacgttacatgatggaactacggcgcagttgtaaatttgttcttccgaaagaaatgtcccccttcttcctgtagataggaaaactataagtaaaagaatgatgtccgcaaatcctgtctgtggaacaaacataaaggcaccagaacctgcagttaaagggacgcctcaaaa

SEQ ID NO: 1068 - DNA, 235 bp, Unknown
  gut microbiota DNA sequence
acatggaacaggcagatgcattccctgatacaggaaatgatccattaccggaatggtttatctgaatcagaagatccagatccgcagaccgtctccgaatttgaagaacgttataaaacaatcctgtccatagatggggatgaatacgactatgagccgcctgggaaatactaccgtgatggatacaacctgtacaaaaggatgaaaaagtataagaaagatcatcttcttttcc

SEQ ID NO: 1069 - DNA, 431 bp, Unknown
  gut microbiota DNA sequence
tggccgtggtctttttctttttcaacatcctgttctacctccattttcagcacccgatccacattggcctttgccgttaaaagctcccgcatttcctcacgggaacgccggtactcggcataggtccttttcttttcttccagcaatttcgcatactctgtctgcaactctttgaccttgggcagcttcttgatgcccatctcgtcaaaggcattcttagcagcctggtggagcagaatttcttcctcatgttcttcccggaatttcttagagtagccggccttgcggtatgccacatagacctcacgggtcttggcataatttacgatgtgagtacgcagaacagcaatctctgccatgcgcttttcagccgctttgatctgcgccgaaagctcattgtgatgtgccgtggcagccgcagccttttcttc

SEQ ID NO: 1070 - DNA, 1458 bp, Unknown
  gut microbiota DNA sequence
caaaggttccgcactcggctgataatggagaatccaacacttgtgaatgtgttgtgcagatccgcagctatatgctctggatgtatggtgttaaacttgcttatgagcggtcatatgagtatgtgaaggctatagcggattatttcgggctggatatcgagtttacacaggaaaatcgtgtggatttttgctggcactccaactatttaaagtgcccggaaaaatttttcagtccggagaatttttataaaatgcgtgtggatcgctttaaagatgctattttgcataccagtaaaaagggatcggaagattttgaaattgattatctggctatgggaaaacggtctcaaaaaatttttatccggatttatttgaaatcaaaggaagtagttgaaaaaggttataaaccgtggttttttaaggtgtggctttttaatgggttaattaatcgctatgacatgtactgttatgaatatgcatttttgaaacatagctggaaatctttagatcttggtcggttgcagttttacgcggagtatggcagacagaaacattatgttgagaagtgccgccggatattgtcgcaggaagaaacgatttccccggattcgctccgtgctctggctgatcggcttactccggctgtaaaccttgttatgaatgttgagtatcaggtaatgcggaaacatacgaaatcgtatgaacttattcctttttttgataactcggataagctgaccgggaaacgtatttatgattttctggataaccgaaaattgatttgtgattatttgaccagtaaagtttttcgattggttgaacctcacgaacctggaaaaaatgattcgaataagtccaggcgggatttatgtgcattctggaaagcactccgcagttgcaaacttacagatacatttattccggaagaggatagatctttagtcaggacatatacaagaaaactgaatagtgaagtggttaagtcccgggcggtgaaagctgctattacttatggaatttatgtccgtggtattaacagtgatgatcctttaacagattgcattgaggctttgtgtatgctgaatgataatgatctacatgatgcatacaactataagacaaaaaaagtccgccaattcaatgcgaatgaactgacggacacaatggaaaatgctgttaagcgttccagcaaccttatgttgatagataaagacactggagatataattttcaactcttagctttgttataacatgaaaaagccaaaatgtaaaggcgaatgttgcaaagtggtggttatatctccagataaggagggtttttatgaatgtacagatggcttacaacttgtttctggttgatcgtgaatcatattgttcagataaatctatattgtattatcgggaaaacatcttaaaatttatgaattttctgtctgatcggctcggattagctcct

SEQ ID NO: 1071 - DNA, 235 bp, Unknown
  gut microbiota DNA sequence
ggaaaagaagatgatctttcttatactttttcatccttttgtacaggttgtatccatcacggtagtatttcccatgcggctcatagtcgtattcatccccggctatggacaggattgttttataacgttcttcaaattcggaaacggtctgcggatctggctcttctgattcagataaaccattccggtaatggatcatttcctgtatcagggaatgcatctgcctgttccagga

SEQ ID NO: 1072 - DNA, 2664 bp, Unknown
  gut microbiota DNA sequence
tcttctttgtagaagtcttgtaagttaccttaaccggaaatatggatggtattttccgcggaagtattggaaataccggatttataaacagagtttggggcaaaatcacttctacaagtaacacgcaagcaacatacaagaagcgattaaatctgattaatggcttcgaccagcacaggcacatccagatgcgtgtaaatccgttctgtcagggacatagcgccggaatgaccgacaatttttttgatggtcgtctgatcgacatgtgcttcggcgagcagggaaatcgtggtgtgccggcagcagtgaggtgtatgatcgatgtgcagacgaaacatcaggggttggaaaacattgtggtaatacatataataggtaaaatgctggctgtccagagtatggatgagatattcacaatcggaacagtcatgaagccagcgctggtaaaaggggagtactttgtcagcaatcggaacctttcgaatgccgttttcggttttgctgtcaatgacatcaaaatattgttcggacagatgaacattttcttttttcagttccaaaagctctgagacgcggaccccattgtatatcagcatgaggactgtctggcaatagggatcgtttttgtgtttccacaggagagcaatttcagaagtggaaaaacagctccgtatgtttttattaggattccggtctttgtatttcgagatatttacataggcagaataatcttttgagacaatttcgtgtttcatggcataagaatagagctggttaaagagaacacgaatttttttcagggtaggatagttcttgccgcagtgatctatcacctgctgtaaatcattgagtctcaaattgtgaaatggcatatcagcaatgttttcacaagtggcaaatgctgcccgataacctttgatgttggagtgggagatggtaggaaacttttcttcggaccatcggagataaatttcccggaaggttaatttcagcgtttccccatcgatgggataattattgtaacgtgccagaatctgcaaagcttccgaccgggtaggagcgtagcccagaatctgatagtgctggatgcgctttccagtgatgtcattgatgtgccagcccgtagtgatgcgtgctgcatagggtcttcttctgttgccggagagttttacgactccgccgtatccgtttggtaatctcatttttcttcctttcgtgtgtaaaaatttatattatcgtgtcaatcatacacatttatttgtaaaatttttaagtaacacacaagtaacaaaaaagtgtttttacctattatatatattttacgtgttgaaaaaacgaaggtttagaggtattatattctagaaaaattgtttactaaggagagaaaactttgagtgagaatggatatcgaaatttaaaaaagacgaataagctgatgattcccgtcattttgatgatggggtttgtgccattgcttgtacatatgtattcctataattcaaatctgtcgcagtttgactggtttccggccaattcagatacacagacagatttcttttttgcatggaagatgattgcgatcgtaatcattggagtggtgatggctgcaattctgttgtatcggcattatgtgaagaaagagaccctgcagtttgaaaattctttttattttctgctggtatatggactttttgttctgatgtcagcacttttttcaaagcataagcattgggtatccggcggaacttatgaactttttgagtctgtgtgggtagtttttgcgtatatgctgctgtgttattatgtgtataattttgtgaatgaagaaaaacatgtggaattcattttgaaaatttcgggcattggcatggctattgttacagtgatcggcgtatttcagtattttggactggacttctttcagtcaaattttggaaaacatttgatcacaaatcctggatggtggaagaatttaaaagagctgacgtttaattttgcaccgaaaacttcttatacgacattatataatccgaactttttatcattttattttggcatgctcattgtgttggcggtatgcctgtttattgcgtcaaaaaagatatggcatcggatagtgctggcagtagctgcagtatgctgtgccatctgtctgaaaggaagcggcagtgcgagtggatggatggctcttgcattggcaacagtggtacttatacttgtgcttttgagccggaagaaaaaactgtttgttgtgggtgctgttgtagtggtaattgggattatagcagcaatcgtacttggaaataccacctcagcaggtgaaaatataaaaaatacaattgttggtacataccggatgagtgacagatgggctctgaatggagtagaaaccaatacggatgatgtcgtgcttgatattcacgggaataaactgagtgtttcttataccgtgggagaggacggaacaacacagatcagctgtaaagattcggatggaaacgagttaagtcagacgatagtggatgcagataaccaggtgacaacgatggatgacagccgtttttctggggtacagctgcaaccggtatcttttggagataacctgcctggaatttgtgcaacgattgatggtgtgcagtggaacttcataaataccgatgagaa

SEQ ID NO: 1073 - DNA, 517 bp, Unknown
  gut microbiota DNA sequence
atggtacattcctttttttctcatgtattccatttgtaaatacgtcagtgagttcgaaaccgaggacttctcctaactgttccagttgaggaatggaaggaagaaagtcttctttttccatacgagagattagggaacggttgattccggttgcatcagcaagagattgctgtgtcatggagagtttcttacggttcgtgattatgaggttcgccaggatggcggtggagagttttttcatggtgatttcctttctatggctataataatgaaaaagttatttataataacaaaatagcgctaataactgtttgtatagtatcataaaataaacaaaaatgcaatggagtgtgaatttaaacgacaaaaatgtaagctggaaaagaaaaagtgaatttctttattcatgtgatacttgaaattaagttctacaatttttaaatgttgagagagaatataataaatattgcaagaatgtacgtttgttagtataattaaagaaaaatatggaaggatt

SEQ ID NO: 1074 - DNA, 774 bp, Unknown
  gut microbiota DNA sequence
ataacctgtcatatactatcattacaaagacctcctccttgtattctacgcaagagtgtcctataatgatatggtgcgtgtatgcaccatactgtatgtatatgatagaatagaaaatagccataagctgcatagaaaacagctctcaaggttattatgtaatatagaacggattatctgttttacttttatggtattcaaccgggacaattcaagcacctgacaatttgcccgcagatacccttctcagaaaggattcacaacaacactatggatgataaaaacacatactctgttgataaatatttggaaatcattgccgaaaaagaaggaatcacaaaagaagaagtccaacaggaaattgggcgggcagtttccattgctttaaaaagccctgatccacaaatgcaacgcttctggacagactttccatgtgaaaatgatactcccatcattgaagaaatcatataccatctcgctgaaaaatttgcaaaagagtcatagacaaaggacaggataactacccgtctattcactcagataatcttcctgtcctcttaatatttgttcaatcatatgtaatgcaaattctatttctctttcgtcgcaccgattcatcataaatgcaaaacgctcaatgtgcttttctgggtgctgctggctcatcagaaccataggcgatgactccaatgcatgaacaatattcaaatatgtatcaagactcattgcccttctgccattttcaacacttttgatagtatccaatgatacatc

SEQ ID NO: 1075 - DNA, 1595 bp, Unknown
  gut microbiota DNA sequence
taaatttacagaaaaaatttcacaccgtctttccacgaaatatgtgaatcgagtaagctaaccacctactcttaattacaaatataatccaaagaaaaatattctctttccttcatatatgcaaagtatttcttttcctaataaaatgtaacagggattttgtcagtttcaaatagacacctctaccgatttatgctagaatattttttgtataacttcatagaaagaagcggatgcgttcttttgatgccctctagttttacgaaagagggtgatgcccatgaacacaatggaggttttaactttgttgctggtaatttttgcggcactatcttacatagataatcataacaaaaagaaatagcatcccgccctgagaaagttggatgctatttcttaaatacatttaaattactgagggcaatcggataacgcatccgataacctttctgagatgattatacaataagaggcttgagaaatcaagtctcttattttttactttaacagtaagttccctgtttatcacttttatacagttgttaaaagcccctgctccttcatgctgtaataggcatatccgtaactgtcaccattttcttttcttccaataatgatgtggtcaagaagttctattcctataagccttccagcttcaaataatcgctttgtagtgcttatgtcttcttttgaaacagatacttctcctgatgggtggttatgaactacaataaatgttcctgctccacaaagaagatttctaatcataatcttccttgtatgtaaaagacaggcattaactgttccatgccccacttcaaatatgccaagaatcctgcattttgtatctaatgataaaagatagacatattcctctgcggccgtgtgaagttcaaacaaatcacaaatcatacttgcgattttttctgcacagtctaagtgcttattttctgttttataattatacgctttttcttttacaagttctgtaaagttattctctctgtttattttcgtgctataagttattatcctcatcacaatcctcctcgtcttctgcatagccgtattctggtgaaaagaaaaatatgatgtcatcatcttcttcatcatataactttcttttttccatctcacagtcatcatctaaattttcgtcttcttcatagtcatcatcataatctttgtcaaaatgttcacacataatctttactcctttgtaaaaaaataaggagaatgtaacttacactccccttattttttatagctttctgatgttgtttcttttatttactttttctttagctctgattttgtatcacattctttggaactttcttttgcttcctttgtctttgtacctgatataaattcaaagctatatcagattcattaaaatctgtccgaaaaagtgtcttaatttatgagaccattatagtatttgcagccttgacatacatagacaataaacataaccgcaaataaacggaaaggctatcctctacgccaataggggatagcctttaatccgtttgatttttaaactgattatttgtttccgatcggctggatgcctgtattacatggctgaagga

SEQ ID NO: 1076 - DNA, 4158 bp, Unknown
  gut microbiota DNA sequence
catctgaaccaatgcctgcagaaacgcgccggaataaaggagcatctggatacattgcgtaagcaggaagaagcaggcgaaagccagaaacagattctggaacaaaagcgtatctggagggggaaatgttacgaggcagaatttgcccttgcttatgtcaggtttccagaagaaatgcagacggacgtaaacagtatttgcgaatatctggaggctgatacgaaatcgcttggaaagcaaaatgtaaattacgagtctgaatcagatttatttcgaaaaccggggctttttaaatgagtatcaggtgatgcagggggaattatttaaagaactggatgaaaaccggccattgggagaagccgaggctgtccgtcaggatttcacagcgcgttatcagggaataaagcttccgttttcacggcttttggcacatttggaagaagatatcgcacagttacaggatctgattaaagcgggggatcgtgagttgtttgaagatattctggccaatacggtcagtcgtaaaatccgcggcaaaattaatgcttccaatgcatgggtagaaaagatgaatgcactgatgggcagcatgaatacatcgagtggcttaaagctgagccttcgctggcgcagcaagacggcagagagtgaaaaccagctggatacaaaagaactggtagaactgttaaagaaggattaccggttaatgagtgaagaagaggcagcacgcctgtccacacattttcgctcaaaagtcgaagaagcaagaaggagagcctcggacagtggcggtatgatttcgttttaccaggttatgaaagagacgttggattatcgtaagtggtttgaatttcaactgttttcccagaaaaagggagagcgtgttaaggagcttaccaacagtgtatttggaaccttcagtggcggagaaaaagcgatgtctatgtatgtaccgctgttttccgcagttgttgcaaaatatcagggaggacgtgcagatgcaccgcgtctggtttcgctggatgaggcatttgctggagttgataaccgtaacatccgtgacatgttccgtctcatgacagagttttcctttgattttattatcaattcacaggtgctttggggaaattgtgatacattggacgcgcttgccatctaccagttaatacgaccggaaaatgcaaaatttgtgacagtgatgccttatgtgtggaatgggcattccagagaacttatggaaagtgaagaggctgtagaacaacggagggcagagattgaacagacagcaggagcatagttgtattgcatattttaaatctaaccctgtgtgggacagagtttttcgtggattttgggaaaagtaccggtcttatggatctttttcgggaaaagttgtgctacaaaaaattacagcggaggaagtcgaaggacttgagggattttttgcaaagagttaccatgggaaaaagagtgtgacggtatcagcggagcgtttttcccaggcattgttaagcagcaggttttctaatatgacaccagagcatttgctggagttatattttcgggaaaaactggtaggtaaaaaagaagaacgacagttggaagaacagaaaaaagaccgttttttacaacactggaaggaaaaatatcagggaacacctgtggaaaaagtcttgtcagaactgctggatgtgataaaggcaggtcatataaaaaatttaaatgagtgggagcagtcattgatgcttggtgcagaaatctataattgttttccattcagaaaaaacgagacaaagtatcttgctgtttttgcaacggaaatcactggaaatccacatgcatttgatcaaaaaggttcctggggaacttttttgtatcaggtgatcccgatggaattgcggcagagaagggtattcccacagaaatcagaaatttttccagcatttttccggcaaagatgttttctggcagagggaatccttattgatgatatatcaaattatgtgatgttatcgcatgtaaaggctcagaaaaaggatggtgatttgcatacggggatggaagggttctggcaggaggatgatatggtacaggttccgcttgcagtcctttcaaagtggaacagcatattttgcaaagataatgaaatgtatatcgtggaaaatccgtccgtatttgcaggcctttgcgcagggcacacaaagcaggtttcctgtatgtgtatgaacgggcagccgcgattggcagggcttgttacgttagatcttctggcggcatcgggaacggtggtatattatgcgggagatctggatccggaggggcttttgattgcgcagaaaatttctgagtattatgcaggagaatttcattactggcacatgacagttgaggattatgaaaaaagcaagtcgaatgaaacaatttccgagaaacggataaaaagtctggaacgcatcacggatacagagttatttccggtggcagaaaaaatgcgcctggaccggctgaccggatatcaggaaaaaatagaaataaaatagaggcttctggcataatggtggaagcccagcaccataaattaataacaacatattgaaaaaaccacttgcgtcccttaatgtattaactgcgaagaaaaccacaaaaggagtattcacaagtggctttattctggcgatagcggcaggacgtgaagatgttttttgacaaaacgcgaattgtcaatttgataaaatagtattgtgctggaaaatgagaaggcgtatgataaaaatataagacatgtttaaagcggaggaaaagataaggaggcaattgatgaaaacaatcaaaaaaacaattctaagttttacacttgtattttttatgatgattttgccagtcggtgacagtgccggcatggtaacggcacaggcacagacaatggtctatgtgacgccaaccggcagtaaataccatacccacaaatgcgggcggggaaatttttatcagacgacactttccaatgcattggcacgcggtctgacaccgtgcaagaagtgttttggctcatcgggcggatattcgcagacgcggaaatcttccacgacaaccacgaagaagacaacgaagaaaaagaacaccagaccgaagataagtccgctgtcgatcagcagtacaaagattgtgcttgtaaaaggacagagcaggaaacttacggtaaagggtggtgcaggaatcgtttcctggggcagcagtaatacagcagtggctggtgtctccgccggaaaagtggtcgcaaaaggaaaaggcaaagcaaccattacggtaaagaagggaacgcagaagaaatcctgtcaggtgacagtagaaacgccggaactgaataagacagcagtggagatggacgtggaagatacggtttctctggatctgaagggatgcagtcatgacgtggaatggacatcttctgatgacgatatatgcgaggtagaggatggcatactgataccgtatagcagcggtacggttacagtcaaagcaaaagtacatggtatggtgtggaaatgcaaggttgttatcacagacagcacagaggatgactggaacgatgatttggatgatgattcggatgatgattcggaaaatgccgatgacggatatatggatgacgaagtggacgctgctgcataaaccagttgacagattcctttcggaagtataattataaaaaacaaagggcgatgttgttcagacactgccctttgttttttctggggaacttacaataacaagatatcttgatggacaattaccttcagttaaatatgtcgttgtgattccaaaggtatattggtataataaaggtactataagaaagagaatgtaaaaatgaagaaaagaataataacctaccgccagaaaatagattcactcttagccaatgcggacaatatctctccggaacaatggaacgcaattctgcaggaacacctgacacagattgtttttttccaacatgagaggctggtacatctgatcgtgacagttacatttgcgattctgacaatgatttcaattgtggcggcgcttatgatctgcaatccgttgttgtatgcattgacgttattgtttctggtgttgttgcgaatggttaaaggaaaataaaatattatgcaa

SEQ ID NO: 1077 - DNA, 2231 bp, Unknown
  gut microbiota DNA sequence
tcatggatattccctttccatgtatctcaagtctttctgcagatcatccggatcagcgccgcagcgttaaaacaatgagatacaaaaaagggcaagggctcgaacccttaccctctcatgagtgatactattttaatttgcaaaccaaaaaacaccgagaccgaaaagctaagcctgagcggtcaacttcttaaagaccttaatgccgatcgtaacagcaagaactgttccgatgataaccagcgcataaggaacagctgcggttaccatatcagtcgcaccggtctgaacctgtttaaaggctgacgtcatgctagtctggatgccggaaagatccattgttggtgctgtcgctaaaattgttgtcataagacactcctttctgatggtctatgccatcttaaaaaatttagtaaacgcgaaaatcgcgtagccaatcgcccatgcgataaagcccaatgtaaaaccaagtgctattccaaccaagagagaacctacataacagccgaaaagataatttgaaaaaatcatacgcacctctcaatcccacttccgggaaagaatcgaaaagaacaaaagtcctgcgattatcccgagagcaaataacactacaaaattatatgtgacatcctgcggctgttccggctgggtatcgtctaccacctgtatagattcttctacttccgtagtatcttccggggcatcttccggaaaatgatcttccggaagtgctgcttcagtcgaatcaacagttgcaaggatatattcaaacccgttatgacgggctataactaacattacttaccacctttcgggtttcctgcatccggggaatccttcatggatataagtgccggagcgacaaaatcaacgtccgtcagtttaagcaccggctttccgtcagatccaaccgtcatttcaaaggttccgtcatagatccccggcacgtaagacaccttatgcaccttgtcagccttaaggaaagacttaccgcgtctggtaccggaaacaccatccgcagataccacaggttcaacctgttccccatgctccccatagaaaagaaactccatggaaacaccttccaccgcgtcgtgaccttcacgcgcctttatatcaacaagtccactgtaaaataagaaaattctaaatttgttcatcgtaatcaatctccttttctacttcttcaattctctgtgccataagatgtacatcattaagcttatctttcaaatttcgcaaaagcttttgtgcatccccaaaagaattaagaaaacaatcaaaatttgtaagttgttcaaataatagtgtctgctttcgacgttgcttctcgatctgcttatccagccgcgcaagttctttcttccggtctgattctccgcgtttcgcctcgaggatgatattctcaaatttttcattaaatccgtttcccggcgcgctgtcgatataatcaaagacctcttgtgtcaagcggactgatttcgctatactttttttggtcaatgttcctccttttcgctagtaccatagcattcaaatcccacaaccccatgaccagccgcgtcgcgtctgatctgctcgaggatggcggcttgatgatcgtcaacgttgatccggagctttccgttactgttgaggtaccaagccgcctgcaatatgtcggataggcggcggctctcgtagcccggcgcccagagcgcgcgcagggtatgaccgcgacccataaccttatctaccgctaccaatctataccgattggggaaaactttctcgtagctccacacgctgtccatgaccaccacactcccttccaatcgctgtgcataagtgcaaaagccgcaattccgcctatgcatatcctgttgaaatgctatgcacagtccgggataacgccccagcggattccccgggcggaaaatccgctgtgtgctgtgcgcgttaccccggactgcacacaagcattacaacaaggatacgcacaaggctgcatgggactgcggtttttacacttacacacaagtgacgacggagtatgcggatatgtacctttgttgtcccccctcgtcaaacaatcggtatagattggtttggaaaagacgcggctaaaggtctacaaaggagacgcgcgcgctctgggcgccgggctacgagagccgccgcttttaaaaaaatcatcccacacaggcgacaggcacgggaatatgctgtcataagcatccggaacgaaaaaa

SEQ ID NO: 1078 - DNA, 941 bp, Unknown
  gut microbiota DNA sequence
cggataaacttcctctctgtccggtgatgttcttgtatccattgcaagcaatctctgtactacttcaaaatccctgtccgtgataatcggctcatggttcttttcaatccttacccattcgcatttttctttgattatggtctttttgaccttgtgattcggtgttgtctgttttccctgtacgagattacctatataaacctcatttgtaaggattctccttaccatgactgaagtccactccgacttttcttttgtcttaaagcatgtctgataattgcttcctgtgcttgctttatactcagccggtggaagtattcctgatgaattaagttcacatgcaattgcatcctgactttttccatgcaacttcattctgaaaatatctttcacaacatttgctgcatatacatcaatttccagtttgtgcttatctttgtctttctttttgtatccatatggcacaaatgccgtgattacatctccctgttttctcttaatttcaagatgtgaacgtatcttaattgaaatatcacgacagtaagcatcattaataagatttttgaatggaataataatctcatctgactgcgactttgcctctccggaatcaataccatcattgattgcaataaatcttactcccatagcagggaataatcgctcaatatacatacctgaatctatatattctcttccgaatctgctcagatccttagtgacaacgcaatcaattttgcctttcttaatatcttcaagcatcatctggaatgccggtcgctcaaaattagagccgctgaaaccatcatcaacatactcctgcacaacctcaatatcatttttgtttttgagaaaatctctaatcagtgatttctgatttgcgatactgttactctcagttttttcatgtgaagcaacagcgccatcttccttcgataaac

SEQ ID NO: 1079 - DNA, 554 bp, Unknown
  gut microbiota DNA sequence
ggtggcacaaccgtttaccttgcctgtggagctaccgatctgagaaaaagctatcacggactggctgcaattatcaagctgaaattcaaacttgatccctattcgcgctgcatgtttgcgttctgcaaccgcaggcggacttctattaagattctgcaatgggacggatctggtttctggattctgatgaagaggcttgacagggattcctttcactggtcggaaaccccggatgaattacagaaagtgaccatgaaagaaatgcattggctgtgtgatggtctttcacttactccgaagggagcttttgaagaacgtcatccaaagattgttgtataaagaacggatttgtcaattcgcaaaaaatacgaaatactcgtggatatcgatatatattcctacagtaaaacgttgatttttctcgaagtaacaggcttttttatgttatacttgaattatcacttaagagtttggagattgccggatggatccgttttttacagaggaacagctgaataacatgagccgtgaaaacatgatggaagttatgagaa

SEQ ID NO: 1080 - DNA, 350 bp, Unknown
  gut microbiota DNA sequence
ctgaagcttttcctcttctttgaaatgaaagttagtatactcatccagataatccagcattttgattgcttttagcttgctgtcgccattttgacatgcagttacaaagttctggatacgttcaatcaattctttatgctgtgtatcaattgttttatttcctgttattaaattgtcatcaaaagtaatatttaaatcataagtcataatctggtctccatttcttttttattttctcttggattctttttgtgtctgtcagtttcacatctaaattttctgcttactcttctaaaggaacaaaaacatcttttccaaatccatagattgggcatacccaatgctctgga

SEQ ID NO: 1081 - DNA, 4610 bp, Unknown
  gut microbiota DNA sequence
ccgaaggaacttctttcgccacaaatcatattcttttttatcgagggaagtccggttgatgatcctactgttttacaaaataggagtacaatgggggtacaaatcccatccacattccctaaaagccttgattttaagcctttccagccaaaagtacggtttctgggcaaattatagcatattgttgcaagtctattcttacaattccatcagaaaatgttcatgcagcgcacgtttcacctgatcgaaattacctcgctccggacattggatggaaacaaccaatcccttctctgggagaatcgttgtaatctgtccgaatgcgccatcagcacgataggatcctggatatggactgatccaaaactgatagccatatcctacatgccagagatctgcagatggctcgaaggtaaatttcggggtggacacctcctgcacccagtccctgctgacaatctgctcgcccttccagttaccctcagacagatagagctgtcccagtttcatcatctcggtacaagtcagatacatacctccgccgccattcggatgtccctgtggatcatgctcccagagcggccatcccatatcaaggggctggaataccttctcatacagatactctcccatccgcttgccaacggcccgttctaccatatgagcagccagaatactgtcggcagaggaatagcagaatgcactgcctggctgcacaggaaccggctgtgccatcatatatttctcataatccggtgcgccgacgcccggacgtctgtccgcattcatcagaagtgccttaccaaagccactggacatgcagagcagatgtttcaactgaatcttctccagatttggatccggatttgaaggaagtttatctttaaacacttccgccacatgatcttccaggcttagttttccctcttccattgcgagtccaactgctgttaccgtaaaactcttggtatgtgaataaatatttcttggtgcatttgctgcgtagtgcatctcacagagtaccttgttctcatctccgacactgatagcttccagcggcagattgtggctgctggcataacgatgaaattccaaaaacttctcttccagtaacataatacctctatcctttccggcaaatctctgatgtcagtccgatataaccgatgcgacgtgtcgcaaggttaaaaccaatctatctgacatctccaatctggttctattatctcatacacatctctgcatctgtcggcagtggcatcagcggtgcggacggcagggtctgataccaataagcaacactggtgtaatcatcgtaacgcggtccggtccagcccatgttgtcgagtgtcatacgaaacttattctcaaaacggatcgggtctgcaatatggaaatgatacagcaggaatctctgctgtccgttatagaattcccggttgtctccatagattgcatacatgccggtatataagccgctgaaagtctgatagctcttgatgatgatgtcatttccaaatccataggaaccgccgaagtagtcttcagttccggtatagtggatagacggatacggatcatcgtccagatacatgcgggcttcgccttctacccaacaggtattgttgccattcataccagttgccagagtcacaccaacaaattgtcccctgccttcgattccgtcaacgattgtgtaggtacgacccttctgaaccgggtgctcttggcgataggtggcatggaaataaccagcctccgccggaatctcctgataagctccggtgataatataatagagattttcatccttgtcaccacggttttccatcgtgatccgagctctcttatggaacggcatctcaaaatagctgttatagccgcgaccaggagctaccagcatcatggcagaattcaacaccggatatttgccatcccggtccacgaaattttcatcataggcacatccgaagaatgcagagagcggagcttccacagacggatattcctgatcatcccaatacatacggatgataaaatggtgcccgacatatccggtaaaccacatatgctggatcacacccggtcctgcagcatctaccagagttacggtttcccctgcaggaatcgtcacggtcggacgaagcttggtgcagtcaccgccctgggaaccacctgcgcgtacaccggttggattctctgcggaaaatgcaaacgttttggagttctggatcatacaatagttgttcatattcttctcctctctgatcaaacctggatcatctgaaattattgcttacttattcactataacatttatctcccatgaagtgacggaattacagaatcattccgtctgcgccttctcattttcttcccggataatctcctttctggcgttctgtacacgcgcattgccagtaaccacagccttgtcctcaaccttcacattcctacgaaataaattctttgacatattagttatatagtgttagtataattatagaaagggtgctaccgatagacggttagcccaagtaaattagtttgacaaaaatgccgcttagtttaccagacgtgggcggctatttttgtgtcttgttattatccttaccaaaggaatatccgattccaaagcaggttaagccgaagcttactactgcaataaagtcaacaatactcatatggcttagccctcctttccttggattcccttacgggtttctatgtaatcagagggtcacagtccctctgccgaaggactaaccgcctaccgttatggtagcacccatgagcaattgtatcagacagaattcaatttatcaattcctaaaatatttttaccaccctttaatctatctgttcgttactgttcagacgcaagcttgacaccacgctgtcaagctatgcgccatagtattaattattgagtgattacagcccatttaaaatgcctcgtagaggcattttaaatgggctgtaattgttgctggtaacaccgttagatgtgaacagtgacttatctagttcttatcagccgccagtatctgatcgatcgtcttcatcagctgcttatatgactcgtcattatcaataccgcccatgatcggctctccgataatatttccgttacggtcaagcacgattgtagtcgggaaggccataatgcttgttgcatattttccggcttcactgttggaatcaagggaaagattcgtatattttgcaccctgcttctctaaaatactcttagcttcagcaattccatcctcatttccgtcaagagaatctgtattgataccaattacctgtccgcctttttccttcagctcctcatttaatttattcagttccggaagctcctgtacacatggagaacatccattaaaccaaaaattcaaaaccgtgaccgcattctttgaaatgatgctgctgtccacgtcatttccatccagatcctttgcatgaaactctggaaatacgcttgctccctctttgccggaatccttatttgatgcattcgcactctgcttctcaagaagtggctgaagctcatcctcaagctttttgatttcttcaacatcttccttcaaagacttgagttcatcatcggtaaacttatccttaattttgtctaaagagtttgccagaaaatctccgtaattcgtagctgtcgcatccttgacagttgatttgtcaatgctgttaaataccttctcccataaagccttatggttttcaagaatactgttctctttctgtgtcaattcattaatctttgcatccagatcttctgcttcctgcgttgacatctgcgactctgttgctgtattttccttgttagcagaatttccgcacgcacttactccgagtaccatcgctgcaataagcagcattaccgttaatttcttcattttattctcctttattcattgtttgatttcatttgctttcctgaacgtttttactcatgggaagctttcttgtcgttcggtttcgaatttccaaatccatattgatagtgaattgcttccgtcgggcattcctttatacacatgccacagcggatacattccgtatggttcggatgctttgtgacatccacgtccatcttgcaggctctctcacatttgccgcaggatacacatttatcctcatccaccttcatctgcagaaaagataccttattgcaaagcgcatagattgcgcccagcggacatatccatttacagaatgggcggtaaaacataaggcttaggattgcaaaagtaataagtataccgaatttccatgtaaacagtttgccaagggccgctctgatacttgcattggcaatcgaaagcggaatcgctccctccagcactccctgcgggcaaagatatttacagaaaaacggatttcccattcccagtgaatttgtcaccagaaggggtagtaaaataacaaaaatcaacaacacgccatattttatataacgaagcggcttaagctttttcgttgaaaattttttaaacggtatcttatgcagcagctcctgaaaccatccgaacggacataaaaatccgcacacaaatcgtccgagcaaaacgccgatcaatataaaaaatccc

SEQ ID NO: 1082 - DNA, 2450 bp, Unknown
  gut microbiota DNA sequence
acacgcccctgatgcagccggacaggaataacaattcagtcccggtacacagacggtctttgcatcccctctgtaaatctctcctttaaagaagttcggcagatggatattggtaagaatcgttgccacggcctgaatccatccccgaaagtgcgccagaaactgtgatattttatgttttttcttatccaattccaacacactccagacataatttgattgcctttgagagtaccgtggctgcctccccgcgcatcgcaccgtatccgatcatcaggatcgctgctgccagaagcgtgatctgcgctgctgctctgtttatctgtttcatatcctttcccttcctaagttttaacattttgtcgttgtttacgatgataatagattagcaaaggaatatgaacaccctgtgtttgaaaaaggaagatatctttaagatttgcgctctaattcttaagaaattattgagaacttctcaagcagtcccaccttattacaaagcagttttcgtattttccatgattaacggggtcagaccccaatgtgctgtaatattacttgtcccaagtccaactctaccgcacatatcactggcatctttatctactgcaagatctaatttctccaataatgccatacgccttttatccaacatggtctcgctttttatttgactcaacggaagatttgtcgctatgatcaaaggtcgtcccgaacggattctgcggtctatgacactgaaaataattcctaatgcatattctgaatttcgttccactccaagatcatcaataatcaaaagctgataggaagccaatgcattgatatattccgttttatccaccagtggaaatatatcgtcgataatggtattaaaatttgtcatctttcaattgtttcaatcgtttatctatatcatctgcatatcctattttcacataatccggaaaagaaggatttgtgagaatgtatattacgccttttttgtcattcatatccgctttctccatttataacttaattctttgtttgccttttcccaaaagtcattttactattatatagtctggaaattagctcgtttaatattcaatcctaaaataatccaaatacgccttatacttatcttgtgctgtcagacaggtatcggtcagataacctttttcgttgttccattccttcaatccacgataatagaacagcttcaaattatcctcaataatgaacggaacaatattgtatttcagacactccttaaacataatcaatctgcccacgcgtccattaccatcctggaacggatgaattcgctcaaacttcacatggaagtcaagaatatccgcaaaggccttttcttttttgacgttgtattccgttaacaatgccttcattttatcggcaacttcttccggaagggcggtatccatgccgccgacttcattcggaagtttcttataatcgccaacagcaaaccaatcttttctggaatcactggtgccattcttcaaaaccaagtgaatttctttgatgaacttctccgtcaaagtcgcttttgcatgatcaataatcatgtcaatgcaacggaagtgatttgccgtttcgatcacatcatccacattcagtacttctttttctacgccaatagtattggtttcaaagatatatctggtttgatcgtgtgtcaagcggctgccttccatatggttagagttataggtcaagtcaatctgtgtcttatgataaatcccaccagtatatttactggtcttctgctcttttagaatatctagcagcgtaatcggttcttcttttttcttattggtgcgctccggtttctctgcgttttctggaatgttccatgtcttaccagtaagaaacgcgccgttcacacgcccctttgcacagtaatttctaacactgcgttctgacatattccatttttttgctatatcagcaactaaaaggtatttcatctgccatcccccatccattataaattaaatccaaaacatactaatctactgactagtatatcacactatcggcaaaaacactatcgttttttacctatttatcacgctttttagccgatataacaactgtttcctagtcgaatagctttattaaaacggatgctataaatagctaatattctttcaaatgatgagtttataccttatatcgtctaataagttttactttcattttcgcacatgatcatgaggctttttcgttctaattgtgcgattatacgtaaaaagatgactgttcttaatcaaaataaaaatggcgaagtgcttatcgtaacactccgccaaaagtcccaccaggttgcgcatgaaaaatcagaggcattccgtaattacttttacagtttctaccatatacccctgatgtctaaattctttccttaataccaattctttccctgccggaatgtactacaatct

SEQ ID NO: 1083 - DNA, 162 bp, Unknown
  gut microbiota DNA sequence
tcttctgattcagataaaccattccggtaatggatcatttcctgtatcagggaatgcatctgcctgttccatgtacggtctttttcgttgtccatgctgtctttcagataacgcagtacatgtgcaaggcattcctggtggccggttccatacttataaaag

SEQ ID NO: 1084 - DNA, 269 bp, Unknown
  gut microbiota DNA sequence
gtgaatcttccggatgggaatggactggaatttgtaaggtggatgagatgcaattataatacatacattatttgtcttacagcactagatcaggagatggatcaggtcatgggatatgaagcaggggcagatgattatattacaaagccgtttagtctttcggtacttcttttgaaaatagaagcacatttccgccgcagacaggagaaaacggaagccggaaagatgatttcgggagatatcgtatttatcgcaggagaaatgaaagt

SEQ ID NO: 1085 - DNA, 180 bp, Unknown
  gut microbiota DNA sequence
cttgccgtcttatttttagatctttttggttaataaagcttacgccattgcaggctctttcttcttaataatcgcttcaacttcatcaacacctatttcagctacatctgcgatctgatccaatgtataaccctttttatacatattcagaataaacttttcgcttgttttttcagtagc

SEQ ID NO: 1086 - DNA, 324 bp, Unknown
  gut microbiota DNA sequence
ggcagtggaatttaaaatttcattttaggtgatataaaacaacattcacagtagattgacttttagcatacgatagtgtatatttaaattacaaagagaagatactacagtcggaacggagacttaaaacccgtttccagtggtcgggatgaagacctaaaactcattcccattacagagtaaactgctaaaaatcaaaggcggatggcttcggtcatccgtctttctttaaccaaggagataaaatggaagaggaaagttttaaggaacgtgcccgacaggaaatgataaaagctgcaaaacagtataaggacatctatgttg

SEQ ID NO: 1087 - DNA, 3682 bp, Unknown
  gut microbiota DNA sequence
ttttatcaaaaggctttagtttggctctatttgtgggaacaataaatgataaatagaagaaatttaataaggagcattatatgaccaaagtgaatttttatgatagcattgatgattcaatgttaaagtttgcagttattattgcaaaacataatgggaaatgggtattctgcaagcatagagaaagaagtacatgggaagtgccgggaggacatagagaacaaggtgaggatattcttgaaacagcaaagagagaattgtatgaggaaacaggagccattaattttgagataaatccgatatgtatttattctgtgacggtgccagacaactttaaggggaaagaaacctttggaaagttatttttcgcggagatacatacgtttgaaaaagatttacatagtgagatagagaaaatagcaattatgaatgaactaccgcttaattggacatatccggaaattcaaccaagactgctagaagaagcgagacaaagaggatttttgcctaagaaggatgaaataaaatggttattttttgatgttggttcgacgctggttgatgaaagtagcgtttatgaagataggatgaaaaaaatagctgaattatctggtataactccgcaacaaatttatgaacatgcgatatcattgtacaggagaaataaaaaaggtgatttagagatagcaaaacaattgaggatagaactacctaaatgggaatcacaatatgaaaagctgtatacagattcagaagattgcctgaaaaggttaagcagaaattatgaaattggtataatcgcaaaccaaccattaggaacttctgaaagattagaaaatctcggagtgcgaaaatatattgatttagtcattgcatcagcagaagaaggtgtttcaaaaccggacagacgtatatttgaaattgctttggaaagaagtggctgtaagccggaaaatgcggtaatgattggtgaccgcattgataatgatattgtaccagcaaaacagttaggaatgaaaacgatatggataaaacagggatttggaagtttgtggactgtaatggaagagagtgaaaaagccgatattgaagttaataacctatctgacattttgaattatctataggagggaaagtgaatgttcaaggttgccatactacaaaaacgtgccattaatgcaaaaatagataagaatattgaaactatcattatggcaatggaagaggcttcggaaaaccatgcagatattcttttattgacggaatgctttattacaggatatgatttacctatgtcatatgaaaaaagtatttccgatgatgatataagaattgcaaaaatatgtaagtatgcaaaaaaatataaaattggagtagtactaacttcatttacgaaagggagtaagcaaccgcagaactcagcctttgttatcaataagtcgggtaatatattgatgaaatactctaaggtgcatacctgtgatttcgcagatgaaagagatgttgaatcagggaaagaatttaaagtgtgtgattttgaaggaatacaatttggtattatgatttgttatgacagagagttcccagaaagtgcaagaatactgatgttaaaaggagctgaggttattcttgtcccaaatgattgcggttctatgcaaccaagaatcagggcactttcgacaagagcttatgaaaatatggttgcagtcgctatggcaaatccgaatggagataatgctggatgttcctgcgcatatagtccaatttgctgggatagaaacggaaaatgtgttgataacacagttttgctggctgatgataaaactgaggggattttttatgcggagtttgatatggaagctattagagaatacaggaatcgggaaatgttaggaaacacgtttcgtaaggtagaagcatacagtcagttgttaagtaaagaaatcaagaaaccatttataagggatgggcagaatagataagccaaggggagagtgctttatgtcagtaatgggcgtatttcccataagcaggcagtggagaaagcatatcaggaatatgatatttttaacaagacacagccgatagaatctgattttgataagatagtaaaaggattggaaaagaaagaataattacttttttggattatgtgattatgatacaattacggaaaatagtgttttatgaatctgatcaatcgaattttttgtgtaaaggagaactttatgaaaaagatattagtgacaggcggaacaacttttgtaagtaaatatgtggcagaatattttgtgaatgtgggttatgaagtttttgtacttaacagaaattctaagccacaagttcagggtgtaaaactcattgaaggagataggcataatttgggtggtgtattaaaggatacattctttgatgttgtagcggatataacagcctataatgataacgatataattgattttgttagggaattgggttcttttgatcagtatattatgattagttcaagtgctgtttatcctgagtatggtgttcagccattcctggaagaatcagagaaatccgaaaataaattttggggttcatacggaaccgataaaatagcagctgaaaaggcattacttgaaagagtgaaagatgcatatatattaagaccgccttatttatatggaccaatgaataacgtgtatagagaggcttttgtatttgattgtgccttggcggacagaaaattctatttacctaaagatggcagtatgaaattacaattctttcatgtaaaagatttatgcaggttgatggaggtaataattaaagacaagccacaagagcgtattttaaatgttggtaatgttgaagcagtttctattaaagattgggtcacaaaatgctatgaaagcttaggaaaaataccggattttgtaaatgtttatgaagatattgaacagcgaaattatttcagtttttacaactatgagtactatttggatgtatcgcgtcaaaacaaaatatacccagaaaccatatcattagaagacggattgagggatagtgttaaatggtatttggaacatagcacagaagttaataagaaaccttattttaaatatataaatgaaaatctagtggaggattaattacaaaagctatcaaagattatcagcgattaaagaaagatgaagcagatcggttagcgattggatgggatgtaaagagagaactttcaaaaataaactatcgtatccacacggatgcagtaaaagaatttttgataagtttcatttgaaaatggggtttgcggaagcaaatagaattatttgttttacgaaaaggttaacagatttagaggagtagtatgtgatggcgaaaaactatgaatataaaaaagcaaccatagcagacattgatgaacttgtaaggactagaattatcgtccttcgtactgccaataaactatcgaatgatgtggatatgtcattggtggaaaaagaatcctatgagtattataagaacgcattagaaaccggtgagcatattgcgtatctggtgtatgataacggggcatttatcggtgcaggtggtgtcagtttttatcaggtaatgcccacctaccataatccaacaggtaaaaaggcttacattatgaatatgtatacggcacctgaatatcgcagacaaagaa

SEQ ID NO: 1088 - DNA, 230 bp, Unknown
  gut microbiota DNA sequence
actacgcggtctatctctttttgcttaatttcacttgcaaagtcaagtaaactatctataattacttttcattggcgatatcccagcaatatttctaaaactccaaactatccgcattgagcagaaaatacttcattcccatgattacaaagccttcctcatttctccaaggcttttttgttccgtttactaccacgatctttttaaatgaatcagggatatttctaaat

SEQ ID NO: 1089 - DNA, 525 bp, Unknown
  gut microbiota DNA sequence
ttcacaggtgacaagagagttttatgcaacagtacagaataagatgcattatgcagttcatggtaatacagtggcagaagtgatagtggcaagagctgatcataataaggaacatatgggacttaaatcatggaaaaatgcgccggatggtaaaatagtaaaaacagatgtgtcaattgcaaaaaactacttagaaaaagaagaacttgcagaattaaatgagattgtgacaatgtatcttgattatgcaacaagacaggcacgaagacatattcctatgactatggaagattggaaaacaaagcttgacgcatttcttagatttaatgatgcagaagtacttcaggataaagggaaagttactgcagctattgcgaaagaatttgcggaaagtgaatttgagaagtacagagttatacaggattcattgtatgaaagtgactttgataaattgatgaatgatatggagaaggatggtactaacgattagtaccgctgacttgaaaaagtaaattccagtgcaag

SEQ ID NO: 1090 - DNA, 1547 bp, Unknown
  gut microbiota DNA sequence
aattcggtgtgtcagactaaattccaccagccacatttaaaaaatgtgaaatgtttacttccagtctgacagcagatttcgatcagttaattagttacttcttaaagcgtatcagcttaggcgttaaattgacttcatctggtgaaatcggcttgagctgaaaggctttaagaacatcttctccaagtgtttcccgggcagcatcatacggcgttttgccgtcaaggctttctcttggagtagagtttatgtgattcacaataagattgacatcccattgggttagaaattcaaaggatgttcctttaggcaatatcatgcggagcatggtatgcgcctgttcgatggttcctttttgtccgctacgcattggatcacagtaataaatgctgcttctttgtatgccggtaattccagtttctaattcttctgggttcccaaattcagagccacggtcggttaagatattttcaaaaacagatgtaaattcatacgttcccatacgtttttccaaacggtcaaatacagcacggacggcaccttttgtgcaccggttaataagaaatgcaagaaacagtttttcctctgtaaagatcatggttaacagcgttttctgggagtcccttgatgactttactgtgtccatttgtacataagaatttaattccaaagaacagaagtctgcataggttctgttggtaaatacttcgcggtctttgatctgtgttttgtggcactttcttggtttgaattttgcctgccttttcagatccacatttctggctgtgaacagtcccttatcgatgtatgtgtacatggagcggacagacatatccagttccggatgattgatcaggatctgatagggtgactgtccctgtgcgatcaacggagtaacaatctggtctttttggtgcagctgatgccgggtcatatttatcccggcacgggaactacttaataattcgcggtacttacggtcggcaaaacgggcatcatagcggtatttatgggcaatggtacaatgattgattttcattggacagccattacatacataaggcgccttatcaagtctgcagcaccgttccttttcgaaatccttacaggtttggttgcaggttggacaggatgtacatttaataccgcagagcatgatttttccacaggcatttgtttttttttacagtgatagcggtgtacacaaaagtttttggcattgtagaaagttcctttgtggtaccagtcagaaaggcgtcgtgatttaacctcttttgagatggttgtaggatctttacaaaggaatgccgcaatgtctttaaaagtcgcacctttggataattcgttttcgatgtagatacggtcattaagtgttagatgtttctggtttccagggatatatttactcatgataattctccttctactgctgtcagaaggaacttttacaataacactgatgtatgaaagagtaaatatctactgtgcaggactaaattctaccgccctgtgggcatgcggacgaaaagttggactgtgtaatgcct

SEQ ID NO: 1091 - DNA, 605 bp, Unknown
  gut microbiota DNA sequence
gcgcctatcacaataccaaaacatgaaccgatcaaaaaagtatatgtagaaatggtaaggcagattgtagaaagcgaggcggagaatgatgaagacgctgaatgattatatggcaatgtcctatcgtatggaaattatagaagataaggatgaggggggatttgtggtttcttatccggatctgccagggtgtattacctgtggagaaactgtagaaagtgcagtagaaaatgcgttagatgcaaaaaaggcatggcttgaagctgcattagaagatggtgtagagattcatgagccagatagtctggaggattattccgggcaattcaaattgagaattccacgaagtctgcacagatcgttggcagaacattcccagagagaaggaatcagcatgaatcagtattgtgtatatcttctttccaaaaatgatgcggtgttttcaaaataagatgatgcagcaaaaatgtaaatgaaatgggatgcttttcagttgcgtgaattgatgaatatagattgcagataagaaacagaaatcagcaaatcagcgggtacaatatgcccgctgattttttcgttacatgaaaagggcgattcgttacatt

SEQ ID NO: 1092 - DNA, 159 bp, Unknown
  gut microbiota DNA sequence
atcttatccctcccaccaaatgaaaatcttccattttgatatgcccttgctatcacataggatgattcataaaatgcactacaattataattatcatatttcctcttccagtgcatagtcttttatccagtcatcttctacttttagcggattttcaca

SEQ ID NO: 1093 - DNA, 914 bp, Unknown
  gut microbiota DNA sequence
tgaaaacaatttataaagaaagaaaaggaaatcttaagggaatctaaattgacttgccacataaatttatataaaataaaaggtgaaattggcagagattatttcagatgaagaggaggaattttatatgatatgtccgaagtgcggcagtgaaatgccggatgacagtgcgttctgcaccagatgtggagccagcttacatacaggaacacaggaaaatcagaattcgcagggaggaccacagcagggaaatccgcaggggacgccatacggctacggaaatccacagggaaacaacggagcgtattatggcaatccacagatgaacaatggtatgccgtacgggcagccttatgtagatccaaaggatcattccgcagaatttgacggaaaggatattgcagatcacaaactgtttgcaatgcttccatatcttctgggaattttgggaaccatcgtggcacttcttgtggcaaaggattctccttatgtcggatttcatgtgcgtgagggaatcaggatccttgtgtctgaagttctgctgggactgattaccgtagtgttctgctggaccgttgtagttccgattgcagcaaccgtatgttttatcattttactggttgtccgtatcatcagttttgttaacgtctgcaatggaaaggcaaaggaagctgctatagtcagcaatttcggatttttgaaataacttataaagatccaatgaaaaagagaagaagattctgcatgctatgtaagaatcttcttctcttttttgtggaaacatgggatgtttaattgagaagaatggaaaaagtcagggaatttccatcttcacttttggcagaaattttccctttgtgtgcggttgcaatggcatggactacggaaagtccgataccgtgtccatcggtttt

SEQ ID NO: 1094 - DNA, 225 bp, Unknown
  gut microbiota DNA sequence
ataattgcagccagtccgtgatagctttttctcagatcggtagctccacaggcaaggtaaacggttgtgccacccgccagatcaagcatgatctttcagtccctggatcagaacacgaaaaagttccggcgggcattccggcatcacttcaatccgaatagcgtttgtgataaaaatgcggactggagacgggctgatgttcaaagtctcattctttgaaatttc

SEQ ID NO: 1095 - DNA, 312 bp, Unknown
  gut microbiota DNA sequence
agtcaatgggatgtttccaaagagaaagaaatcattataggtgtctaccgacttaccatgaaaagcaattctgacaacttccgccagagcagtattcaaggtgtcatgaagcgtatcaaggcgaagggcgcaactgttatcatttacgaaccaactctcgaagatggtgtcacctttttcggaagtaaagttgtaaataatctggatcagttcaaaaaaatgagtcatagcattattgcaaaccgctatgactctaatttggatgatgtacatgataaagtgtatacacgtgatttatttcaacgtgattaa

SEQ ID NO: 1096 - DNA, 3345 bp, Unknown
  gut microbiota DNA sequence
gacgagggttattcttctcctgatgttctgcgcaaggttaagtttttgaaaaaggataatgctccggtacttccgcttacagaatgggaagttgatttgatagatggtttgtttaacatcaaaacagaatccgggcttagaaatctttgtatagttcatttgatgcttgatgctggttttcgtgtgggtgatgtgatttctcttacatttaagggaatcaattttcaacttaattatttaatggtgaagggtaaaggtgataaattccgtactgtgttcctgtgctccaagctgaaaaggatgctttatcattatcttgtgaagtttcgttcttatacttcgggagatgattttactgtttttgttaaggttggtacttcatgccctatcaatgagaatgttattaaacagcttttttcccggattaagagaaaatctggtattgagcgtgtacatcctcatttgcttcgacatacatttgctacgtcatttatagttggtggtggtgatctggaatatttgcgtatgatgttaggtcatacagattatgctacaacaaaaatgtatgttcatattgcccagcagtctaaaatgctgcatagcgatatatacagattagattcggtattctttaaaactggttattaaggaggatttttatgagtttagatgagtttacagtaatgcttgatgaatatgtggttgttgatccggtggatggtttttgctatttttggtcgaaatcaaagtttgaagctgatctttttttcaaagtgaataaatcattacgtgcttctcttctgcatgtataatgtgttgtatctcaattctttttcctggttccggagcttcagcaagaattgagatacattattttttgcaataaaaaaacccccaacgaatcacagtgttcgtcaagagttcttttcacaacttcgtttatttatctaaaaatgttactgaaatcgtttagtgcgcgatcaggggttcgaaccctggacaccctgattaagagtcaggtgctctgccagctgagctaatcgcgcatttttaagttgtttgttttgtgtctttccttaagacaagaattattatataataggagtattaaaaaagcaagcactttttttattttttttaaatttttttaaaagcatatttgaaaggaacaatttaacatgaaagtagaagaaagattactaaaatatgtcagctgctggaccacctcagatgaatcctgcagcgatatcccaagcagcgagcgtgagtttacacttgccaaagatttaaagcaggaactggaaacactcggccttaccaatatccttcttaccgatcactgctatgtgtatgccaagcttccagccacaccgggcatggaaaactgtaagtccatcggctttatcgctcacatggataccgccccggatttttccggaaaggatgtcaaaccacagatcattcccaattatgacggtggcgatgtcctgttaaaaggcagtcagaatgttttaaaggtaagcgattttccatcccttacttctttaaaaggaagaaccctgatcactacagacggcaccacacttctgggtgctgatgacaaggcaggtgttgccgaaatcatgacagccgtggaagaactgattgcagaaggtacaccacacggggatgtctggatcggatttacaccggacgaagaagtcggtgcaggtgcaaatctgtttgaccttgctatctttcaggcagattatgcatacacggtggacggtgattacgaaggcgaagtggcttacgaaaattttaatgccgcaagtgccatctttcatataaagggtgtgaatgtccatccgggcgaagcgaaagacattatggtcaatgcagcactggtgggatgtgaaattgtttcccggcttccggaagcggaaacgccggcacacaccagcggccgggaaggattctatcatctgaccgatatgtccggagatgtggcttccgccaccctttcctttatcattcgtgaccatgataaaaccacatttgagaaacgtctgcagaatctgcgtgaccttgcacaatccatgaatcagaaatatggatcggaaaccgtcacgctcgacatcgaacattcgtatgagaatatgctctctgtcattgaggataaaatggagatcgtggatctggcaaaacaggcaattgcctccgaaggtctgacaccgctctcccgtccgatccgtggcggtacagacggcgcaagactgtcctttatgggattgccgtgtccaaatctcggtaccggcgggtacggtttccacggcccatatgaacatatctctgtggaaggtatgcagaccgctgttcgtattttaaaaaatattgccacccatccgatctgtaaataaatttataaaaaaccgtccgcagttttctttctgcggacagtttttgttctataacttattaaattttctaatttccctgcatatttgcagattttgcaagtacgggtttctggaacatacgaaagagtccaatctgttctaaggcctttgtgattgcaaaaaagatcactgaatcaattggccacataatcaggttcttcagcgcacgtgccggaagaagcaccataaatgcctgtccatataacacattcagacaaagtgttgtcagaatcacgttacagaccagcataactacaaatttagctgccagcacacgccagatcgtaagctttttcttataaaaaaagcatccatacaggattccggccagtataacaaccagcgtcagctgtggacaaaatggtccagttggcttcatcatatacttgataatatccaacgcaccatggaaaattcctccaaccaccggtccaaacagataatcaatgataccatttggaatactggaaaaaccaatccgaataaactgcccatattcaatggagaaaaatcctagaatgacagcaactgcagcaagcattgccatggtagtgatggttcttaccgcttttaattcacggaaagaatcggtgaacaaagtaacgaattttttcataaaaaaattacctcctttgcagacctcaccgtactacaactggagataatattatcttcggatgcagcgggatgcgactcatgtaccgcaagattctcttttcgtccgggtgacaactccctgttcatccggcacttaacgcacatgtgtctactctgctttaaactattaaattgcaacgacctaagtataacacaatgaaaaagaaatgcaactacatttttccattttgtgacaaaacgccatctgtcacacgtttttacgtggaacaaatggcgttatccgttattt

SEQ ID NO: 1097 - DNA, 499 bp, Unknown
  gut microbiota DNA sequence
atacttgcaaacaacgcggctatctcatccgggcttaatgccttattcggatcagccggttcttccggctgaagcggtgcttcttttacggcttccggctcttcgaccggctccggaatatcctccggttccacagtttcctcggcaggttcctcaactttatccgcattgttatcgttgcccatattcgcaaacagcgcagctatctcatccgggctcatggaacggtttggatcggacaagtccggcatcggtgaaagttcttcctccggcaggttctcatcattcgcttcatcaacaatcgcatcctccggaatcggatccggctctaccagttcttctgcttcctcaatggattcttccgggtccggcgggataatctcatccgctgccatgactggaggctcttcctccggctcaaaactctcttcttccggtatatccggcagaatctccggttccatatcttcttccggctccagcgaaatctccggttcca

SEQ ID NO: 1098 - DNA, 8673 bp, Unknown
  gut microbiota DNA sequence
cttgcctttcatgcagttcacgaaatggccgccgaggcacttctcacagttctggtgcgtgtttggattgttcagcatgtggttcgggcagaccagctggtagtcatgtgccgtgaagatgatcttacaatcccttccggtctccttgcgccacttcacgatttctaggatgatggaaggtgtcagctggtagttgaagttgttcagatgacagacatccggcttgaagtcgaccagaacttttctcagctgcactcttgcttccttgctgtagatagttttgatggggtaggtcagcttgctcagtttgctgccgccgtggaagtccataccagatgtataagcattgacccggttgcccacgcagcggccttcatgctccataccgaagtactgaacctcatgtccgtgctgctctagcgcctcacccagcttaaatatgtaggtttctgatccaccatttggatatagaaatttatttattatcaatactctcatctattattttctcctgtacagtttcatcgtttcctttacaacttcatcccagttatatttctcgcagataaagtcagctgcctgattcttcattttcataaccatttcaggatggtcacaggcctcttgcagtttttctcgcaagtcctctacatccgactttttgaaaatcaatgccttatcttccacaacctctgtgcactctggaatgtcggaaaccagacagcagttgccgtagctcattgcttccagtagacttagcggcattccttccagatcggacggcagcgtgtaaatgtaagcattgctgtatagttcatccagcattgctccctgtacaaacccggtaaagagaatccgatcgtcgcccttcgccaggtctttcaattcctccataaaggaatccgtatcactggagccgcctgcaatgaccaattttttatctgtcttgacattcttgaaggcctcaaccagatatcgaatccccttctccggcaccagacgaccgaggaacagtatataggagtctttttccagtccaaaatgatccgtgatcagctttgcttcccgaatctgcggcctattcacgccattagggataaagtgcgtttctcttccataagttttcttaaaatagtcctgcactcctttgctcagaacaatgacctcgtccgcatatttcgcagcatttttttcgccttggtggataaacttagaaccaagtcctgattgccatttctcgcgctgccaatcaatgccatggacggtaacaacaactctttttccaaacatcttcggcagccatgcaaagaacgctggtccttcggcgtggatgtgcaccacatcgtattttccaaatgcactataaagtgccgcaaatgcggaggagctgactgcagcaagtccgcgtcgttcaatggtcggaacaaacttctgacggattccctcgtactccgttttaccagcatcgtcatattctgcaccactcacatgatggcctgctctgttgtagcaggtcacgtcacaaccattctgtaccattcgggtgcagagctctttgacaacgatttctactccgccttctctcgataatcgcttctgtccgaacatcgcaatcgcaagtttcttactcataaatctttcccacaatcccactcaatttcttcatcaatatctcggtcaacacaaagagcggataggctcgtgcacctgtccgctggctgtcaccccaccctcatggtcgagatttcttcctgtgcggcatttctgccgctcagaaagatcattcgttcattcttcgggtaagaaaatatgaacttcgggtcgcggagcctttcgttctctgccgtacccttgtccctattatgacagccgcgtattatatctctagccccgcgccgttcaatggtcggaacagacttctgacggattccctcgtactccgttttaccagcatcgtcatattccgcaccgctcacatgatgtcccgatctgttgtagcatgtcacctgacagccctgctgcgccatccgtgtgcacagctcttttaccacgatctccacgccgccctctctcgaccaccttttgtggccaaaaacagcaagcctcaatttctctttcattttccctttcctgtcgctttccccatttagggatctcatccccataccgtgccaaactccggcccgatttcctttacatcagaaaaagcccggacgcatttacgcccaggtttttgactgatttacgccgcaattcattgacattttatttccagaatcatcaatatcaatttcgtaaatgtatttattgacactaaaaatattttaccattttttcctctggggtacaatactttgcagctgtatcattgcctgcatcatggctaagatttccgtactttattccgtttttttgttgcaacctattcattttggaaaggaactcgttccattgctttttgtagcaaaaaaacacccttcttctcacggaaacccgcaaaaggaagggtgttgaactcgttatcctgttgtcgtaccaatcacagcatgttcgtatcagcaaagccaatactagttgtcattcagcacggcacctcaagcacttttgagcgtagagctgtgattagcagttctcagcgaagtacttaatggtacggaccatctgagaggtgtaggagttctcgttgtcgtaccaagacacgacctgaacctgataggtgtcgtcgtcgatcttagcgaccatggtctgggtagcatcgaacagagagccgtaacgcatgccgatgacatcggaagaaacgatctgatcctcgttgtagccgaaggactcagaagtagcagccttcatagcagcattgatggactccttggtgacgtccttgcccttgacgacagcaaccagaatggtggtagagccggtgggaacaggcacacgctgagcagaaccgatcagcttgccgttcagctcggggatgaccaggccgatagccttagcagcgccggtggtgttgggaacgatgttctgtgcgccagcacgagcacggcgcagatcgcccttgcgctgaggaccatccaggatcatctggtcgccggtgtaagcatgaacagtggtcatgataccggagacgatggggtaggtcttgttcagggtgttagccatgggagccaggcagttggtggtgcaggaagcagcagaaatgacctgatcctcagcggtcagggtcttctcgttgacggagaagacaatggtcttcagatcgttgcctgcgggagcagagataacgaccttctttgcgccagcctgaatgtgagccatgctcttctccttgctggtgtagaagccggtgcactccagaacgacatcaacgttcagttcgccccagggagcgtcctttgcgtccttaacagcgtagatcttgatctccttgccgtcaacaatgatggagtcctcggtagcctcgacggtgtgcttgccctcgccgatcttgccgcagaaagaaccctgagcagtatcgtacttcagcaggtgagccagcatcttggggctggtcaggtcgttgattgcgacgacctcgtaaccctcagcatcaaacatctgacggaaagccagacgaccaatacgaccgaaaccattgatagcaactctaacagccatgttaatagtacctcctaattattttacccataatcggataaatcacggtatctttattttagaccaaaacgcagaaagtttcaagtgtctgccaaaaaattaacaagacattcactgcattttttgcttttgtacgattttaattcctttcattccctgcttttcggcaattgcgccaacagagtgccaatatttttgtcagctctccccgttcaagcaggctgtaacgcacgctccgccaatgccgcccacgcagcaaaggcccagtccggcaaagatctccggccagacagccggtgcggcccagctcaggccgctcatcaaaaccagtacgtagggcagctgccagcacaggcaaagtgcaaatgcggcaagcccggctgcgcacagtgttttgccattgcccggctgcgggacatgcagcgcccgggccagcgctgccaaaaacaccagtgccgcaagcgcctgccacaccgccgctgtaggggtcacgcggtgccagctggagctgttctccataaagcgcagcagcacgttccagtagaacagcagactgcccgccacggccagatacagcccgccaaagggctttttccactcgttggggctgagccagcagcggcccatagtgctgagccacgcggagcacagacattccagaatgcaccgcacaaagccgcccagaccggaagctgcgcccagcgcgatctgtgcacccgctgcggccagaaaacatactgcaccgacaaaagccagaataccggccagcggcctgcggctacgcaccgcttccgagcgggaaggctgtgtacggcccacaagcactgcagccagcaccacgatacccagtgccagatagcgccaccacaccgagccgaccacgcacagaccggtaacggcatcggtgccaaaggcaaggtctgccgcgcgcagcacgcccagcagaatgctcaggataaaaacgaacaaaacagaaggattcatcagcgttcctcgatcggcttatatttctggcgcacgcccagatacttgtaagcgggacgaatgatacggttggcgaataccacctcttccacgcggtgtgcacaccagccgggcacacgggcaatggcgaacagcggggtgtagatatcctcagagatgcccagcatgttgtagatcaggccgctgaacaggtccacgttggcgcacaccggcttggtgctgcccttttcctcggcaaagatgccgggggccagccgttcgatgctgcacagcatattatactcttcctcaaagcctttgtcgtaggccagatggcgggcgcgctgcttcaggaccacctcacgagggtcgctgatggtgtacaccgcgtggcccatgccgtagatcaggccggagccatcgcccgcctgcttgcgcaggatgcggcgcagatactcgcgcacctcatcgtcgtcctcggggttttccacatgcttgaggatatccttcagctgacgattcaccatcaggttggcaccgccgtgcttggggcccttcagtgcaccgatggccgccgcgattgcggagtaggtatcggttccggaggaggacagcacacgggtggtaaaggtggagcagttgccgccgccgtggtcggcgtgcaccagcaggcacatatccagcagctttgcttcctcgtgggtgaacttctggtccggacggtaggtgctcaggatgtgctctgccgtgctctggccgggcttgggcaggtggaagaacatgctctgcttatcgtagtagcggcgcttcatctggtaagcgttcaccatcatggtgggcatgctggcgatcagattgatactctggctcaggatgttctccagactcagatcctcggcgtgctcatcataagagtaaaggcccagcacgcagcgctgtagcttattcatgatattgggcgagggggcgttcatggtgtccatgaagccttccggcagggcgcggtgctctgccaggatctcacagaaatcgtccagttgctcccggttgggcagactgccgaacagcagcagccagatcacctcttcaaacacaaagcggtcattgcggtaggcctcgtccacgatctcgttgatgttcacaccgcggtagatcagcttgccgggagtggggatcacatggccttcctgatcctttttatagcccacaacgtcgcagacgttggtcaggccggccagcacaccggtgccatccgggttgcgcaggccgcgcttgacccccagacgttcgctcgtctccggatcgatgtagttgttggcaacatattcctcacacaaagtccgcatcgtgttcgggtccagcgttgccacctccgaatgtgcaaaattcataaggggaattctcctttcatcctatttatatactttcccgcccaccctcaatgatgggtataattctatattatcgcttttgacgagtaaattcaagcattaactgcaccgttcagcgctcaaaaagtcggtttggtgcttttttgcgcttgcatcgcaaaaggctttttccctgtttcgcatcttttttcagggtatatccggtattctgattaaaaaaacaccgctgtcggagggtttgggactatgaaaaagttttttctgccaatctttgcggtcctgctggtgctgggcagcattctgccgctggctgcctaccgggtcacacgcgccgtgctcagcggggcagagcccgcatcttctgccgtatcttcgcctgcagcatctgcgcagccgccaagtgccgtgccttctgcggatgccgagacctttctggtggaggatcaggccaccggacaggtgctggagctttcccgtcaggaatacgttctgggtgctgtcgccgccgagatgccggtgagctggccggacgaagcgctcaaggcacaggccgttgccgcccacagctatgcgctctactgccgggaccacaccaccctacaaagcggcgcttggctcactgccgacccagcccggcggcagggctgcctgaccgagccggtgctgcgcagctactggggcaccgcctacgagcagaattacgcccgcctctccgcccttgtggacgaggtcttggatgagatactttattatgagaatgctcctgcctgcgccagctactttgccatttccaatgggcagaccgaggccagcgaaaatgtatggggttccgccctgccctacctcatttcagtggacagcagcaccgaccgttccgctgacaactacgaatacaccgtcaccttttccgcagagcaggtgcagcaggcccttgcaggccttggcatttctgccgacctcgccgcgccggagggctggttcggcccggcagcgctgaccagcgccggatacacaaaagccgtcacggtctgtgggcagaccgtgaccggcacgaccctgcgccgggcgctgggcctgcgcagcacatgctttacggtacagtaccagagcgggaatttcagctttaccacccggggttacggccacggcgtgggcctgagccagtggggcacaaaggccatggcggagcagggcaaaagctatgccgatattctggcacactactaccccggcacacagctgcaaggatgaaaaagcggcccgcaccgcaaaggcacagaccgcttttctattcactctttttcttatacccgcaccatatccggggtgatttcagccagagaatgcgcaccgcacatctgcatggtgtcggccagctcaccggccagcttatcaatgtagcacttcacgccttcctcgccgccgccatacacagccgtgacgaacgggcggcagatcagcacgccgtctgcacccagtgccagtgctttgaacacatccacaccggtgcggatgccgccgtccaccaggatcttcacgccggtgcccttgagggctgctgcgatctccggcagcacctcggcagtggccgggcactgatccagcacgcggccgccatggttggacaccacgatagcagccgcgccggcttcctttgccttcagtgcgcccttaacggtcataacgcccttgacgatgaaggggcgctcggccagcttgacgatctcggcaagctctgccacgctcttgctgcctgcgggcggagtcatgttcttcaggaagggcagaccggctgcgtccacatccatggccacggcaaagcagccgctggccttggcctcggccatcttttccttaatggtatcaatgttccagggcttgatggtgggcacgccgcagccgtttgctgcgccaatggccttggtggccatctccataacggtggggttggtgccgtcgccggtaaaggcagcgatgccgttctctgcacaggcgcgcaccagcacatcattataggtcatatcggtataggcttccgagtagtgcaggttcacagcacccaccgggcctgcaaagaacgggtacttgaagctcttgccaaacagctcaatatgggtgtccggggtaccgccctcgcacagggtgtccatgttcacgcggatctcggcccacttattataattgcggatggccgtatcgcccacacccttggcaccggggccggggatctggtttttgcaggccacgccgttgcacaccgggcaggccttgcagtatttgccaatgcactcacgggcattggccagcacttcaggataagtcataagaaagcatcctccttttttattccactctgcggccgcaaagatttcccgccgcagtactctcctgcttcatcatagtccggttcaaccgcttcgtcaagggtttttgctgcatccctgaattttttgccgttttttgcctgcacagagatgtcgttttgaaaaaaacccatttttttcaaaaaatccttgacaaaagcggttctttcaggtattatagtgtggcgctacggcgtacaaccgaatatggaaagatggctgagttggtctaaggcgcacgactggaaatcgtgtaacgtgtcaaaagcgttctggggttcgaatccccatctttccgccag

SEQ ID NO: 1099 - DNA, 41272 bp, Unknown
  gut microbiota DNA sequence
ttatttatttgtctcggaaatatctgccgaagcccgatggcggagtatgtgatgaaagaccttacgtccaaggcaggactatccgagcaatttgaaatcgcatcagccgccaccagtgcatgggaaatcggaaatccggtctatcctcctgcacggcagaagctggcagaacatggcatcgactgcaacggcaagaccgcccggcagatgacccggctggattatgcacggtatgatcatctgattggcatggacgaaagtaatctgtgcgacatcctgcggcttgtcggcggagacccacagcataaagtctcgctgctgatggcgcatacggatcatccccgtgaagtggcagacccatggttcacgggagattttgaagccacatggcaggatatgctggaaggatgcacggcattgcttgaggaactgcgatcataacagattatcataaaaacggacggatgtctgccagttgacagacatccgtctatttttttatttcaaatcatcttaaaatacttcagcgcctcccggatggctctttccttctccgccgggcacttgagccgcttggggttctcagccttaggcttgttgtagttctgccgctccttgatgccgtatttctgcttgacctgtgcaatatagaggtcgctcacgttcagaccggtgtgttccttgacgtactcccggatctcttcatagctagccttggtctctgcagcagtcacatccagttcatccattttcagattcaccgtgatcttctggtagacatctagtttggacaatgcgcataccgtctcgatatgctcactgtgggggaacatatccaccggcgtgctgctctccactttgtatcccttccgggtcagcagctccagatcccgggccagcgtggccgggttgcagctcacgtagaccacacgtttcggggccatgcgggccacgctatcgataaactgcggcgtagagccctcccgcggcgggtccataaagatcacgtctgcgcgttcaccagccgcagcggcttcgccgatccaccgggtggcatctgcggcaaagaagcgggcgttcttcacgccattgtgctttgcattacctatggcatcgtgcaccgcttcgcggttcacctccacgcccactacctgctttgcatggtcggcggcggtcaggccgatggttccgatgccgcagtaggcatccagcaccacttctttgccggtgagatgcgccgcgtccaccgcaaggccgtacagcacttcggtctgggtatgattgatctggtaaaaactgcgcgggctgagcgcatacgtcttgccgcaaagctcgtccagaatgaatcccttgccgtacagcaccttttccatatcgcccagcaccacactggttttgcggtcgttcacgttctggacgatggtggtgatggtcacactctgcttttctgcttcggtcagcagggctttgacaaagttcttggcacccggcagcaccggctgagccgtcaccagcaccaccatcacctgcccggtcataacgccgcgccgcagcaggcagtgacgcagaaggccggtgcccttatcctcattaaaaggctggtaatggcagatgcccgctgccgcacgcacagccagcatggtcttatccagcacttcgtcctgcaaaaggcagctttccaccggcagcaccttgtggctgtttgccgcgtagatgccggaggtaagttttccaccccagccggtggtaaaggtggagatcaccttgttccgatagtggtacggcgtttccatgccccggatgtgctccaccgggccgaatctgcccagcagctttttcacggtctcttctttctgtttcagctgtgcggcgtagtccatgcccagcatcgggcagccgccgcagtttttggcacgcagtttgcaatccatcttccgctctcctttttacccataagggtcatacagatcatattcttccgcttccagatgcttttcctccagcaccttcatggcctgttccagctcgctctggccgcagccgctttcgctgaccagcgcgcgcaccgccgcggccagatcatttccaaaaagggtatccagccgttcccgcatactccacacgttgtaggcgcgctgggtgatggccggagtgtaggtattgcggttgccgtccttgccgcttttcacccagcctttctcctccagccggtaaagaaagttgagcacggtagccggtgcccagccctttgcgcgcagctttgcgtcgatgtcccgccgggtgacgggcgcacggcaggcccacacggcaagcatgacctgctcctctgccgccgaaagcggctttacactgtccgggatgccatacatcctgctgttctccctccttttggcatcttttttgcttttacgtttgtctttgttttattattataccaatttctgcgccaaagcgcaagagccggaaacgccgatgaaatcaggctttttcagctctattttacatttgtctttgtttttgtttttctatcaaggacatttgtgtgctttgtgcccgcacaggggcttttgcgccgtatctttgtgcaaagatgctcttgttttcatccctgcaaaaccagtatactacggctacagcaatcaacagaacgcaccgcagaaaaccgcggtgctgtgcgatacaggaaagggagagttcattatggcacgagtttacaacttcagcgcaggccccagcatgctgcccgagaaggtgctcaagcaggcacaggcagagctgctcgagtatggcgacagcggtcagagcgtaatggagatgagccaccgcagcaagtggttcgatgccatcatcaaggacaccgaggccaccctgcgccgggtaatgaacattcctgacaactacaaggtcggtttctttcagggcggtgcgacccagcagtttgccatggtcccgctgaatttcatgaccaccggcaaagcagattaccttgtcaccggcaatttctcgaaccttgccgccaaggaagccgccaagttcggcgaggtgaacatcgttgcttccagcaaggacaagaacttcacctacatcccggacgtaaacgccatcaactatgataaggatgccagctacatccacatctgccagaacaacaccatcttcggcactcagtttgtcgaggtaccgcaggtggagggtgtgcctctggtagccgacatgagctccatgatcctctccaagcccgtggatgtgaccaagtacggctgcatctacttcggcgtgcagaagaatgtagctcccgccggcatggcaattgccatcgtccgcgacgacctgctgggccatgccgccgacaatgtgcccaccatgatgaactacaccaccctgctgagcaaggacagcatgtacaacacgcccccctgctggtgcatctatatgaccggtctggtgctcaagtatctggaaaacgacatcggcggtcttgccaacatgcagaagatcaacgaagccaaggccaaagtgctgtacgactatctggacggtcagggcttcttcacgaatcctgtggagcaccgctaccgcagcaccatgaatgtcaccttcaccagccccaatgcagatctggacaagaagttctgcgccgaagctgcagaagcaggcttcgtgaacctgaagggccaccgtctggtaggcggtatgcgcgcttccatttacaacgcaatgcccgccgagggtgtggacaagctggtggacttcatggagaagttccgcaaggcaaatgcataagaggggaattcagatatgtatacgatcaaaactttgaacgccatcagcccggtgggtctggcaaagctgaacaacaagcagtttgacgtggctgtggacaccgataccccggacggcatcctcgttcgcagcgccgacatgctgaataccgccttcaacgacaatcttctggccatcgcccgcgccggtgccggcgtgaacaacatcccgctggaccgctgcagtgagcagggcatcgtggtgttcaacacccccggtgccaacgccaacgctgtggccgagctggtgatcggcatgctgatcgccggcagccgcaatgtggctgctgccgcccagtggtgtcagggccttgtcggcgaccccgccatggcaaagaccgtggaaaagggcaagaagcagttcgtgggcaacgagatcaagggcaagacgctgggtgtcatcggtctgggtgccatcggctcccgcgtggccaactgcgccattgagctgggcatggaggtctacggctacgacccctacatctccattgatgccgcatggaacctgagcagtcaggtacgccactgcgtgaacctgaacgacatgctgcccctgtgcgactacatcaccatccatgtgccctacctgcccaccaccaaggacaccatcaacgtccagacccttgccctgtgcaaggacggcgtgaagatcctgaactacgcccgcggcgaactggtcaacaccgaagccctgctggaagccatggagaccggcaaggtgtccggctacatgaccgacttcccatctgaggctattctgggcaagcccggcatcgtgtgcaccccccatctgggcgcttccaccccggaagccgaggacaactgcgccgtgatggctgcaaaggagctgagcgactacctgaagaacggcaacatcatccactcggtgaacatgccggaggtcaaccagcccagagccggcggcaagcgcatctgcatcatccacaaaaatgagccgggcatgatcagccagatcaccgccctgaccaccgaagccggcctgaacatcgagaacatggtgaacaagagcaaaaagaacatggcctacaccatgctggatgctaccggtgctgtggacaagaagctggccgaaaagctggctgccatccccgccgtgatccgggtgcgcatcctgtaaagcaaaacggtttaaaatgtccgccgcgtcgctcttggcatcttcagcggaaaacgatttttattttagcagcccggaaaaatctgcggattttccgggttgctttttcacagagaagggccgtggcggcaacctgcatttccaaaccaggattttttacaaactggaaattctttctcgtcccatctgccggttagtttccatttacaagctgtagtttgtcttaaaaaacgcgttaaagatagctttttctaactacgcatcgtaaaaagtttacatgtattaacattcaagaaaaagcttgaaaatggtaaattctgtgctacaataggctcgacagaagagaaatgtccaccctgttctccggcttttgggccggtatattcatcttacaggtcctgcggatgcagggtctctgacaggaaatagaaaaggtagggaagttactatggatatcaagaagatcgcactgttcgccgccggcacgctgttcggttctgccggtttcaagctgctgtccagcaaggacgccaagaaggtctacacccagaccaccgctgctgtgctgcgcatgaaggactccaccatggagaccgtcagcaaagttcaggagcaggctggtgacattctggccgatgcaaaggccatcaacgaggctcgtgctgttgaagccgaggctgctgtgatcgaggatgccgccgaggagaccaccgaagagaccgctgagtaattttcggttcgtaaagcactgaaagccccaacgtggctttcgagccgccttcgggcggctcttttttgtgagagtggggccgcaggcgtgcagggtatagcagcctgacgctgcggcaaaaagatagagaaggatatttgatatatgaaatgtaccattctgcatgaaggcaagggccggatgcgtgtgcatgtggaaaacgtccgcatgactttgcaccgtgccgatgtgctggaagcatatctgaaccacaaagatgccatcgtccatgccgccgtttacgagcgcaccggcgatgtggtcattacctataccggcaagcgcaccgccgccattgccattctggcaggctacaagttcgatgtgtccgagtatgacgctctggtcacctccgccgacagccgcaggctgaaccgggaatatcaggataaaatgttcgatctggtggcaggccgctgcctgcgcaagctgttcctgcccgcaccccttgacgctgcctacaccgccttccgctccatccgctttctctggaagggtgtgcgctgcgtgctgagccgcaggctggaagtggaggtgctggacgctttgtccatcggcgtctcgctgctgcgcggcgactttggcaccgccggttctgtcatgttcctgctgaatctgggttctctgctggaagagtggacccgcaagaagagtctggacgatctggcccgcagcatggccctgaacgtggacaaggtgtgggtgcgcagtcagggcaccgaagtgctggtgcctctgaccaaagtacgctccggcgatgaggtggtcgtgcgcagcggcaacatgatcccgctggacggcaccgtgctggaaggcgaagccatggtgaatcaggctgccctgaccggcgaagccatgccggtgcgcaaggcagaggggtccaccctctatgccggcaccgttgtggaggagggcgagtgcgtctttatcgccaaggccgagggcggttccaaccgctacgacaagatcgtggccatgatcgaggaatccgaaaagctcaagtccagcaccgagaaccgtgcgctggtgctggccgacaagctggtgccatggtgtctgggcgcaacggtggtcacctatctgctcacccgcaacgccacccgcgccatctcctgcctgatggtggatttctcctgcgcgctcaagctctccatgccgctggccgtgctttccgccatgcgcgagtgcggcagctaccacatcaccgtcaagggcggcaagtatctggaagcgctatctcaggccgacactattgtgttcgacaagaccggcaccctcacccgtgccaccccgcaggtagtggaggtcgtgcccttctccggctgcaacgagcgcgaagttctgcagctggccgcatgtctggaggagcattttccccactccatggccaacgccgtggtgcgtgccgccaaagagcgcggcatttcccatgaggagatgcactccgaggtggagtacatcgtggcccacggcattgcaagccgcgtaggcggccagcgcgtggtcattggcagccaccacttcgtctttgaggatgaaaagtgcaccatccccgcagccgagcagcagaagttcgatgctctcaagccagagcattcgcacctgtacatggcagccagcggccagctggtgggtgtgatctgcatttccgacccgctgcgcccggaagccgccgctgtgctgaacggactgcgtgcgctgggcatccggaacaccgtcatgatgaccggcgacagtgagcgcaccgctgccgccattgcaaagcaggtgggcgtggaccgcttctttgccgaggtgctgcccgaggataaggcaaactttgtccagcaggccaaggccgagggccacaccgtggtgatgatcggcgacggcatcaacgactcccccgccctgtccgctgccgacattggcattgccatcaactccggcgctgccatcgcccgcgagatcgccgatgtgaccatcaaggccgacagtctggaggagctggtggccctcaaggccatcgccaactccctgcagaagcgcgtgcacgcaaactaccgtttcgtgctcaccttcaactcggccctcatcgcgctgggtgctctgggcatcctgcagccggcctcctctgccatgctgcataatctctccaccatcggcatcagcctgaagagcatgaccaatctcctgccggagaacaaggctccgcagctgaaagcataattaccgcaaaaaataacgccgtgtccgaacattcgacacggcgttatttttttatctgttattccagcccgatctgctgtgcatactcttccagcagctcccgctccaggaacggggtcttgacaccctcgcggtcacggtaggtctcgtggcccttgccaatgacggcgatcaggtcgccctcctgcgcgtgatccactgcgtagtgcagtgcatccagacggtcggggatctccacgaactttgcgtccgggttgcccttgttcatgcccacgcggatatcagcaaggatgtcctccaccttttcaaagcggttgttgtcctcggtaaggatggagaaatcggccattttggcgcagatctcgcccatgccgtagcggcgcagcttggagcggttgccgccgcagccgaacaccaccaccagacggtggggcttgtaggcccgcagagtggtgagcaggctttcggtggacacctcgttgtgggcgtagtccagcaggatggtgaacttcttgctgatgggcaccagctccacgcggcccttgaccacgcacttgccaaggccgtcgtggatggcctgatccggcaggcccagcaccttgcccaccgccagagctgccagcgcgttgtacacgctgaactcgccgggcatattcaccttcacatccatctcgtccttgccggtcacatggaacttcacgcccagaaaatcgtgggtgcgcagcagttcaaagccggtctcgcggtagtccgcctgctcagcacggccataggtgacaaggcggcaggtgtggccttccagaagtgcttcggtattctcatcgtcaatgttcaccacgcccacatcgcagcgcttgaacagctggcccttccagctgcggtactcctcaaaggtcttgtgctcgccggggccgatgtgatccggcgaaaggttggtgaacacgcccacattgtagtgcacaccggccacgcggtccatcatcaggccctggctggaaacctccatcagcgcggtgtcgcagcctgcgtccagaaactcccgaaaggtcttttgcagttcgtagctttctggggtggtgttggcagtttccttgtggcggcccatataataaatgccgttggtgccgatcatgcccaccttgcggcctgcagcttccagcacgctcttgatcatgtgggtggtagtggtcttgcccttggtgccggtcacaccgatcatggtcatcttgcgggacgggttgccaaaaaggttcgcgctcatcagggccatggcatagcggctgctttccaccttgaccacggtcacgcccggcatggcggaaaggtcgatgtcgtgctggatgaccagtgcgctgacaccctttgccgcgcagtcggcggcaaactcatggctgtcacgctgggtgcccacgatgcacacgaacaaaaggcccggtgccgccttgcggctgtcgtagatgatatccgagatctcggtgtccagactgccctgcgcaagggtaaagggcacgccttccagtaactgttccagtttcatactgcacacgctcctcaaaacattttgtcacatggggttttcttcgttatttgcggtcatgcgggcggggtcggtcagcggtgtttcttccgcagctgccgccgtatcgtccgcaggctgggccgcagcggcatcctctgcaccgtctgccgcagtatcctcggcagcagaggtgtcaggctcttccggcacggtcttttccggcacaacataaccggagggcagggtcggctggccctgtgcaaagtaaattttacgggtgctgcccgcgctgacatggctgaaatccagtctgccggtgtcggtaggggcacaacccttgccgtcggcattggtcagcacatagcgtgcgcggtccagcttataatccagatcgttccgtgtacccagaagcacactgacacgatcctgatacaaaaatgccatctggtcggtgtccgcaaattccatgcgggtcacatcgtccagcatcccatactcttccagctttgcctgcagctcattcagcgcatccagacggtcgtccgtctgcaccgctgccgaagctgctgccgaagctgctgccgaaccggatgcatccgatgccgccgggtctgcctgcgctgcaaaggtcagctggtcgccgggtgtcaccgacaccggctcgccgccgtatagggtcttgagttcttccggctgggcagactcgcaggccaggatcttgaactgatccgagagggtcagccagccgctcttcgtctgcatggcataggtaggcaccgcctcggtcacctgcaccaccaccgtgttggggtaatcccgaaccaccctgatggattccagcagcgggaactgcttttccagttccgcttccttggcggcggggtcaaagctgaaaatgttctcttcggtctgcacacccagtgcctgcaggatctggctgctggaatagccgcccacctcctgcaccacggtgccgtccgccgtctgcacctgaatggtgccgatcttaaacagcatggtcatggtcaggtaaacaccggcggcgatcacggccagcagggtcacaaaggccatcagccgccgcagcatccgccgccgcttcagtgcagcgcgggtcaggcggcgcttcttgcgtttttcccgctgtaccgggtcgcgtggctgctgttgtgccgggcgcagacgctggtttttgtagcgctgctgcgctgcctgagctgctgtcttgcgcggcttctgcccctgtgaacggcgctgctgcggcttgcgggccgtgccggatgcacgctgttccggctgggccgtgcggcttcgctgcgcggtgcggttccggttctggccgctggtgcgccgggtgccgctctgttcggtgcggcgcggctgcgaagggaactcgatgctgttatcggtacgggtgcggcgcaccgtaccattggcggtgcggtccggcgcaaagctcagcggttccccgttgaagccatagcgcccatccgcactgccggaagatcctttttgttgtgaaggcggcggagtatgctgcaggtctttccgcaggtcgtagatattgccgttgtttctgttattgcggtattgctgcatggcgcacacctcctttccggtttaggttttgttttacttctgcaccagtttcatcagagcgtctgcaatacggtcaaggctgtcatccaccgacaggctgcgggcatttttgcccatctcagccagcttgccgggctgtgccaacatgtcggacaccgtgctcaccagcttttcgccggtcaggtctttttcctcgatcaccacagcggcatcggccttctgcagttccatggcattgaagtactggtggttctcagccacattggggctggggatgagcacggctgcacggccaacagcttccagctcggccagcgtcagcgcaccggcgcggctgatgacaaggtctgccgcagccagcagttccggcatattgttgatgtattccttcaccacaaggccgtcgccctccgcgaagttcttttccttttccagatccttgaacagctgcacaccgtactggccggtagcgtggagatgcagcaccggcttcttctcgtgctgttcccatgcacacaggtcggccaccacttcgttgacgcggcgtgcgccaaggctgccgccgaaggaaaggatcaccgtgcggtcgcccgcgcccagctcagcgcggatggcatcgcggtcctttgccttggtgaacacctccgggcgcaccggattgcccaccacgatggtcttatcaggtgcgcccagcttttccacagcagcaggcacggcggcaaacacgagatccacatccggtgccagcagcttgttggtcacgccggggaaggcgttctgctcatgaatggcggtgtggatgcccattttggcggcacagcgcaccaccgggccggacacatagccgccgcagccgatcacaagatcaggtttgacctccttcataatggcctttgccttggggccagagagggccagattccacagcgtaacgatgttgcgcttgatgttgttcagcgacagcctgcgctggaaaccggtgatctcgatatggtggaagggatagcccgcctgtcctaccaggcggtactccatgccctccttgcggccggcaaagtggatctcggcagaagggtctgcctttttgatagcacctgcaatggcaagtgccgggttgatatggccggcagtgccgccggcagcgatcagaactcgcatgacgattcctcctctattattagtgcatctggtcaggccatcggggagctccccactggcctgcgccctcaaaacagtcgttacagttcattgcgcgcacggcgggcatcgtccagattgatggtacggtccttcagctccgcatcacgctgagcctttgcagcctgccgctgtgcgtgggccgctgccctctgctgcgccgcccgctctccgttgcgcccaatgttcaccatcacgcccatttctgccagcagcaagatcagactggtgccgccggacgagaaaaacggcaggctgatgccggtattcgggatggtgttggtgaccacagcgatgttgcagaacacctgccaggcgatctgcgccataatgccaatccccaccatggtgcagaactggttctcggccttataggcgatcatcaggccctgcgctatgagcagtatgaacagcacgatgatgagcaccgcgccgatgaagcccaattcttcgcacaccacactgaagatgaagtcgttggtgctttccggcagccagagctgcttttccacgctgttgccaaggccaaggcccttcagtccgccggagccgatggcgtacaagctctgcttggtctggtcgttcagcgcttccagatcatcggaccatgtgttcaggcggtcctgcagatagccaatggattccaccagcgtcagggccggtttcagcagcagagccgccgctgcggccccgcaccatgtcaatacaccgccgcagccggtcagcatgaggatggtgcccacgatggcggtggtcagcaggatgccggacatgtgcggctctaaaaacagcagcaacaccaccggcaccagcggcagcaccggcacgatcagctgccttacgatgcggatgaacagccaatcctttggcttgatcttttctctcagcgacgggctgaaccggccgatctgcggcgcacttgccgccagatgggacgagagcaggatcatctcaaactttgccacctcagaggtttgcagagtcaagccgcccagacggatccagcggcggcagccgttcagcggtgcaaaggtcagcgtgacggccagcatagccagcaccacccagtacagcggcttgctcgcccagcgcaggaagcggtgatccacatagctcatgactaccatacagccaatgccaatggccgtgcagatagcctgctgcttgatgtagtgcaggctgtcgcccatgcgcaggtagccggtggtgtagcttgcgctgtacagcattacaaggccgaacaccatgataatggccagcgttgccagccagttgagcagcagccggttccatggtcccgggtcccgctgcagcggcggcacccatgcacgttctttttggtttttatgttgtctgcgggtggctgccattgccacgcccccttattttcagaatcaggcgctcaggcccagcgtgccagacgcacggccagcgccagcccgcacacgctcagtgcgcacaggctgtaaaaaatattcactgcactcatgccgcgcttttccagccagcggtgcagcggtgccgccgcaaacagcggcctgcccttccagcggcagaacaggacctgcagcaccaccatgccgccctccacccagaagggcagtgccagcgggatgctcagctctgcgtagccaatgcacagcggaatgcagccaatggctcccgctgcatacaagcagccgcaccggccggggtgcagctttgccggtggaaaatcccacagcagaaaggccatcagtgcaccggccagtgccgccgggaatactgccagcggaaaccagcccagctgtgtttccagcatcatcaggcccagcatggccgcaaaggccgcgccgcacaccgtgccgtcggcaccgtcggccacgcgggccgcctcggccatcgccaccagcagcacagcccacagcagcggtgccagcgcacattccacatagcctgctcccggcaggatcagccctgtgggcaggcacccgttcagtgccagcaggcccagcaccagcgctgcagcgatgcattccagtgcaaggcgctgtgtgcggcgcaggccaaggcccaaaccgttcgggtagcggccgcggatgcgggccagatcatcggccagccccactgcgccaaaggccagcgaccccagcagtgcaatgagcaggcgggaggtcatctgccggtcgctgccaagcagggaaggctgtgcagcacatgcggccagccagcccacgcccacagcggcaagggtgcccaccatcaggcacagcccgcccatggtaggcaccgggctgtccggggcatcgctgtccggctgtgtaccgcgtgccgcacgctgcagcccccgcagcagcggcaccatcatattgccgagcgccgcagtcagcacaaaacccagcaccgacgcgacgaccaaggcgaaacgaatcatttttcaatctccaaattcatgccaaagggttattcttcggcatctttctgctctgcgtagaaaatttccagcactttttccagcgccatgccgcggcttgccttcaccagcagggcatcgcccggctctatccggttcagcagagcatccgctgcctcgcggtagttgttggcatggagggtcttgacccccttggccgcagccaccacagccgtgcgctttgcgttttcgccgtaggtcacaaggcagtacagatcactctccgcagccagacggcccagctcctcgtgggcttcgcgggacagctcgcccagctccagcatatcgcccagcagggcaaagcggcgcttgcaggggaattccttgaacatggcaagcgcggccttcatgctgtcggggtttgcattgtagcaatcctcaatgacggtaacgcccttgctgtgcaccaccttctggcggcggccggtctgctcaaaattggaaagccccttgatgacaccgcgcgggtcgcagcccaagcgggtggcggcgcagtaggcagccagagcgtttgccacattgtgcttgcccatggccgggatcttgaccacaaaggtgccctcttcctgatcttccagcacaaagctcatgccgtcctcttcctgccggatggacagtgcacacacatcagcgttctcatctgccagactgaaccataccggcttcacgtgggcgggcagctttgcggcgcgcaggaacttatcatcatagttcagcaccagcggtgcaccctccggcaggccgttgcagatctccagctttgccttgcagatgttctcctgactacccagattgccgatgtgggacacaccgatgcaggtaatgatgcccacatccgggcgtgcggcccgggccagacggtcgatctcgcccgcatggctcatgcccatctcgatcacggcatactcagtgctgctttccagccgcatcaaggtgcggggcatgcccagttcattgttctggttgccctcggtcttgatggtctcgccaaagcctgcaagggcggcgtaggtcatctgcttggtggtggtcttgcccacgctgccggtcacacccaccatcttggggtgatactggctgcggtagttcgcgcccatcaccatcatggcgtggtagctgtccgggcagaggatggccttttccgcaggcacgccctccaccgggtggttcaccaccacataaacagcaccgttctccagtgctttggccgcaaaatcgtggccgtcaaatttttcacccgggaacgctacaaaaatgcagccgggccgcacctcgcggctgtcggtggtcaccagttccacctgcacctcttcccggatgaagtctgcgggcaccagccctgccagaagcttgcttgcagaaattttttccattgttcatgtcccctctctgtttattcaggatcacaggatactctctcttatccacaggtaatggtcacgacggtgccgcgctgcacactggaaccggggtctgcactctgggcctgcacagtgccgttcgcattgccctccaccacacagttcaatccggcggcagacagcatctggcgggcaaagtccgcgctcttgccggtcacatccggcacatcggtatggctgccctcataggtatcggtatacaggtacacggtggtgccgtaggccacctttgcacccgcgtgcggatactggtaggtgacagctgctgccgcctgactggtggtgctttcggccagctgatgcctgaggcccttgatgttcagctgcacctgcgcactgctccactcggtgcccaccagattcggcacagtgaccacagtctggctgcgatcctcgccgtcggcggcaatgccaaggtaaggtgcgatctcgctgatgatgttgcccacaacgggcgctgccagcagggacgagtagtccgttctggcgttgttggggtcatccagcatcacatagacgatgatctccgggtcgtcggcaggcaggacagcggcaaaggatgccaccttcttgtagtcgccgtcggcacggcggtccatgttcaactgttcggaagtgccggacttgccgccgatacggtagccggacacataggcatacttgccgccgccggtgccgttgcccacctcatattccatgatctggcggatcacattgctggtactctcgctgatgacctgacggcgcacattggcaccgatctcctcgatcacgttgccatttgcatcggtgatcttatccaccacatggggcgtgaccagatagccgccgttgacggctgcggccacagcggtgcacatctgcagcggggtgatggccattgcctgaccaaaggccgaggaagccagctgcacttcgcccagctggttggccttataatactgcatgaagcccgtctcactgggcaggtccacgccggtgcggctggtaaagccaaaggcatcgaagtagttatagaaggtctgggagccaacgcgctgacccagctggatatagtagatattgcagctctggcgcagagcttcggccagtgtgatggtgccgtgggctttgtggcctgcgcagtggtaggtctcctttgccacgccgtaagcaccggcgcaggtaaaggtggtgttgatgtttgcaaggccggagtccacgcccatggccgaggtgatcaccttgaacacactgccggggtagtacaactcggtgatggccttgtttttccactggatatcgcggaagtagccggagtaatcgccctcctcgtccagaatgcggttgccgtttgcatccttcagctcgttgccgttctcatcctttttgtagatgccgtacagctccggctcagcgcgcaccagctcgttgaggtaatccagatttgcgctgtagtccagcgggtcgttggggtcaaaatccggcttggaagccatggcaaggatggcaccggtcttgacgttcatcacgatggcgcagccgcggttctccaccgtgttggctgcaatggcttcgttcagataccgttccacgatctcctgcacattcacatccagcgaaagtaccagattggagccatccttggctgcaaaggtggtggcattctcgtccgcaatggcgttgccgtaggcattgcgctgggtaatggtgcggccatccacaccggccagcgtggactgataggatttttccagaccgtaagtaccaatgccgtccgcatcggtaaagcccagcactgccgctgcaaacgctccgtaggggtaattgcgctggaagctcttctcgctgccgaccgagatgttgcccttgcgggaggtctcagtggcacgcttgtgtgccttgttgaactgggaaacgtaggattcgatggacagcttgacagcgttgttcaccttggtggccagcacctgatacttggtgtccgtcttggaaagtgcatcgtaaaccttctggtactgggtctggtacgcttccgaggaagtgtccaccgcgtccagactttcgccgtcgccggaaagcaggcgcagggtcagttcccggctgacctcggcgcacatggcagtgtccagcgtgcgcaccgtctcctcatccttgccggtggtggtatataagattttgctgttgtccgggtcggcccagatggtccacaccacgctggtggaggccagcgtgataccggaggtatcgtagatctcgccgcgggtggccttgatggtggtatccagcagctgctgctttgcggccagctggcggtaggtatcaccgtttttgatctggatatcatacaggctgtaggtcacacgggccgcagcaaggcccatgaccacaagggccagaccgccgcagatcagactggttctggggttcatgcgggcaccggtgctggtttccggccaggggccttttatttttttgatgaattttcggaagaatttcgacatggtatgctcctgcggcagcgggcatttgctgccttctgccgcgcttttgtcaaatttggaactgccctgcaaacagggtgtataaaccgaaaaagcgtgcgctgccgcacgctttcccgtatttggttcactttacagtgccaagaatgttcacggcaccgttgtagataaagtcggtccactgccgcacagcggactgggtgcgctccagcgtgtcgctctcgcccaaacggatgtaggtgatctggctctgatcaattttcatcaggcccagcctgccggccgtctcttccacgctggtgatgttggtcttgctgttcagggtgctgttatagtaagtatactggctctgctcactgaccagctgagcctttgcgtcctgaatctggtcgttcagctccaccagcttggactcgctccacagcaggctgatggcaaaccccaccagcagtgctgctgctaccagatgcatggcgttgtgcaccgctgcctgcagtggcgaaagccgacgcttgccgccctttgctacccgcagatctgccttgcgctgtgtctgcggggcttttctgcggcgtaccgcgttataatcatatgctgcctgacccatggtttgctctcctcctcacacaacggcttctgccgttcagcatttttccaaaactctcaggtgggcggaccggctgcgccggttctcttccaattcctgactgtttgcttcaatgggtttgcgggtgatcagcttcgctttggctttgccgccgcatacgcacaccggaaactccggcgggcaggtgcacgcggtggaccagcggcgaaatttgttcttcaccagccggtcctccagcgagtggaaggtgatcacgcacagccggccgcccggcgcaagatgatcgaaaatggtatccaagccttcttccagcgcatccagttcatggttcactgcaatgcgcagcgcctgaaaggtgcggcgggaagggttcttgtttttgcggcgttccgccgggggcatggcgctggccacgatgtctgccagctgcagggtcgtttcgatgggagaattctcccttgcctccacgatcctgcccgcgatctgccatgcgaaaggttcttcgccgtaatcccgcagaatgcgtgccagctcttcgcggctttcggtgttcacaaggtccgctgccgtttcgccctgctggctcatccgcatgtccagcggtgcatccgcacggtaggaaaagccgcgggccgcatcgtccagctgatggctggaaacgcccagatccagcagcgcgccgttgaccttgtcgatgccaaggctttccagagcttgtccggcatagcggaagttgatctgcaccaccgtggcaggcaggcccgcaaggcgggcacgcgcggtctgcaccgcgtccgggtcctgatccagcgagatcagcctgccgcccttttctgcatccagccgcaaggcgatctggcgggaatgtcccgcgccgcctgcggtgccgtcaaggtaggtgccggccggatcaatggcaagcccctccagacactcgttcagcagaacggggatatgctcaaacgaggccgggtcaaaggctgcttgtgtttcaagttccatcgctgcggcctcctttctcagttcataagctttccgtgttccgggcactgtgcacacagcgcacacttttacccgataacacagttttattttaacaaatcaggcccctgattgcaagggtttgtgctcccgtttttgccgcaaaatgcaacaaaaaaagtccctgtcggccgtcatttctgcctgcaggaactttggtttttgccgtatgtgtaatttgtgtgtgaaaaaggctgtcttcagccgtttttcttggcgttctggcgcagatttgcgcgcacgttctttacctgtgccgcattttccaccatcgtttcctcggtgttcttgagcatgttgtcgcaatagtcggtcacggtctggcgcagggtgcgggcctcgttctgggctgcagtggtgatttccccggcgcgctgctgtgcagccttcacgatctcggcttcgctcaccagaatgcgcgcccgctcctcagcctttttcacaatggcctgcgcctgtgcgttggccgtctccacgatctgagcgcggtcgttcacgatctgctgggcctgccgcagctcgccgggcaggtttgcgcggacctcgtccagataatcccggatctgctccacatccacgatctttttgccgccggaaaggggcacattggcaccttcctccagagcatcctcaatggtatccaaaagttcgttcacgttcatagtgcttctcccttcggttcgttctcggtagggtctgtgttctgcatgggctttgtgtatttccacagcagcaccctgccgtacttgtactgttttttcagggtcaggccgccagcctcggccggcagcacgatgccggtctcgctctcgcacagcacgatgccgccgggcgcggtgcatttatccaccgcaggcaggatcttttccagtgtaccattgcggaagggcgggtccagcagtacgatgtcgaactgctcacggcaggcggaaagataccgcgcagcctcgccgatattgacgcggctgcggtcgaacacgccgcaggccttgcagttgcgcatgatgatattcaccgcctcgcggttctcgtccagaaacacgcagcgcgccgcgccgcggctcagtgcttcaatgccaagctggccgctgcccgcatacaggtccagcacccgtgcgccgggcaggtcgaactggacgatgctgaacatcgcctcctttacctgcgaaagggtgggccgggtcacgtcggtccccggcagggcctccagactgcggccccgggcttctcctgcgatcacgcgcatgttctttctcctcctccttgcagccggaagatgcggctgcaaacacgttttttgtatcactttattatcacccaactgcatattcttgtcaagggccgcgcgttgcgccgtctggcggtttgtgctacaataaaaccggcagcgccgggcttttgcggcgcattctggcataaaaggagagtattcccatgaaagttctgctcatcaacggcagcccgcacgaaaaaggctgcacctataccgccctttcgctcattgcaaaggaactgaacgacgccggtgtggacaccgagatcctgcatgtcggcggcaaacccgtgggcggctgcatcggctgcggcggctgtgccgcaggcaacggctgcgtgtttggcggcgtggtcaacgaggccatcgagaaggccaaaactgccgatggcttcgtgttcggcagcccggtgcactatgcatccgcatccggcaacatgaccagcttcatggaccgccttgcctacgcgggcggcagatatctggcctacaagcctgccgccatctgctgctcggcccgccgcgccggcaccaccaccacgctggaccagctggtaaagtacccgcagttcttccacatgccgctggtgaacggctcctactgggccatggtgcacggctccaatgccgagcaggtgctgcaggatgccgagggctgcgccgtaatgcaggagctgggccgcaacatggcatggctgctgcactgcatcgaagcaggcagggccgctggctttgaacacccgcagaaccccaagcgccccatgaccaattttatccgctgatcggaaaatcaatttctgatccagaggctcagaacagtccgtaagctgctctgagcctctttttctttgcagtccacgccatttcgtgccaaaaacagcaaaaaacctttttcaaagcgccttccgcttcttttttcgttcataagtttgtgttactataagatgtaaagtgattttagcaggatggagacccttgtatggaacactacgattggaacgaaggctggctgttcacgccccggttcgacccggcactggtgcggccggagtgcggactggaactggaaccggtgcgcatcccccacactgtgcgggtgctgccctacaattactgcaacgaaaatgaataccagtgcctgtgcggctaccggcgggagttttttgcacccagagagtgggcaggccgcactgttctgctcacctttggagccgttgcccatgacgcgaccgtgttctgcaacgggcggcggctgttccaccacgcctgcggctacaccgccttcacggtagatctgaccagcgctttgcatctgggtcagaataacgtggtggctgtgcgctgcgacagccgcgaggacctgaacattccgccctttggcgggcagatcgatcacctgacctacggcggcatctaccgtgccgtcagtctggacatcaaggagcccgcttacctgcgggatgtgttcatcgagacaaaggccgagggcgatttccgcatctatacctccaccgtgggtgagacggttggctgcaccctgcaggccgagatccgcagcccttccggcagccgcgccgcctacagcggcgagctttccctgcccatcaccggcgtgctgaacggtgtgcacccgtggagcatcgagcatcccaccctgtacaccctcaccgtacagttgatccgccccggctctgccggtctgccggaccgtgtgctggacgaaaagaccatccgcttcggtttccgcaccgtgcagttcgtggcaggcgggctgtacctgaacggtcagcgcgtagagctgcggggcctgaaccgccaccagagctacgcctatcagggctatgccatgccggacagcatccagcggctggatgctcagatcctgaaaaaagaccttggctgcaacgcggtgcgcaccagccattcccctcagagccctgcgtttctggatgcctgcgatgagctgggcctgctggtgttcaccgagatgcccggctggcggtacatcggcgacgagagctggaaggcgcaggccttgcagaactgccgcgaaatggtatgccagtgccgcaaccaccccagcatctttttgtggggtgcccgtgtgaacggcagcgccgacgacgaagcgttttataagcgcaccaacgaggccatccaccggctggaccccacccgccccacggcaggcgcgcggaaccaccgcaagagccagctgctggaggatgtttacgcctacaacgattactcttaccgtgggcgcggtgccgcctgcgaagcccgcgccgcagtgacttccgatccccgtaagggctacctcatcagcgagttcggcgggcagcagctgcccaccaagccctttgacgacgagacccaccggctggtgcaggctctgcgctatgccgccgggatcaacgattccattgcgcagcagggcgtggccggcagctttggctggtgcatggccgattacaacacccaccgggaatttggcagcggcgaccgcatctgctaccacggtgtgatggatatgttccgcaacccgaaactttcggcggcggtatatgcaagccagaaaacgccgcgttccccctcggacatcgtgctggaagtctcttccggcatggcactgggcgacctgcccggcggcgttcccacggcctgctgggtgttcaccaacgccgaaagcgtgcggctgtaccgcggcaacgactacattgccgagttcacgcctgaccggcacggccgttttgccgccatgacgcatccgcccattgagatcaacgattttgtgggttctttgttggaaaagtacgagggcatggaccaggcctccgcccagatgacagccgctatcctgaacgagatgcgccgggatgccatggagctttcgccgctttccaaggcgcggatgctttcgctgcggctgagctggaacgaggtagcccgcatgtattacaaatacatcggcgtgctgggcacaccgtgcgcagcctaccgttttgaagccgtgtggcatggccgcaccgtgcgcaccgtggtgcgggaaccggtgcagagcgtccggctggaatgcactgtgcacaaccccatcctcaccgacggccccacctgggactgcgccgctgtcagtctgcgcgccatcgaccagaacggcagcctgctgccctactgcggcgaagccgttcagctgagcgtggacggcccgctgaagatcattggtcccagcgtggtgccgctgcgcggcggcatggcgggcacctaccttgccaccaccggcgaagcgggccgcgccgtgctgcactgccgcatggaaggtgcgctggataccgatgccgtggtgaccatccgttgccgggaagcttaatttccgtcccttcatgatagatttgcactctgttcaaaatttcatcatggttgactggtatcctaagaactgtaaaataacggcgggcgcgcccgctttgattccaaaacaaaggatgcaggagttatgagagaaaaattccgtcagtttatgatcggccgctacggtaccgatggtctgaaccagtttttgagcatcgcgtccatcgtgctgctgctgatctcgctgctcacccgcttcagcctgttcacatggctgggtctggtgctgctggtgctgtgctactaccgctcgctcagccgcaacatttccaagcgcacggaggagaactaccagtactatgccctgaaggaccgcgtagaccgtaagttccgcggtctgaaggatcagtgggccaaccgcaagctctaccactactaccgctgccccaagtgccgccagaagctgcgtgtgccccgtggccgcggccgcatccagatctcctgcccgcgctgcggcacccagttcatcaaaaagagctgagcggccatgtttggttatgttgtgcccaatcaggctgcgctttcggacgaagcacaaaagcgctaccgcaccgcctactgcgggctgtgccgccgcatcgacgcactgcacggcctgcggggccgctttacgctgagctatgacctcaccttcctgaatctgctgctgtgcagcctgtacgagggtgagaccgaagcttcttccggccacgaccggtgccccatccaccccttgggcggtgtggaatggcgggcggcctcccccaccgattactgtgcagatctgagcgtagccttgcactactacaacgccgaggataagtggaaggacgaccgcagcctgctgggccttggatatgaaaagctgcttaccggctgtaagcaggctgccgagagccgctggccccgtcagtgcagcgccatccgcacctgtctggacaggctggcagaatatgaagctgccgggagcgaagatctggatgccgtgtccggctgctttggcgagctgatggcagagctgttcgactaccggcaggatcactggtcaccggagctgcgcagcatcggcttccatctgggcaagttcatctacctgctggatgcctatgacgatctggagcacgaccagcgcaagggggcctacaatccgctgaaagcactcagtcagcagcccggctatgaggaagagatgaaagagatctttgagctgctgctggcgcagtgtgcccagagctttgaacgcctgccctgcgtggaggacgcagacctgctgcgcaacatcctttactccggcgtatggctcaaatacaactgcaaaacagccaagcaggcccgcagccgtggctgaatggcggctttgtcttgatttttccacggcaatacggtagactataaacattgcgcggcactgtggctgcgcgaaatgagacgtgaggaagtatatccatgagagacccctatgaggtgctgggcgtttcgcgcggcgcaagcgatgacgagatcaaaaaagcataccgcgccaagtgcaagcgctggcacccggacctgaaccccaacgatcctaccgccgaggagcacttcaaggaagtgcaggcggcttacgatgccattaccaagggcgagaccggcccccagatgggcggaaatccctacggcagctaccaacaacagggttacggccagcagaactaccagcagcagggttatcagaacggttacggcggttttgacggattcgatggctttgacccgttcggtttcgggtttggctttggcggctaccagcagggttacggccagcagggcgcaagctattccggctccgacagcccggagatgcaggccgcccgcaactttgtggccaatggccgctatgcggaggcccgccgcgtgctggacggcatgaccggccgcaatgcccggtggtattatctgtcctccctcgcaaatcagggcttgggcaaccgcatcgatgcgctgcaggatgcccgccgtgccgtgcagctggacccgggcaacaccgagtaccagatgcacctgcgccggatgcagaaccccggccagacctaccgcaccacacaggccacctacaccagccccggcggcctgatgcagtggtgctggagcatgatcctgctgaacctgctttgcaactgctgctgcggcggctggggcttccatttccgcatgtgatcccgtttttctcataagatacagcaagaccccgcaccttctggtgcggggtcttgcttttgctttacgacatcactttacggtgatgttgcggctgatcttgctgcaggagtaattgccgccgatctctgccgtctgcacataggtgcccggctctgtgggcagctcgctggtggcatcacagccccagccggacttcttgtagctgtagcggatcttatcggtgggcaccacctgaccatccacttccagcacagccgcttcattgaagctttgcagctcttcggcggtcatgggcttttcggcctgctgtgcccagtacatgcgcacgccgtttgtcttgggcttgatcttgaacatggcaaagcctgcggtgttcatatcgctgctttccagcgccagtgcaccggccacatagttgccagcatccaccggctgctcgtccagataaatgcggctgaacgcgccctccggcagatacttgcggatcaggttcagcgcaagacgcaggccgttggacacctgatcgatggtaggcacatagaagtgcagtacatccatcaccgagacggcctcatcggccacccgcagcagcacgctgacatcgttgccgtcgatcagctgcttgaggtagctgtacacattgaactcctctgcctgatccggtgtcttggacatcttcttgggcagcgggatcatcttgagcagcgtgcggatcttatccgacagcaccagcgtcacatagccattcgcttcgccgccaacgcccaccacaacaccgatatactgggtatcggcagggttggtctgcacctccagcttgtagttggagccataaacaaggtcgcccgtggctttgagccggatggaaaccatatcattctgctgctccagcgctgcattttcctgcggcagagctgctgcggcaaacaccggcgttgctgccgcgctgagcatgaacactgctgccagtgcaagagctatcaatcgtttggccttcattgcttaagacctccttattttgtaaagggatcgcacagccgcgccccacggcacactgcgtcgggaaccggcatgataccatgcctgttgtacctcgattttaccgcaaaacgctgttttggtcaataacgtgattcaagtaattcaatttttttatattttatgcaaaaaagaggaacctgccctcttccagcggtttctccctcaagttcattcatcaataaaatattccgggtggacgctgcgggcctgcgccaccgactgcttataccggctcaggtggctttccagcgcttcgctcacgtcgtccgcgctgccgtgcagcagtgcttccagaattgccgtgtgcgaggagcagaccgacttgttttcctcggtctgcaggctgaacttgcggatgcgctccacatgctgcaggctggccagcatgtggtcgtagtgagcttccatgccgcacaactcaaaggatttgcggtggaatgcattatccagctccagcatacgggcagtgcggtccggctggctcatatccgcttccagcacacggtatgtctcaatgttgctgcggtattcttcctcctgccggggtgtcacacggccgcgcagccggttcaggatctctttttccagtgtatagcgggcaaactgctccatctccatcaacttcaggttgatgggtgccacatgggtgccgctctgcggtttgatgtccaccatgcgggccagattgagcatcagcaaagcctcccgcatgggcgtacggctgatgcccagctcttcggccagctcccggtcattcagcggatcaccgggcttcagctccatcgtgatgatccggctgcggatcgtctggtatgccgtttcgcgcgcactcagtaatggcatgtggtctctctcccttcaacctccggtgtaaagcaaaaattgatatactagtattgaagttatcaagaccatattacccaaccacagggcggctgtcaagtgtggctgcaactaaaaatcgccaacatttttctctgttttgtcaagacaggccccatggcagcacaaaagccctccgggtgaagggcttttgctgcgtttactttttagcggaacggtacaccaccggcacccacacaaaggccacggccagaccgcacaccacatcaatgatggagtgctgcttggtgaacacggtggacgcacagatcagtgcagcccacacccaggccagaattttcagggccgggcgctcctttgccagcttgctgtggctgaacgccagtgccatgcaggccgagctttggcaatggatggacgggcacacattgaccgaggcatccgccctccagatcagctgcatgatgctcattgcaatgttgctgcggcccaccgcatccactgtggggcggatatccagaccgttgggcagcagcatgtacaggatcaggcagaaggtcatgccggaaaacatggtcaggcagagcttatcgtagctttgggtgtcgcaccaccacagcagggccgtcacaccagccagcagcacaaaccagctgcaatacggaaagatgaaccactcattgaaggggatccggtcatcaagcggggcgtggatgatatatttgggatctttgatggtcagatccagccagaagaaccagatcagatacaccacccagtacagctggaaccacaggtgcgggcggcgccggctccacaattgtttgggattcatggtatttctcctatattttcaatgtgataagatatgattataccacatcacgccatcttgcgcaaacctttccggtgcgataaaataaaaagagtgttgtaaacttgcgctctgtttttgagcgtacctattataaaaggagccattatgttgcaaagctttccccttgtccgccttgccgcgctggatctggacggcaccctgctgaaccggaacaacgaggtcacccttgccacccgtcaagccattgcccgcgctgtagagcatggcgtggtggtggtgcccgccacaggccgcccactggccagtctgccgcctgttgtggcaaagctgcccggcatccggtatgccatcacctccaacggtgccgccgtgtgggaccttggcgatgaccccatgggtgctgtgcacagccgctatgccaacgctgcccagcgccacaccagcgaacccgcctgcctgctgcaccgcctgatgccgacagaagtggcacgggaagcttttgacctgttccagcagtacgatggcgagctgagcgtattcagcgacggccttgccatcaagactccggagggcattgcaaagctcacctcccgcaccgcccactttctctcctccgaggcgcggcagaacctgaccgacggccgctttaccgtcattcccggcatcgagagctggatgtcccgccatgcgcacgagatcgaaaaactgtgcatgttcttcgacagcaccgaaaagaccgccgctgccctgccaaagtttcaggctatcccgggcgtggccgtggtgcagggttcgccggataacattgaagtgaccgctgccggtgtggataagggcagtgccctgctggctctggccgacctgctgggcatcccccacgaaaacacccttgccgtgggcgacagcgagaacgacctcgccatgctggaaaaggcagggatcgccgctgttatggccaacggaatgccccagatcaaggccattggcagcattgtgagcgaagccgactgcgaccacgacggcgttgcagagctgttccggaagctcggcatctgagcaaaccggggcaaaacggccctgcttttcaggtcattcgtcatttttgtgcaatgtatacaagctcttatgcaaaacattgtgcttgttgagcattaccaaacttgtttccgtcgtttatactaatattacaagcgcacagtgggtgcaccatgcccaaacggcagcccacgcgcaccaagagagttcaaactaaaaggagaaatgcatttatgaatcccatcgtagaaaaggtctatcagatcggcattatccctgttatcgcttttaacagcgttgatgaagccctgcccctgtgcaaggctctggctgacggcggtctgcccgcagctgaggtcaccttccgtaccgcatgcgctgaggagtgcatccgcaagatccacgaggagatgcccgagatgctgctgggcgcaggcactgtcctgaccaccgagcaggctgaccgtgcaatggcagctggtgcttccttcatcgttgctcccggcttcgaccccgaggtctgcaagcacgtcatcgacaagggcggcattatgatgcccggcacctgctctgcaggcgagatgcagcaggctatgaacatgggctgcgaggccctgaagttcttccccgctgaggcaaacggcggtgtcggcatgctgaagaacatcggcgctgccctgaagagcgcacgctggatgtgcaccggcggtgtcaatgcaaagaacgtcaacgattatctgggctatgaccagatcttcgctgtgggcggcacctggatgtgcaagagcgacgtgatcaaagccggcgactgggcaaagatcaccgctcagagcaaggaagctgttgacaccatgctgggcctgaagctgatgcacattggcatcaacaccgagaacgaggaagaggccatgaagttggcaaacctcatcggcagcctgctgaacatgaaggtcgctcccggcaactccagcatctttgtcggcaacaaggagttcgagatcatgaagaaggtcggccgcggcaccaatggccacatcgccatcggctgcaataacgtggatcgtgccatctatcacctgtctcagcgcggtgtcaagttcgatctggacagcaaggtcgtgaagaacggcaagaccatcgcctgctactttgcagacgagatcggcggcttcgcattccacctggttcaggcctgagctccggctcccctatccgtgaaagccctgctgcgccggggatgccccgcagcagaaggtcataaacacctgtaaataaaaggagaataaccaatgaaagtcgttacttttggcgaactgatggttcgtctgcagccgttcaactacgagcgtttcgttcaggctaacagcctggagttcagcttcggcggcggcgaggcaaacgttgctgtttctctggccaactacggtctggacgcagccttcgtcactaagctccccgcacacgcaatcggtcaggccgctgtcaacagcctgcgccgttacggcgttgacaccagcatgatcacccgcggcggcgatcgcgttggcatctactacaacgagaagggtgcttctcagcgtggttccgtctgcatctacgaccgtgccaacagtgccatccagctggctcagccctccgactttgattgggataagatcttcgagggcgtggactggttccacttcaccggcatcaccccggctctgggcgagaatgtcgtcgagatctgccgcgaggcctgcaaggctgctaaggctcacggcgtgaagatcagctgcgacctgaactaccgcggcaagctgtggacccgtgagcaggcccgcgctgccatgaccgatctgtgccagtatgttgacgtgtgcatctccaacgaggaggacgcaaaggacgtgttcggcatcgaggccgaggctaccgatatctacggcggcaagctgaatgccgagggctacaagagcgtggctaagcagctggctgacaagttccactttgagaaggtcgctatcaccctgcgtgagagccacaacgcttccgagaacggctggagcgcaatgctgtacgatgttgcttccaatgagtactgcttctccaagaagtacgagctgaagattatcgaccgcgttggcggtggtgactccttcggcggcggcctgatctacgctctgctgaacggcaagagcactcaggaagctgttgagttcgctgttgctgcttctgctctgaagcactccatcgagggcgactacaacatgatgaccgtgtccgaggtcgagaagctggctggcggcgacggttccggccgtatccagcgctaattgcaggaaggagtccagaatggatatccgctactcctgcaaccagaaggatttcaagcgctataccactgaggaaatgcgggacgaaatgctcatcaccggcctgtacaaggccgatgaggtcgttgctgtgtacagccatgtggaccgcatggtcacgctgggctgcatgccggtgcacgagaccgtgtccatcgacaagggcatcgatgtgtgggcaaacttcggcacccactactttctggagcgccgcgagatcggcatgttcaacatcggcaaggattccaccggcatcgtggtggccgacggcgtgaagtacgagctgggctacaaggactgcctgtacatcaccaagggcaccaaggaagtcacctttgcttccgccgacccggagcatcccgccaagttctacatggtatccgctcccgcacattgctcttacgagacccgcctgatcaagatggccgatgcaaaccatcgtcctctgggcagcgtcgagacctgcaataagcgcaccatcaatcagttcatccacccggatgtgctgaagacctgccagctcagcatgggtatgaccgaactggaatccggttccaactggaacacgatgcccagccacacccacgagcggcgcatggaaatttatacctactttgaactgcccgaggggcaggtggtgttccacatgtgcggcgagcctacccagacccgccacatcgtgatgcacaacgaggatgctgtcatcagcccttcttggagcattcacagcggcgtaggcacctcgaactatacgtttatctgggcaatgggcggcgagaacatggagtttgacgacatggacaacatcgctaccactgacctgcgctaaaaaagcaccatacacaagccccgtaccgggtccaccggtacggggctttttgctaaaaatttaacttgagaaggagaaaatcatggatctttccgctttcaacctgcagggcaaggtggctctgatcaccggcggtgcccacggcatcggtttttccatcgccgaaggcatggccaagtgcggtgccgccatctgcttcaactgctcttccgaagcaagccttgaaaagggccttgcagcatacaaggcggccggcatcgacgcacacggctatgtggccgacgtgtccgatgaggacgctgtgaacgccatggttgcaaagatcaaggccgaggtcggccctgtggacattctggtaaacaatgccggcctgatgaagcgcgtgcccatgatcgagatgagccacgccgactttatgcgggtcatcgatgtacatgtaggcggtgccttcaactgctccaaggccgttctgccggacatgatggaaaagcgcgagggcaagatcatcaacatctgttccatgatgagcgagctgggccgcgagaccgtctccgcctacgctgccgccaagggtgcactgaagatgctcaccaagaacatcgcttccgagtacggcgagtacaacatccagtgcaacggcatgggccccggctacatcgccactgcccagaccgcacccctgcgggaggtacagccggacggcagccgccaccccttcgaccagttcatcaccgccaagacccccgcaggccgctggggtgagccggacgacatggtgggcccctgcgtgttccttgcaagccacgcttccgactttgtgaacggtcagatcctgtacgccgacggcggcattctggcttacatcggccgccagcccaagtaaagccatttgggccctgcgtcttctttaaccttccgaccagacagctctgtgcagaccaagatctgcatggggctgtctttttacgaagcggcaagcagcctttcctacaaaactttgcttcatgtcaactcatgttaaaatgttccaatttcatgtcaaattggtaacagttcctgtttcatcgttcaaaatgcacataggcgtcttgattttttgtcgaaattcccgtataatcgtcttcatcatccatcacaccctgttggttgatctgaatacgaagaaatttcaaaggagtatatttcacatgaaactcaagaacattgcgatcgttgctgccgctgcagcactggctgttggcatgaccgcctgcggttcttctgcatcctccaccgccgcttcctcttctgtggcttcttctgctgccgcttcttccgaggctgcaagctctgaggctacttccagtgaagcagctgagcccaccaccgctgagtacactgtgtacaacaccaccggttctaccgtcaccgagctgtacctgtacgatgcaggcagcgacgagaagggcgacaatctggccggcgagaacggtctggctgacggcgagaacatcgttatcacccgcgacgtggaggctgacaagcagtccgacgtgacctacattctggagttcaccaccgaggacggccagacccagagctttgagaccctgcactacgaggtcgctcccatctccctgctgagtgtggatgccgctgcaggtgctacccccatcgcttttactgcaccggaaaagtaagaactgtctcatccttgcaaaacgggaaagtctgcgggctttcccgttttattttttgccaaaagagggctgaggctgtcattttcccttgcaatcacgccaaaaatccgctatcatagacgcaaatacgttcccttgcggcataaagggagtaaaggagtggattttcttatggcagaaaaagaagtgaaaggcatcaaaaagttttttgaggagttcaaggcctttgccatgcgtggcaatgtgctggatatggcagtcggcgttgtcatcggcggtgcctttaccgccatcgtcaactcactggtgaacgacatcatcaaccccgccatcggcctgtttttcaacgctgatttctcggacgtcggcatccatgtgggtgatgtgatgatcggcattggttccttcatcaatgccatcattaacttcctcatcgtagcattcgtgctgttcgtggtcatcaagaccatcaacgccctgcacaagaagcctgctgagccggaagctcccgcagagcccaccaccaaggtgtgtccctactgccagagcgagatctctatcaaggcggtgcgctgcccccactgcaccagcaagctggagggcttcccggagatcaacaattaaattttgaatggcctccgctttgctctggccatattcagcggaatcattttctaaattacaaatcgggaaagtctgcggactttcccgatttattttttcacccgcggagccgcaaaggcaaacagcataatcaacgcaaaacctccctgcccggtcgcagtcgctgcggttccagagcagggaggttttattttatccgggaaaaatatggaaaatcagtccggtgaagctttacttgaccttggtcaggtctgccagcttgtggaagatctcggtgttgtcaaacacgccgccgaacttctccgcacccacgccgttggcgtagacgttcaccatggcaccggtgtgggcgtaggtggtatgatccatgccggacttgtggttgatggtgtggcagattgccatgctgaaggggatataggtaccgtacagctcatagtcctgctgagacatgtccttctggctggcagagccgaccttcagggtgcgctcgtaggcggtgcgcaggttctgcacctcgtagtcggtcagcagcagcttgccggcgttggcggcatccgggtcggtgggcagggtcaggccgaagcttgccttcacatcctgcatggcagcttcaaagggggtcttgttggcgatgtagttctgcacataggtggaatcaaactttgcgtaggacatcttctggtgggtcaggttcgtcaggaaggtgtcgtagttggtggtcttgtagccgatggccataccgccggtctcgtggtcggcagtgacgaggatcagggtatcattggggtgcttgttctggaactccacagctgcctgcacggcgttgctcatctccagcacatcgtggatggaagcagcggcatcgtttgcatggcaggcccagtcgatcttaccgctctcggtcatcaggaagaagcctttggggttatccagcagctcgatgccctttttcacgtagtcggtcagctgccactcgcctgcagcggcgtccatggcgtagttcatggccttgccgtcggccagattttcggcaatgatcagggtcttgcctgcgcctgcggtcagtgcagcagcacccgcctgcgtggtgaccacattgtagccagcctgagcagccacctcgtggttgttggggccggtgccgtcgccgttcaccttctggaactcgccgccggcaaagtattcaaagccggagtttgccagctctacgccgatctggtagtagttcttgcgggtcttctgatgagcgtagaaggcggcgggagtggcgtggtcgatattgaccgaggaaatgatgcccaccttgtagcccttctgggcgtgcagcttttcggcaatggtctcatagggcacatcgcgggtccacgggcacatattgatgacaccgctctcggtcttgtggccagtggcgatggaggttgcggtggaagcggagtccgggcagaaagaagtgctgtcgtaggtagtcacgctgcccacggtggggaagccggtgaagctcaggtcggcctcggtcacagcaccgttgttgtccacggtgcccttgtagaagcgggcagactggatctgggcagtgcccatgccgtcgccgatgaacaggaagatgtacttgggtttctggaacaggcccagcaggcagttctcctcgtcggctgcggcatccgcatccggctgtgctgcgtttgcggcaacgggtgcagcagccatcatgccgacggcagaagcagctgcgccaaacttgagaaagctgcggcgggagatcttgttttctttcatgacgtgatcctctcttttcattcaatcaaacattgcgggcctgcctcaggccccgtttttcttcttgtgggaacgcttttattgtagcgcaccgccttgcggggaaaaaccatgccgccgcaaagctttggtaaaaccggtgcggctgcatccgcgccaacgtaaaaagccggaaagggatgtaaaatcctgctcaagtgccaccactttttccacaaacgtctctgcaagggttgaaagatgatggcatttcattgtacaataagagagtaagtgcttttttacctttatataaattgagaggattttatatggcagagatcaaagttctggcactggatctggatggcaccctgaccaacagtcagaaggaagttaccccccgcacccgcgccgcactggatgccgcaattgcaaagggtgtcaccatcgtgctggcatccggccgtcccaccgcgggcgtgctgccgctggcaaaggaactggggctggataaaaagggcggctgcatcctttcttacaacggcggcaagatcatcgactgccgcaccggcgagactttgtaccagaaacagctggatgcccagtacgtacccgagctgtgcgcctttgccgccgcacagaacgtgaccattatcacctataataaagaaggcgttgtcaccgagcacccggacgacaaatgggcactgcgcgagtgctttacctgcaagctgcccatgaccggcgtggacgatctggcaaagtatgtggattaccccatctgcaaaatgctcatcacgctggaccccgcccgccgggacgaggtgtgggccgccggcaaaaagcagtttgacggctgcatcgacctgtacccctccagcccgttctttattgaagccgtgccgctgggcgtggccaaggacggcagtcttgccgcccttttggagcacatgggccttggccgcgaaaacctgatggcctgcggcgacggcctgaatgaccgctccatgatcgagtacgccggtgtgggcgtggccatgcagaacgccgaagagccggtaaaggccgtggccgactatgtgactgccgccgacaacgaccacgacggcgtggctgaggccgtggagaagtttattttaaagtaacgagaggaacacaaaacaatgccgcgcaatctggttttatttgatctggaatggaatatcggctaccagccgtatacctttaattaccatggcgtgcagcagaccttccggggcgagatcgtggagatcggtgccgtgaagatcgacgaggatgccaacgtgctggacaccttttccatccatctgcggccccgcatcttccgtaagctgcagcatcacattgctaaagtcaccggcctgacgcaggccgatctggacaagggtgagcccatcgtgcagggcctgcgccgctttatgcagtggtgcggcccggatgccgaatttgccgagtggggcatggatgacgtaccggtgctcaagcagaacctgtacctgtgcaacatcgacgaatcaaagcccaccatctggtacgacctgcagcaggtgttcctgcgggagcatccccgcaaagagggcgagggcatgacgctggaaagcgtcgtcacccgcttagggctgcccatggagcggcagttccacgatgccctttccgacacgctgtacaccgccgatgtctgccggatgctcgacctgcgggccggtcttgcggcctaccccactgaggaggaatccctgcgggccagcctgtgccctgcccccggcgactaccgggattttgaggtcttccacggctatgtggagcagtacacctggcgcaccgaccccaaaatttacatcatgagctgcccggagtgcggcgcaccactgactccggacgatgtgtggctgaaaaagggcagcaacagctggtacaccctgagccagtgcccccactgcgccggcagcagcaatgccgcaggcaagggtgtgttccagcgctacaagctggcccgccgcgacggcctgcactggagctacgcccgctgcctgcagatcccggacgatgcttctcttgcccggtgggaaaagcagcgcaccgcccagctggagcgtatgaaggcccgcgcagaaaagcaggctgcggagtaaaacagcaccggcagcttcgtagtatcccaaggaagctgtgcacagggcaaaaaaaatgtcgctttgtgttcatgcttgtgtcatacaatatggatatactacggatagaggaacctgcggatgggaaagcgcaggcggaagggatggatgtgcacaatgaacttttgtctgcgccagctgggaacgctggagttctgggaaactctgctggacagttttggcaaccttggccccattgcccccatcatgctggccatggtggagtcgttttttccgccgcttccgctcattgccattgtggcgctgaatgtagcggctcacggcggcattctgggttttctgtacagctgggccggtgtggcgctgggcggcagcatcatgttcctgttctggcggcgggtggtcaagtgcttcttctggaagtttgcctcccgctcgcccaagctggaaaaggctcagcagtgggtgaaccgctttgacacttcgtcgctgttcatgctcgcgctgctgcccttcgcgccaagctcctttatgcatctggcctttggcatctcggactttgacgaaaagcgctatcttattaccatgctgctgggcaaaggcgtgatgattgccatgatggcagtgtttgggcagtcgctggtcagttccatgaagaacccgttgtatctggtgctggccgttctgctgtggggcgggatgtactgggtgagcaaacagttctgcaaaaaacacaatctggaataataatttagaatgccctccgcttcgctctgggcatatttagcggaaaaatatttttataatagggcaacagcagacagcctgcaggctgtctgctgttgcattttcacaggaatggcccaaaaggtaaactccacctgttgcgcttatttccttcggaaatgaccgcgcaaccggaaaatatgccgcttgcaactacggccccttccgtgaaaaagcaaaccagccaagcccgcaggcttggctggtttgcaatataa

SEQ ID NO: 1100 - DNA, 30561 bp, Unknown
  gut microbiota DNA sequence
agaccaaggtgccatatagcaaagcggaagaacactccttgaaccaaacaaagccggacagcttgcgggctgtccggcttttgattttgcttggtttacaggctgttacttattcttgtacatatcctgatagtagttctggtaatcaccgctggtgacatggtccatccactcctgatggttcaggtaccagtcaatggtcagcacgatgcccttttcaaagggggtctcggggtaccagcccagatcgttcttgatcttggtggggtcgatgccgtagcggcggtcgtggcccagacggtcggcaacgtgcttgatgaggtcctcgctgatgccctcgtcctgcaggcggtcatgcaactggttgatgatggtcttgacgatgaagatgttggggcgctcgttgtggccgcccacgttgtacacctcgccgaccttgccgccgttggctaccatatcaatggccttgcagtgatcttccacatacagccagtcgcggatctgcataccgtcgccgtagacgggcagctgcttgtggtgcttgacgttgttgatcatcagggggatcagcttctccgggaactggtaggggccgtagttgttggagcagcgggtgatgttcacgggcatgccgtaggtatcgtggaatgccataacgaacatatcggcgctggccttggaggaagaataggggctgtgggggcacaggggggtggtctccataaagtagccgtccgcacccagtgcgccgtacacctcatcggtggacacctgcaggtacttcttgccctctttccaagtcttggcatcggcatcataccatgcttccttggcgcgctgcagcaggttgacggtgcccatcacgttgctctgcacaaaaatttcggggttcttgatggagcggtccacgtggctctcggcggcaaagttgatgacgtaatcgaaatcgtacttctggaacaggccttccaccagctccttgtcgcagatatcgccctgcacgaatacatggcgggggtcgccctccacatccttcaggttttccagattgccggcgtaggtcagcttatccagattgaccagcaggatctccgggtatttcttgagcatataatgcacaaagttggagccaataaaaccggcgcagccggtgatcagataggttttcataggttcaatttcctcttttcagtctttcatcccgttgtcgccgtcccagtgggcgaagaagcaggccagagcgtctctccagtcgcgcacatcgttgcccacggtgcagcgcagcatccggttgtccagtgcgctccacttggggcggtcggcgctttccgggtgctttgccttgtattcctcgctggtgcagggtgccacagcggcatccacgccggacaggcggatgatctcggacgcaaaatcataccacgagcagatgccctcgccggtgcagtgatacaggccgtactcgtgggtcacgcacagctgcaggatctcgtgggccagatccaccgcgttggtggggttgccgcactggtcattgaccacttccagcttgccaaacttcttgcctgcgttcacgatggtcttgacgaagtttttgccgtagtagctgtagagccacgcggtgcgcacgatgaagtgacggtggcagaactgctccacatacttttcgcccatgagcttggtagagccataggcgctgatggggccgggaatggtggcttcgtcctgtgcaacgccgccgttctcacggccggagaacacataatcggtggagacgtgtaccagtcgtgcaccggtcttttccgctgcctgtgccagattgcgggggccgagggcgtttgccttgaaggcggcatcatggttcacttcgcagccgtccacattggtgtaggcagcgcagttgatgatgacatccgggcggttgcggcggatgaactcgtccaccattttgtagttggagatatccagatccggcaggtccacggcgatcaccgtggcattgagcagcttttcggggatggggccgatctcgctgcggccttcgcgcagctgcttgaggatctcggtgcccagctgacccttgcagccggtaacaatgattttcatatgggtatgcctctcttttgcttagtagcgcagcttgccgtctgcaacgttcttcaggtgctggccgtaaggactcttgccgtagcgctcagcgctttccagcagggtgtcgcggtcgatccagccgtacttgaaggcgatttcttccggcgcactgatcttgatgccctggcgcttctcgatcatgcgcacaaagtcggctgcttccaccagactgtccatggtgccggtgtccagccatgcaaaaccgcggcccagcagctgaacatccagctcgtccttcttcagatacatgtcgttcagggtggtgatctccagctcgccgcgggcagagggcttgacctgctttgccatcttcacgacctctttgttatagaagtacaggccggtgatggcgtagttggacttgggatgctgaggcttttcctccacgctgagcaccttgccgtccttgtcgaactccacgatgccaaagcgctccgggtcctgcacatagtagccaaacacggtgcagcggcctttgttttccgcattggcggcggcggtcttgaggatcttggagaagccgttgccgtagaagatgttatcgcccaggatcatggcgcagcagtcgtcgccaatgaactcttcgcccagaatgaaggcctgtgccagaccgtccggggagggctgaactttatactgcagatggatgccgtactggctgccatcacccagcagcgcctcaaagcgaggcgtatcggtcggggtggagatgatcaggatgtcctgaatgcctgccagcatcagcgtggacagggggtaatagatcatcggcttgtcgtagaccggcagcagctgcttgctggtgaccatggtcagcgggtaaagccgggtgccggcaccgccggcaagaatgatacctttcatatttgtgcactcctttaaaatagattgaaaagttgtgcagctgtacgccgcccagacgggagaccacccggatgacgtatggattcaaagcggagctgcgtccgctgtaaacaaattcaggagccgctcccccctgcccaacatggcaaaatgggaatagcagttcactttattttactatcaaatcacacaaaaagcaagaaagaacggctttcccgaaaaattttccggaaaagccgttctgaaactccttcaatctcgcatttgttccgcccaaaaggccccctctccgaggggactggcaatgccgcaggcattgactgggggagttaccacgcaaagccccacttggagaaatagcgcagcaggctgcgcagctgccacaaaaagggcttcaggctgcggtgcgcggcgcggtgccatgcatggatggccgtatactggggcaccagatacgccttgccccgggtgcgcatcttctgggtgaggtcggcatcctccacgtacatgaagtagtcctcgtcaaagccgcccacagccttgaacaccgcagtgtccacggccgagaagctgccggtgcagaactcgatctcggtgggttttgtcaggtctttgtccgccatgagatagcgctcgttgtactttgcccagaatttcaggcagggcagctggcggtataccatggcccgcacactgcaccggcgcagcggcaggcgctggggcctgccgtccgggaaggtaagtgcgggccgcgccatcaccacgccggggtgctgtgccatccagtccgcaaggtcactcagcgtatccgcagtgagctggatatccgggttcaggataaagtgcacccggctttgcagcaggctgagcaccgtgttgtggccggtgccaaagccgccgttctctgtgcggcagagcacctccaccttctggtcctcgcggatgtgcagagtgccgtcctttgcggccttggcaaggcactggccgctgccgtccgggctggcgttgtccaccagatacagtgtcagcgggtggcggcgggtgcagtccagcacggtctgtgccgccctgagcgcttcatccgcgccgttataaactacaatacaagcagaaagttccatgtcgttcactccagcggtttgatgtcaaagctgaagtcctctttcatcaggtcaaagttcgggttcatgcaggggtcgcctgcggccagctgctttgcccaccgcttctggaagcgctccacctccgagatgaagcgtttgcgcttgaccgggttctcgtccagaccacggctcttgctctcgtagtggtacagctgtgcaaatggggtgaacacgttggtatagcccgcttcacgcacgcgcacgcagaagtccacgtcgttgaaggctacagcaaagctctcgtccagaccgttcacctgctcgtagacgctcctgcgcaccatcaggcaggcggcagtgaccgcatacacatcctgtgcatagaccagacgtcccatatagccggggtggcccaccgggaagttcttgtgcatgtgggccgcaagggtcaaaaagccgaagccgatgcccgcgtgctggatggtgttgtccggataaagcagctttgcgcccacgcagcccacacggtcctgctgggcgtacatgagcatttcttcgatccagcgcggagaaatgacctcggtatcgttgttgagcagcagcaggtattcgccggtggcttcctttgcgccaaagttgttcagggcgctgtagttgaatccggtgccctgccatgtgatcaccttcaggttcttgtgctccttctgcagcttttcatagcagcggaaggtggcaggctccctgctgttgttctcgatgacgatgatctcaagatcctcataggtgctcctgcggtagatggactccacgcaggtgcgcaggtcggaagaatggtcgcagctggggatcaggatgctgacccggcccggctttgtgatggtatagtccgtcttatagaagcccggcgtacccgggatcatggaaacttcatccaccggcacacccacacgctcgtagtgagcatacagggccttgaccgcagcttccagacagtaggtcttggccgaaatgttgcttgccacgctggtggggctggagcgccagtagtacagcagatgcgggatatgcacgatcttgtgcgccttttcggtcaggcgcaggtagagatcatagtcctgactgccgttgtaggctgcacgctcatcgccgcccacagcggccagcagctttgcgctgaacacgctcaggtggcagatataattgttggagcgcagattatccagcatataatccggcttgaaatggtaaacggtcaggtggtcgatgtcgccctcaaaggtcacttcatccgtatacacaaagtctgcgccctgttcggcaatggcctgtgccacgtaccacagagcacaggggtgcaggatatcatcgtggtccagcagggcgatgaactcgcccgttgccagtgcaaagccctgattggtgttgcccgcaatgccctcgttcttttccagcttctggtagcggatgcgggggtcttccgcagcacgggctgctacggtctggcccaccgtctcgtcctgtccggcgtccacaaggcacagctcccagttctgataggtctggttctgcaccgagtccagcagctccaccagaaactgctgcggcgtattgtacagcggcaccacgatgctgatgcgcggcgcggcgggctggtcggccgcctgccttaccagcagctctgcgctggcaaagcggtcggcgcgcatggtcctgcccgggaacagcttcgcgtattcctttttggcctttgcctgcgcacgcacgccggaaatgcccacccgacgcagctggcccagaaagacgaacggcgggaaggtgtgtgccagctgacggcccttgctgacaaagtagcgcagcggccagctcatcttccagaaagtagagctggtcacattgttcagtgtcttttccagatcctgctcatggctgcggctcagcgaaagatcgctgcgcagacgctccagctgagccgtctgctcttcgccggtgcgttcggcctgctgcatccgctctcgcagatcgtccagcgtcatctcgtagcctgccagcagctgctgtgcatcctgcacagcggcgctgcggcagaacagcgcggtctgctgggctttgccgcggttcttccactcaaaatcccggtacaggccctgtgcggccagctgctttgcacagtcagccatggccgatgcatcggtgcataccagcagcacctgtgcacactgcagtgcgggcagatccacccattccgagtcctccaccaccagcagagcagcggtgccctgctctgcattctccggcagcagctgtgcgccggccttttccagtgcttcggccagtgcgccgctgccgcccagcacctgaatgctggcaggggtcagctcccgcacgatgcgctgcgccagtgcacggcagcgctcggcctgtcgtttggtttctttttcctgatccattccgatctccgctcctatggaacttttttatcttaaaatgatctctcaaaaaatcacacgatttatagtataccaaatccggcatgatttgagaaggttttgcgcgcatttctttgcagttttccactgcttaccagtggaacaggctgtgcagccagccaaagaacccaccgccggagctgccggaagtggaaatgctcacacccgtgtagtagtggctcaggatctcccggtagcccatgccctgctcctgtgcgtaacccacagcaccgcactggctcatgcccacgccatggccaaagccgtaataggtcatgcagggagtgccgctttcgtccgcgccaaagtcaaagcagtagcgggaggaaacgaactggccgatatagcggtagctgcggccattggaaacaaaggtgttgtactgcacaaagccgcccagatccttgtgggtggtgtcggcgctgacgtagggctcgccagtgcggctgtcgttatactctttataggtatagtcttttccgatgacccggcgcagcttgttgtggtactgctcctcgtaggggctctccacgctctgcagatagggcacatcggtgccccatgcgtcccggctggagcaggtgccgtacacgccggtctgggtgttatagcccgcactggccgaccacacggcgtcgcagacgctgccgttataggtgagcacctcgttcttcaccggttccaccgccctgcggatggcttcccgtgccgaggacgggatctggtccaccggagtgtagatgagcgcattggaagaggagccgtactgcttgtggtattccagataggaatggatggccaccgcctgtgccttccacgcctgctgggcggcgctggcgctgacatagctgccaatggagccaagctccgtgtaggtaatgcccacaaggcagtccacaaggttcagcgtgacattgcgctgcaggccttttcccttgatgttgaggtaaggcatggtgatggtatcactggtgccaaagagccatgcaaggcagttttcctcctcggcagggatcagggtcgtgtccgcgccacccatagtggtggctgccgaagccgccgggaccagcacgcaaacgcacagcgctgctgccagcacaaacgccgccgcgcggcgcacaaaccgatgcagatgtttcaaaagtgatctcctcctgttttttgcagatttctgaccgtgttttttacagtgtaacacagcctgcgcctgcgggcaaggactggactttcgttttcacatctggacaaagaagaaaccggagggcctttcccgttcgggctgctctccggtctgatttataaggtctccggccgacgacgcatggcatcgtcgatctcgttctcgatctcccgcaggcagtccagcagcaccggattgaacgccccggcctcgccggtgcaaagcatctgcactgcagccgcgcagggtaccggcggctggcttccgctgccagtggtcagcgtttcgtaggcatccgcaaggccgaccacctgtgccgcaatggggatctgttcgccaaccagctggtccgggtagccgctgccgtcgtaccgctcgtggtgccagcggcagatctgataggctacccgcacaaaatcttcgtcgcggtaggcatccagctcttccagcatccgtgcacccagcagggtatgctggcgcatggtttcttcatcctccggcgtgcgcggctccgggctgttcaggacctgctccccgatctccattttgccaatgtcgtgcagcaccgaggccatgctgatggtacggcgcatctcctgcgtcagggggtaagtctcggtcttttgcaccagatggtccagcagcattccggttagggtgctgatgtgctgcacatgggtgcggctctcgccgttgcggcgctccaccacccggctcagaatgccgatcatcatttggctgcgcttttccttttgcgacacctgatccgccaccatggcgctcaggcggcgctgctttgcatacatgcggatggtgttggtaatgcgctgatacaccacccttgcatcaaaggggcggctgatataatcggacgcacccagatcaaaggcgcggcgcaccgtgtccacattgtcctcgctggagatcatgatgaccgggatctcttccagcattccgcgctggctcatggcttccagcacggtaaagccgtcaatgccggtcatgtggatatccagcagcacaacggagatgccggtggggttctgttccagcaggcgcaggcagtcctcgccggaagccgcttcggcagtgtcgaactggctgttcagcatctggctgagcagcatccggttcatggccgagtcgtccacgatgagcacactctggcggctgtgggtgggctgcaaggcgtgcggctccggctgacgctcggtgatcacggtgtttttctggatgcgtgcatagtgcatcagccgttccgcgtgctgcaccgcatcgtccacattttcgtcgtcgatccacacgccgccaatgctggccgacatgcggatgcgggagtagcccggcacgctggccgcctgcagctgcagacggatctgttccagacgcgggctgagctgttcctgccggatgtccggcagcagcaaaagcagcctgccgccgtcgtagcggatcaggcggtctttttccgaaaggccgcgccggatggtgcttaccgccgtttccagcacgctgttgcctgcaccggagccgtaaacatcgttggagaacttcagatcgtccatatccagcatcgccacaccggcggtaatgctgcggtagcggtagttctcatcataataggtgcggttgtaggcaccggtcagcgggtcgcggtagcgcttttcccgctcgtcggtaatactgttgagcagccgctcaccgttttccgggtccaacagaacgctgcggtcgatcttgcgggtcagctccagcacacagagttggccatccacctgcacacagctggccgtgatctcgtacagctcctgcccaaagtattccagccttgttttccgggtgttcttttccagcgcctgccttgccacgcagttttcacacggacggctgcgccgccactgggcatagcagggcgcgctgccctttttgccgccctgcacctcgtccgccttcatcaggcgcaccgtcatgaacaccttgcggagctggcgcatttcctcttccatctgctggcgtgttctgtcttttttgctcatcatcgcatatcccccgctgcaaaaccgcgcgttttgggccgcacggcattccttcacgaataacattatactattttttaccagaatacgtcaatcttcaccccttgcagcctgcggtgcggaatgtgtcgttttgatcctgtaaaatcaacgtaagctctttatttttgccaattttcctcatcagacaccgtactgtgccgcacaaagcgacgcaaattggggagtgcagttttccggccgtctgctgcccgctctgcctgggaacagtccacgtgtttccgccggaaactcagtcttgattttgtgcgcagaatccgctataatagtaacgttcttttaaattgcatatcagccggtgtgtcggaatggcagacgagggggactcaaaatccgcttcgtggtttcgtgtacgattctgaaattgtcacgaaactgcgatgaaatttgagtagtttgtgaggagagattttctacatccctcctgaacatccctccaacttcccaaacacggtgctaaagaacattaaaatcaatatcagccgatgtggcggaatggcagacgcaagcgactcaaaatcgctcgggaaaccatgtgggttcgagtcccaccatcggcatcaatgaagcagttcaagctatttttggcttttggactgctttatttttttactagggctcatactttcgtgttctccgggaaaatattgacgatagcatttgccgaagataccttactggagaagtccagatgggtataaatattgctggtggtgctgatatcactgtgaccaagccactcctgaatttctttcaggcttacgccattggcgtaaagcaggctggcgcagctatggcgcagatcgtggaaacggatgcgcttcatctgatgtgctaccagaaaatccgggaaatgttggctcagaaagtcggggcgaatacgccgccccatagggttcacataaatatagtcgagatagtccgtgcagtagtctttgccacagaccttccggttcaactcctgctcctttttcatcttattgagcatttgctcacaggcaggaataaggggaagtgtccgacaactggacttcgttttggttctatcacgagcgacttcggtcataacaccatcaacctttgtggaaacgactgtatgctggatactgattgttttgttctcaaaatcgattgcgtcccatttcagaccaacaatctcactgcggcgcagtccatagaacgcagccatgatgacaccaaattctgatggatcaccctgaatcactttgaaaagctgctccagctcctccgccttatagacctccgacttgaacttttccttacgaggacgttcaacgcggtctgccgggttggaacggatcataccgatctgaaaggcatactgtaagcatttgcggatgttggcatgatagtgaataacggtgtttgccgtaacgccacgatccagctcatgctgatagaagtcttggatgtacttcggatgctgctcaagatcttgcagggtataattgaatggcttgaaataaggaatgatcctgcgtgtaattacgatttcatagtttgcataggtcgtgattgctacacgcgacttcatcattttcaaccaatccataaagaaatcggtgaaaagtaccggggaattatcaaggcatgggtcaacctctttgatggggttgactttcagccagttgctgtcaattgcgtactgaaaggcatcggatagttccttgtgccaatccagaagctgctgaaccgttgcttcctcctgctggcgttcatagcggaaaaacgtttccagatcgcgcggagcgagagctttcagggacaactgcttcttttcaaagtaaggcatgataactttacccatgtcataagcatatctgccgtaagtttcgggaggaaggctcattacactttcccgaagccagcgggtgaaatactccgatacaggaaggtcgcagacctgctgcatcgtttccgggttgaactccttttgtgtttgacgcaacagggattcagcccgctttttgtttcccttgacgggaaggccagtgctgattgatttggttctgcgctttccggtcgtgtccttccagcttagaatcatctgatatgtaccgttttgttctctcaggtgtccagctacatttatcatattaaggctcctttctgcctgtagctaaacgccgctctcttaggcacccatagtttagaataaacgaggatgctttgcaaggatggcgcaagggattttaggacgcgcatccctcctgatggtcaagtttgattgaccagatactctacaacgcagagtttcgggattttgtaactgcgccccacacgagcagagcgaatcttgttttccttaacaagcagataagcattcttgcggcagatgcccagcatttcctgaagaatctcaaccgatacgacatcaggatattttttgaacatggtcagatatttctctgtctgacgagtatgttcgtcctgctgaatcaacgtgcaggatgcaatttcactcatcgtagttcgctccatttcagttcaatatgttcattatgtttataaggcacaagaagatactatatgtaatatatgggcggcatttatacagatgccgcccatattgccaaggggatatgcttgattttagaacttcatcggcagagcgtccttgcgacctttgccgttgtaggccatgtagatggggaaaacgtatttcttccatccgggcagcttggcgggattatctctgccgacacggtagatctccataggatggacgctgcccagcgcacggacgagccgttcttcgctgaactcaccatgatacagttccacgaagtgcatcacgccccgcaggacagatgcacggaacgaatcgggcttaccgtcccacgcagccacgatcagccgcagggattcgcagtagatcttctcgcccatctggttgtacagcttgagagcggtgcccacgcagctgatacggtagtcgctcagctgcaggctgtcataattgaacgccagacccacccggttggtggctgcgagaaacgctttggacggagcatcgccgcccacgaccttggcgcgcagcttgatgcccgccgtcaggggtgcggagtggccgttctgctcagcaaagaacagggcttcctgctccatcgtcaagccggtgtagaccttgcagagaatcggcaaatccttgccgccattgcggagaatgcgcccctcgatggtgtgctgaccgtccaccacataatatctgccgttgcggaagctgactttcggctcgttggcgatatactcgttaaagtcggtggcaatcagttccacctgactgcgatgtactcgccgctgatagacctcacgaggatagatcagcttactactgtgaatcaccatcatctggtaaggcggggtgatattgaaagaagcggcaaaattgttcgtgtcgtttttcaggcgcatcgcatttcctccttgattcgccaaatgtatttttcggcttcggtcaaaatctcagccacctgcttcttacgcttcgggctggtgagcaggctgggattaaaggtgaagctgtattcgagccgctggatcatggcatgaacagcggattgcagttcggtgtataacatcatttcttcgaccgtccctgcgtcctcaaaatcggatttgatgggcgtgtagggatagacaggcggctttccatcaaccgtttcaggcggcgcgtaagctgctgtggagcggatgattggtttcagcttctggatgctccccatcgggttcagggcaaggctgatcttcacagcatcatcgacccggctcatttcttccggggtgaggtgtcctgcaaaattctggacacggctcttgtcaatggtgaagatctgctcagcttgaacgatggaaggctccagcttttccggttccaccagacaatgggtcggctgcgcagctttcttttctgtcttacttgtcaaagtcgcaacgatcaaagtcggtgaataggtattgcccacatcgttttgcaggatgaccgcagggcgggttccgctttgctcggaacctgtgctgctgtccagtcgaatgaaatagatgtctccgcgttggaattttaaagttgattccaattgcgaaacctccgtttggatatgtaagaagcccgctgtacctcctaggcagcgggcttctgttaaaatatgaaagcggttttatttatacggtacgaatcacctccccggtgattggaatgaagcacccgcatcagcggtgcatgacaacgtaatcgtgaccgcgccgggtctggcagacggtgcatacatccatgctcttgtctgcgctcggcacaagagcgattttgaaagccttagcctctacgaaatgccgcagacaggtcgcacagagggttcggatggacttgatcatttccggggtcagttccatctcctcgtatatctcctgttcgcgcaccgtaggattcaactcatccatttgagtagtcctccgtgtttgaaaaagtgaatggcggataaatatgtaaaagaacaggagtgaccgaagaccaaaaacagcattcggccgctcctgataaaatatgttaaggtctcgcatattcgccctcggctccctgcgagtggggaatcattcggcagcggacttgtaccgcttcattggcatttcagccaccccgcctacattctgaccgggccgcgaattacggaagtatcattatcgaagtaccgaacaactgaactcttcaattttcaaggttcgtgagtgtggacattttgccagcagtgggagccgcttttgaaattgtcccctcacttggtaggcatcgaaaatggtcattctacaccctgaaaataaaagttcttcaaaaatttagtgattttcaaaattcgcttgcttatattttgctgtgcaatgcgatatgctttcgataattcaacagtgttataaccttcataaacatacaaggttaaaatttccaagtcctcatcgttcaggttttcgagagcaaagagtaatttttcatcttcaatccctccaatccatgtaaagcggctcttagtttcgtggtagtgttcggtaatggaaatggcttccttatacttgttcataaggggcgaataggattcttcgccctgctcaaaggaaggggcagcaatctcctgcgtatggttctggtaagaacgcgcagcattgaaaacagaccagtcatactcatacattgcctgaattgcttcgctgctcatgccagcgtcctcatactgtttgcgaatgatagtccactgacggtcaaagttctttttttccaggccatagttgaagcccatgttaaacctccaaattttcgataaaacgtgaaaagtcgaaaattcgaagttgctagggataccgtgcggccagttccagccacgaaaaacgggcaaaaagaaacatgaagtgtcctttccgccggatgcggaggttgaggacacttcactgcaggacagtttgcgggcttttcttggcaacaaaaaagagatgcactaaagaaaagggtaccgacactgttttccatccgaagatggaaagcggtataagtatcctcagcccttaatgcatctcaggcattcgatattttttgtgtgagttttgatagcaaataaataagctgcaactcacttcaagagctgcagcttaccgtcataagatatttttaatgtgaatattgctcggttctttgcagaacctaaatatccaatctatacagattttcacctttgtcacctctttttgggttgcccgtgtttagcaagtaatcttgagatcacttcaagtcactcttgtggtgatttatcaaactaccggaacgaattagaatgaatatgaggtgagctttgatgaacaatccactggatgagtttggtgcaaaagttcgtgcagagcgagaagccagaggtctgacccagaagcagcttgccgaaaaattgggcatgagtcaccgcactgttatgcaggcggagatctgccgcagcaatccaaagatggaaacggtcattcttctggcaaaggaactgaacatcagtttggatgcactcgtgttcccagaaacggcaacgccgaatgcagtgccaaagtgtgtttatgacttctttcgcggaaagacagagagcgaagccgaaaagctgatcgacatctgtcggcgaatcgacgaactgaatcatgcaaagtaaggcatcggatgctgtgagcatctggtgtctttctttttgcaaagaaaaaagcagcgaaacatgacgtttcgctgctcttggcgtatcatcatgtgaattaggaaaaactctccccattttcaggtagatgataccaaatgaattcttcgatatggtttagtcttgcataaggtttgcccaagaaaattcttacggttcaaatttatagccgatgccacggatgctcttaatcaggtctgcaacatccgagaaatgtttcagtttctttttaaggttgctgatatggctggacagtgcattacgagagtaaaaagcagaatcgttatgccagatggcatccatcatcatttcatgcgtgaatacctgcttctggttcagcagaagcaatgccagaatatcaaactctttttccgtcaggtcaacagccacgccatcaatgctcaccgaacgctgttcaaggcagatttgcagatttttgaccttgatcacagtggatttgtgttcgcattgcaacggacattcttcgggaatgcgcacttcgctctccgtaggctgcacatagttacaaattatatcaggagaagtaacaatgattggaatcgtctggattttctgcagcgtttcaatctgttcctctgaaaccgcccttgtacagatcgcaacacagatataattcctgttgctgagcatacaaactgcgtgatcaaaatcatctgtgcagtccagttccagtccaagctgtttccaaatgccgattttggcgatggtggccgtactttgtgtatatccaattcccaatacatgagatgccatttgcttttaacctccgggttcttttgataatgctgctattttaggagattcaccgcccttcaaattaaatacttttagataaataatcttttataagtataaacgctaccaccgtcaccgtcaattttaataagtttgcattttatcaaatattgcagaaaggttatatggaacaaacttaatatttacattattgaatctatgattgcgaggttggcatacggaaccgtaaacgctatacagacctcttgacaaaatccagcagaagaataaaataaatgcagttattgataaattgatttatcgaaagaagtgacagaacaatgcctgcaaagaaacaggtgacaaaagaaatgatccttggtgcagccctccgggtgctgatggaaggcggaacggaagctgtcaatgtaaaaagccttgccgcagaactgggatgctctacccagccgatttatctgtcgtttgacaatatggatgcactgcgcaaagaactgattccaacagcagtgaacaagtttgtcgaactgatgcagaaagagtgcggttcaacacgggtgcatctgtacggcatcgagtacatttgtcttgccaggcagcagccggaactgttccggttcttattcatgaggtcacaggcatttgccgaaatgaaacaggtgcttttgcccataattgaccgtaccatagacgaactgatggagcagtaccatcttgaccgagccgccgccgatgaactgcacgaccagctttggatgcacacccatggtatcgcagccatgattgcgacagactactgcgattgggatatgagcaaggctcagcggatgctgaaccgctgccagaaagctcttgtgagggaatacgaggcgtaaaaatgttttccaacaaggatttaagaaatctgatctttccactgttcattgaacagtttcttctgatgttcgtgggaatcgcggacacttttgtggtcagcttttccagcgaagcggatgtttcgggcgtatcgctggtgacgtcctttaacacggtgatgattttcctgtttacggctctttcggcgggcggtgcggtcattatcagccagtatatcggctgtgacgataaaaagatggcgtccagagctgccggtcagctgctgacgatttcctgcctgatttcagcgaccttgaccatactcatcctgtgtttccgcaagccgctcctgcggcttctgttcgggcagatcgagccggatgtcatggcggcttgcgaatcctatctgtttatcaccacactgtcgcttccagccttggcggtttatgatgctggtgccgccctctgccgcagcattggtaagaccaatgtgaccatgtatatctcccttgtgaccaatatcatcaatgtggtgggcaactgcgtgggtgtgttcggactgcatctaggagcggctggtgtggcttggccatcgctcatttctcgcaccctttcagcggtagccgttaccgctttctgctttcagaagacaaacgctgtgcagtatcacggcccggatattctggcatgggatggcggtacgcagaagaaaatcatggggattgcactgcccaacggtctggaaaacggggtgcatcaattggtcaaggtagccctttccagcatggttgcattgttcggcacctaccagatcgcagcaaacggtgtggcgcaaagtatctggtcgctagcatctattatggggctggcaatggctcccgtgtataccacggtcattgggcagtgtatgggcgcacgggatattgatgccgccaatttttatttcaaaaagctgaatcgtatcacgctggtactgtcgattttgtggaacgcctttgtgttcgccctgacaccgctcatcgtgcggtattcggctatttcgccggaggcaaagtcgctggtcatctggctggtacttatcaacaacatctttaacggtcttgcctatccttttgccgggagcttaggcaatggcctgcgcgcagcaggtgatgtcacctttacgatggtcgtttccatttcgttgacgattggcgcacggctgcttttctcggccctgtttggtctgtatttcggctggggtgttatcggagttgccataggtatgagcatggatcttgtattccgcggtgcgattttcatttggcgttataaatctcagaagtggacaaggtttcagttgatataagctatttctatccgagtgcatctacgagaaatcccatgtcctacaccatattttggtctggacatgggattttttcatcttattttttggaggaaacaggcgacttcagttctataaaaccgtcctgcggcattgcatccgggataaattccagacacatcaacgtattcaggcaccattgcgatacccagttcgtcgagatgccgggaatctcctgatacgggccatcggcggcaaaaccgttcacataggaatggggtgcaaaggcatctgttccagcgttctgcggaacactttccatcaggacagcccatgttttctttgcaagttccgcatcatgggtgtttgccgcactgaatgccgaaactgccgtggcaaacattggccagctgaaaggacggttcacgatttgcccgtgggtccgtctggtcttttcttctgccggaagataatagaacttgcccagccgggtcagcagcgttttcagagtatcatcctccagcagatcggcagtttccagccagatctgcggcccgcccatgcagatctgcaaatgctggttgggggtgttctcaatctcgccgtggtagatcagatgcccggtttccgggtcatagtaataatccggcccggatgcaaagccgtatggtgtggcagcaatatcacggatgccggtctcaattttgcgccggtaggcttcatccagtgtccgctcgtagtgggtcatccagttcgacacataactcgaccaatccggcccactgcgagcagagggaacaataacgccatccggccgcttttccatgctgtgcgggttctggctcatggaaacgtcggcatctttcacgtcttccatgacctcgccaagccgtgcgtccccggtcagatagaacaggaaacggtggtgtcccgccatgccgatgcgtggttctttgcaggagcagccccagtgccgtacattatggcgggaacccagccccttgagtgggccgaaatggtaggtgtccacttcggatgcgtgtcggctcatcgcttcggcaaggctgaaaacatcctcacgcccggtgtgcaggaaatagagccacagccagtaggtcggcaccagttcggtattctgccacgcatagccgccaacatcgtacttccagcaatggcgcatcgggtcgtaggtgtgcattacatcgccgtagtcaaacaggccgtaccaatgccgcgcttccacctcgcgttggtagaacgagaacgcccggtcaagagcggtttccagctgctccccggcctttgtttcaggatgtggaagcccccaatagccaaatgcacgtttttcgtggtaatacgccgggtctgccacaacgaccggcggcttttgcagtcggtcggcaaactgccggagctgctgttcggagggcaggctgtccgtgaactgcacccggcattcgctggtcactccgatgccgtaggcactggggcgtaaatcttcaaacccctcatagcaggtcatgggatgacttttggtgtcatagtgccggaaatcataggcttcctgcaagggcgaatagaaccacaaggacaactgtgcattttcctgatccaacgcatttgcggccagaccaccgggatatttctgccagaaatcccggatgcctgccatcacgccgccattttctccggtcagtgccataacgcccggtgcccttgcaccctcctgtgcgcggatgcggcagcacgcagtatgggtcgccttaaaaatggcataatgtcggttgctgtcctgcaccagatgatactgccgccagatgggaatatcctgtgaggcctgtttcatatcctctgacgcatttgcagcagaaatctcgccgttcagctgtgcctgacagactttcggcccaagatgtggaaaccttgaatccagattctgcggacattcatggaacaccttgtcctcttgcagatattgcacatggcgggtgtataccgcaccggaaagctccgtttcaaaccggatgcccattcctttgaggaaatcccgctgttccacaccgtcaaacaggaaggtgtggacaaagcgcatttctgcgctgaccttccagaccgagagccgtatcacaaaaggcatggagcaacactcgccgtgtgtgttctctccgtaaaatgcaacggtcgcctgcaaagggcctgcttcttccagaacagccttttgaaccacgccgtggaacttctgcacccgtgtttccagcacatcttccgtttcgttccggcgttccagcagaaagaccgggtagaccttgtgtgcggcctttcgcccggaaacagaaatatcctgcaccagaaaatcacagtgcaggttttctcccagaggaacggtcagccggagtacgccggtatccagtgtacaggcatccgggccttttatgatctgaattccgctgtccggctgctcttttggagttggcaaaagttctgcaccctctttcagcagtgccgcatcggtggtatgcgcactccatttgatgcttccatccggccagaacgccataggcttgctctgcaatggcagtgtttttccgtctggtgctgtcagctggaacgatgcagccgggacctcgcctttttcccagacaccgccgaaggtaacaaagccgcttgccgtccgtccttgtaagcaatgtactttcatgctgtattctcccttccgaagttctttctggctccattatagaagccgcttttcccagcgtctatatcaataatttttcattctatcaagaatcacaggcagataaaaacaaagacgccctcccacaaaggggagggcgcatgatgaaggagaaaatgaagaaagcaaattgcggatgggtttgaaatgtggttcagagggctgacataaaagcaatgtcctctgcggcgcagctcaggatgacttcttcccgaaggagcggaatgtcccgattctgctggtgcagccatttggagatggcatcatactggatgcagccttttcccagcgggcaaggcccataagtatcgtcagtccccgtagaaccgtaggtgaagtccttgatgtgaatggcatccacgcgggaaccgatcagagaaagccagtcattccacagctttgcctgatgggggatgttgtggttttccagcacattggccgggtcgaagatgaagtgcagatgctccgggtcggccacatggtcgatgagctgctgcaccacctccagactgtccagcggatgccagtagaccggctctaccgcaaagatggcgtctgtttttgcagcagcttccacgatgcgaagaatgctgtcgaacatccattcgcgccgtgcggcgcgttcttctgcatccagatgcagataggacgtttcactgccgacgcagtgaccgcctgcaagatgctgccagcccagaacacggcagacattctgcacagcagcggcacgtttttctgcgtccgggtcgctcaagtcctgataacagcccagcacagagatctcgacctgatgggcggaaaaaccactccgaagggtttccaactgttccggcgagatatgttgataatcgttgatgccctcaatggcctttggcacagcgacctgtgcagcctgataaccagcgttgtgcagaatcaatgccagttcctgcgccgggtgcttgccataatcgtgggcacggcagccaatcttcatagcaggtgcctttctttactggggctgcttgccgatgtaagcgaggatgccgccatcaacgtacaggatcaggccattgacaaaatcggatgcctcggatgcgaggaacacggcagggccacccagatcttcggcttcaccccagcggcctgcaggggtcttggccacgataaactggtcgaagggatgacggcttccatcgggctgaatttcgcgcagaggtgcggtctgcggggtagcaatgtagccggggccaatgccgttgcactggatgttgtaagcaccgtactcagaagcaatgttcttggtcagcatcttcagaccgccttttgcggcagcgtaagcagaaaccgtttcgcggcccagttcgctcatcatggagcagatgttgatgatcttgccgccgccctgtgcgatcatgtcagggatgatggcctttgccacgatgaagggcgcgttcaggtcaacatcaatgacctgacggaactgtgctgcgctcatctcagtcatggggatgcgcttgatgatgccggcgttgttgaccagaatgttgatgtggccgacttcctcggtgatcttggcaaccatggcgttgacggcgtcctcgtcggtaacatcgcagacataaccgtgagccttgatgccggcttcttcataagcagcgatgccattgtccaccagttcctgcttgatgtcgttgaacacgatagtcgcaccattcgcggccagtgcctttgcaatggccatgccgatgccgtaggatgcgccggtaatgagtgcgaccttgccggtcaggtcaaaggatttgggagtgcagatagccataatagtagtcctccataaaggtcagtgaaatatcattcaaaggtttccagtgcttccaccagtgcaaggatggtcagcgactggccgtatgccatgggagcaatcagaatgttcttgtagtggtcgcggtcatagcccatgccggtgccgccggacactttcagcaccgtaccatcggtgtcgatgttcttgaggatggcgcggatggctttctgggcgcaaggcaggtaggaatcatccagaatccccatgcggatgcccttcaggatgccagcggtgatggcagcagaaccggaagtttcttcgtagctggtggggtcgtccagaacggtgtgccacaggccgtcctcgccctgcaggtcacgcagcgcacgaacctgtgctttgtaggtgtccagaatgaacgccttgaccccctgattcagcgtacccttgaacatatccagatagtccagaatacccagcgtgaaccagctgttgccgcggcaccagaacacgccgccgaagttgtccatccgattgaacgaccagccgtggaagaacaggccggtgtgggtatcgtacagatacttgatgtgcatcagcacctgcttgatggattcatcgatccactcctgcttgccgtacttctggcccatccggttcaggaacaggacggtcatgaacagggtgtcgatccacatttcgctctcgttcagacgaacgccctgacggtcgccgttggcactggtgacgtgctggaaaccgccctcacgggtgcgtgggatgcactccatcagccactttgcccagtccagacagagagcttcaaactcagggtcgtggtagatctcgttcagttcacacagggtcagcagcggagtggtcgtattgatattgcgggaaggcagaccctgcgcaatattctccttgaaccagtcgtgcaggaaggtgcggtattcctccgaatcctgcatcttggcaattttgagcagtccgtacaggccgatgccctgcggccagtcccactccttgatgccgaagtcacggctgaaaaatccgatggcctcgccgccttctttcaaagtgtcctcgttttcgggggcaccaaggtgcatcagcttctgaatgacgagatccagcttcttctggatcagttcttttttgatttcgtttgccacaaaaaacacctcatttatctgtgctgttttgattggttgaagtaagcgatttgcgatattgtgcaggcgtaacgtgctgatatttcttgaacacacgccccagataggtgatgctctcaaacccggtacggcttgcgatctcggaaacggaaagcgttgtcgtttccaacaggctctgcgccttttttacccgcaggatgttgacatattcgttgatgccgaagccggtcacctcgtgaaaggaacggctcagataatacttgctgatatagaactgctcggcaaggttgtccagcgagagtgattcctgaaagtgatctgaaatgtaatcggcgacctgataaacggcatcgaactttccgccgctggccttgccctcctgcacatcattcaagcaggcgacctgctgattgctgcgccggaagtggatgaagcccagaatcaactctgaaaggatggcagtctggctcataggctctgccttgtccagttcctccatgatttgcagaaacaatcggctggtattcgctgtctgcttcggtgtcagttcgtaaatgccgtagtgtttgtggaagaacgcaccgattttcaattccgggaacatcttatcgaccttttccacaatatcccggtctacatagaggatcacacgttcatactcggattccgggtcgcccacaatggaatgggacatatggatctggccgctgtccacaaggatcaggtttccggcctgtgcttcataggcgcggttctcaaaaaacatctgcctccgcccgcggagcaggagataaatttcgtactcctgatggaagtggttgtaccgcatatcaaagtttgccggacgaaccatgtgttccaccataatgccgtttcgtttgcggtaatactgggtcgcatcgccctgaaccatgctgtgcagccatgttgtttccatgaaatgctccttttctcctgaacaggcggtatccctgcggcaatcgccgcaggaacctttgccttgattatgtcatatctgttcaggtttgacaagcatttgcactgcggggcttacatcaggcccagcgtggtaggcagccactcgctcagagcgggaatgtaagtgaccagcatcaaggagatgaaaattgccacgaagaacggaaccagactcttcatcacgttctccagacgctgctttgccagagagcagcccacgaacaggacgttgccaacgggaggggtaatggtgccgaccgccagattcatgaccatcataacgccgaactgtacatcgctcatgccgaaggtgcggacaatgggcaggaagatcggggtgaagatcagcagagccggtgccatatccatgaaggtaccgacgatcagcaggaagatgttcaggatgagcagcaggacgtacttgttgtcggagatgcccagaaccattttactgatggcagcaggcaggccggtgaaactcagaacaaagctcaggacggaagatgcgccgatgatgagcatgacaacggtggtcatgtttgcggtctgcaccagaatacggggcatatccttcaggtcgatggatttatagatgaacaccgacaggatgaaagcgtaggcaacagccacagcggaagcctccgtggggctgaacacaccggacaggatgccgccgatgatgatgacgatgagcagcaggctggggatggcgcgccagatggtctgcaaggtttcgctggcactcagcttcttggctttctcgcccttacggatgtagccgtatttctttgcgatgaaataaccaacgaccatgcaggcggcagtccacagcagaccgggaatccagccagccatgaacagggtagcgacggaagtgccgccgctggcagtggagtagacgataaatgcggtcgtgggaggaatcagctggccaaccggagcggtagccacgttcatggcagcggagaagccttcgtcatagccttcctctttttccatggggagcataacgccgccgatggcggtagccgctgcgataccagaaccagaaatagaaccgaacattgcgttgccagcggcgttggtcagagccagcgcaccgggaacccggcgcagaaccagcatggctaagtcaaccaatcggtgcgcgatgccgccgttgctcatcagcagaccggctaagatgaagaatggaacggcgatcaaggacagactgtcaatgcccgcgatgactttctgggcggaaacgaacataccgaattgcggggtcaggaaagcggtgatggtgataaatgcggatgcaacgatgctgtacgaaacaggtacgctgaacatcagcaacagcgcgaagctgaccaccagaaggatagcggcttgcagttccatttaagcgacctccttgtttttatcccggaagagatgatacagattgttcaggctgtaaaggatcatcagcgcaccgccgatgggaatgcaggcgtagtagcactccatgggcagcttcattgccgccgagatctggccgtgggcgttcatcgtgacggcgatgccgcctgcaacaaagaccgcagcactcagtgccagaacaacgaactctacaaagatctgggtgcggtgctgaccagcgggttcaaaacccttgaccagcaggtcaatggccagatgctgcttggcaccgtaggcatacggcgcacccagcatagtcagccagatcagtgcgaaacgcaggatctcttcggtgtatttgctgggattgcccagaacaaagcgggtaatgacctgccagcagcagacaacgaccatcgccgccaccatgaaggcaagaacggaactcaaaatcttattcaaaactttcatttgtctgtatcctccgcatagctctggatatcatcgtacagcttctggtaggactcgccttttgcaaggaagttctggtgaatgggctgcacagcttcgataaacggagtcttgtcgatgtcgcggtagacatggacaccgtagctttctgcctcgaccatggcatcgtccatcatctgattgtacttctgtacgaagttgtcattcagtttgctgaagcactccagcagataatcctgctgctccttggagagcttgttccagactttcgtgctgatgatgtagatatcgggggtgtactgatgctcggtgtaggtgtaggacttgacgatctcctcgtgcttatcaacggtcagagccagttcggtgttctcggcaccgtccacgatgccctgctgcaaagaggtgtaggtctcgcttgcggacatgggaacgggcgaaccgcccattgcttcgatcatatccatggaagtggaactaaccatagagcggatcttcttgcctttcagcacttcgggagaagtcactgcaatatcgtctttcagatagaagttgcgcgcaccgttgcaataatatccgatcgcgatatagccggcatcttccgtggcgttgaacagttcgcggatagcttcactgtttgccattgcattgtagtaatgttcctgccctttgaacagatacggcagcgagaagatggtgtagcggtcatcgaactgtcccagcgtaccggcactgatctttgccatgtccagaacgccggcctgtaccagttcgaccatggcagtttcggaacccagaacaccgctgggatagatggaaacctccatgttcatgctctcatcttcggccaccagatcggacagatatgcgatcgtgccgccgatctcggaatcgcccgcctgaccgtgtgccagccggagctggatcttgtcactgccaatgctgccgtttaccttgaaaaaggtggaaattccaattcccagcaacacgacgacaatgacggtcaacaagatttttgatgtctttttcattgtcattcctcctaaagtttttgcttttccggtgcaactttctggttataagtatagcgactcttggacagactttctcgcaaagaattgcgaatgaagtcaaaaattcaaacaatcttgcgcttgtgttgtatacaattttgttctttttaacatcgtcctgttaaatcatacaatatttttggctatttttctacatataaataattttttatattcgttggtgcttttgaaacgtgcaacattgtttgaacgcaagcaaaaagagccacccgtgttcttattacggatggctctagtcaatttggttttatcggacagtgtcgcttaatccagccggaatacctgttccagcttgggctgtgcgccggtcacggggtccatttccagttccagaatgtccttcatatactcgttccagcggtcaaccaccgggctttcggcctgcaccttttcggcgtaggccacgcccttttcgcactcatagtagccgaacagctcatcgttgcagtagaagatgctgtaattgcagataccggcgtctttcagcaccttgaccatctctggccaaatttctgcgtgacgcttctggtattcggccttgcagccgggcttgatgcggcccttccatgccatgtgttccatgttctgctccttagtcgaggaagttctcgttcagggtcacgccgaagtcacgggcgatggcgcgcaggtcgtcgtccgtgatggtctgacgaatcagaccgccgcccatgctcaggactttaacgtaaatttcggcactcttttcaatggtgtgagccagaccgaaggtgatgtcgaagtccgggccggaagcgaacaggccgtgctgtgcccagattgcagcctgataggtcttcatcagctcactggttgccatggcgatgtccgcaccaccgggcaccatccacgggcagacacccacgccctccgggaacaccaccggacactcggtggcactctgccacagggcacgggtgaagtcgcggtcggtcaggggcaggatataggtcagtgcaatgacattggtggcatggcagtgataaatgacacggttcgcaccgttggtcgctgccttgcggacgctgtggttcatgaagtggctggggaattcactggtgggctttgcgccatcttccagaccccagacaatgcgccagctgtcgcccttgtcgttgatctccacgataccgatgctgtggacggggtccaattccacattgcggaagaacttgccggaaccggtggtgatgaaatactcaccagccagattgtcggcctgcacacccatgttcacccactcgcggggctgtgcattgaagaaggggcggcactcggccacttcttcttccttcatgcggtaggtcaggttgccgccgttgcgctcgtgccagccctgaagccagccatcgttgcacatccgcataaagccttttacgatctcaacatccagaattcccatgataaatacctctcttttcttcttcaaactcaattatcgggtgatgatgtccacaggaacatcaaagatttttgccactttcagaatggtgtcaatgtgacggccagttgccgcagccatgtggtgggtggggccagcctcgctccaacggttgcagaactcccgtgcgccgcaggtgaagcgggtgcgcatattggtgtcgccaaaggtgaagatggggccgggttcgttgaccccctcagccaccacgaacttgaagtgaccgtccttgtcctgcgtgatgcccagataggtcacagggccaaggtgggggtagaactgggtcaggtagccgccaccggtcttaccgtggaacacaggcacgatcttcatggtaggcttcttctcggaaatatcggcatcgccggaaccggagtgaccgatgatgcagatatcctcgtcaaagtcgatg

SEQ ID NO: 1101 - DNA, 40863 bp, Unknown
  gut microbiota DNA sequence
acttgaacaaaaacgcttcagaagaaattctgaggcgtttttcttttgccggaaagctttgtcaaatctttttctccgggtttatacagggatgctggtatcaaaaaatatcagagtgccggcggcgtccagatttctccgccttcctccccatcatgttttttggcaaaaatcaccatatagtctgccgcttcaccttgtccatctgcggcctcctgcttcacaatttcaacgcagaactcaacattgttgccattgtattgataataacacagaaaatttgccaccaatgcattcgcagctcttttccacgcctgcggatcaacagcattctccggcatggaaaagacagccgttccgaatccgtcgtcaccgacagttacatctgtcgggcaaaaattggttacattctgaggctcaaagacatccgtgtatccagcctcaacttcctcaagatatgcctccagaatggcccgtgcttttacgctcagcgctttgttttcgaccagattataagaatcctcgctttgctcaactgccgctttcagtgcagtctttactgcattttttgtctgctctgaactgctgatgccgctgggccagcagcctgtcagtgcagtcgcagaaaacttgcaataaaaaagcagctctgccaaggcagagctgcaaagtttgcaatacgggtaaaatcagcgcttagagaactgaggtgcacgacgggcagccttcagaccatacttcttacgttccttcatacgaggatcgcgggtcaggaagccttccttcttcagagcagcacggttctcctcgttctgctgcagcagagcgcggctcaggccgtggcggatagcgccagcctgaccggaaacaccgccgccggaaacgcggacgacgacatcgtacttgccctccaggcccagaaggaccagcggagaacggacgatcagcttcagggtctccagaccaaagtaattgtcgatatcacgatcgttgatggtgatcttgccagtgccggtgtaaacacgaacgcgggcaacggaatccttacgacgaccagtgccgtagaaataaggtttggtttcgtacatgttcgattgcctccttcttagaactcgatcttctcgggcttctgagctgcgtgagcgtgctcggcaccctggtagcagtgcaggcgggtcagagccttagcaccgatggtgttggaagggatcatgcccttgacagcgtaggtcatggccagatcgctgtgctcagccatcagcttgctgtactggaccttcttcaggccgccgatgtacttgctgtgggtgatgtggaacttctgctcagccttcttgccggtcagaacagcctgatcgcagttgatgacaacaacgaaatcgccgcagtccacgttgggggtataatcgaccttctgcttgccgcgcagcagaacagcggcctcagcagcgacgtggcccaggctcttgccggcagcgtcgagcaggtaccacttgcgctcgacttcagcgggcttcacgagagtagtgctcatatctatttcctcctgataagctttttgtacgtttcaggcgcctttctggggcgcgagtgtcagtatacatcataaaaaggtgcctgtcaacagcattttttgattttttcattgtaattttttcaatctcgcaaaatctcacgttttctcttgaatcctcattattcctaaaaacgcattttctgcaaaattttctgcccacggccgcacattttctgccgctgcccgctacaattttgtctgccggtgtggtatactataaaggatatggcagcttttgctgcgcactgatacaaggagaattttttacatgccaaacgacatcgaccacaacgcctctgcccagcgccgcacctccaagcttctggccgctatgggcatctttgttgctctgggcatcattgcttacattattttaacgctgctggtcaaccgcagcgtgcccgcaaacccggacacccactacaccggcacaaacggcgtttccgtctactatgacagttccatctggaaggtatgccagatgaccgaggacagcacccttggtaccgtgctggaactcgccacggcagacagcgccgacggtgaggactacgaagctgtgctgctgcagcgcggcaccgccgacagctacgcggactttatcgatgcgtccgagaaggacctcaagcaggcctatggcgtcatcaagccccgcaaggtgaacctgaccgtggacggtgccgaggtggaggccgtgcgctgcgacattcaggcgtattatgcggtgctggccaccattacctaccccagcggtgacgtggtgtatgtttccggcctgacaaagcttgcctccatcaacgacattgtgaaccttgtggaaagtgtgaccctgtcatgagcagttcccgtgcgatgcagcgtctgtgcggcctgatgcgcaaggctgtgcaggactatgaaatgatcgcccccggcgacaaggtgatggtgggcgtttccggcggcaaggacagcgtggcccttaccatcggccttgccgagctgcgcaagtacatcggctttgattttacggtgcaggccgtcacgctggacccgcagttcggcggcaggcccatggattataccgtattgcaggagctgtttgcccggtacgatatcccctatgagatccgccgcaccgagatcggccctgtggtgttcgactaccgcaaggagaagaacccctgcgccctgtgcgccaagctgcggcgcggcgcgctgcacacggcagcgcaggaactgggctgcaacaaggtggcgctgggccaccatctggacgatgccgtggagaccttttacatgaatctctggcgggagggccgcatcggctgcttctcgccggtcacctacctttcgcgccgggacctcaccctcatccggcccatgctgctggccaccgagcaggaggtcatttccgcagtgcacgccgaggggctgcccatcgtcaagagcgtctgccctgccgacggcgtgaccgtgcgcgaacagaccaaggagttcgtcaaggagcgctgctgcaccgaccacgctttccgccagaaaaccctgcacgcactacaggagagcggcatcgatggctggcggcccgtccacaccgggcgcggcagctttgcaattacaaacgaggaagaatgaatcatgaagactcaaccttttgaaaaacacgtctgggccgagatcgacctcgatgccctgcggcataacttccgggccgtcaaagcccgggccggtgacctgccgctgtgcgcggtggtcaaggccgacagctacggccacggcgctgtgcagtgtgcccgcgtttttgcgcaggagggtgcagcatggctggcagtaagctgcctgaccgaggccgtgcagctgcgtcaggacgggcagactctgcccatccttattttgggccatgttcagccggagtacgcccagaccctcatccacgaggatatcaccgtagcgtgctactccaccgaacaggcgcagaacctttccgctgctgccgtaaaggcaggcggcagagtaaagatccacctcaaggcagataccggcatgggccgcatcggctttgccctgcgcaccgattttgatgccgccatccgcgaaatgctggctgtgtgtgagctgccgggccttgagatgaccggcctgttccagcacttctcggtggccgacgacaccgccgaagagaacgttgcctacaccgcggagcagcacgcactgttcgtcagagcgttccatgcgctcaaggcggcaggccgcgagccacagaccgtccactgtgacaactctgcgggcgtgatgctgcacccggactggcccgagggattggcccgggagcgctgcatggcgcggcccggcatcatcctctacggctacgaccccagcgacgaggtgcgctttgggcagttccggccggtgatgaccctcaagaccgtggtgagcatggtcaaggaaatgcagcccggccagagcgccagctatggccgccgcttcaccgccgataagcccacgctggtggccaccctgtgcaccggttatgcggacggttatccccgccagctgagctgcggcaagggcatcgtggagatccacggcaaggcctgcccggtgctgggccgcgtgtgcatggaccagatgatggtggatgtgaccggtatcccggacatccacgagggcgacgaagccatcctgtggggcggcagcgtcagtgatactgccgagaccatcgcccgcaagaccgacaccatttcctacgaggtgctgtgcggcgtgtcccgccgcgtgccccgcgtctacctcgagcacggaaagatcgtggatgtcgaggactggatactggaagcttaaatttctcccggaggaactacatggcaagagacaatatccgcaatttctgcatcattgcacacattgaccacggcaaatccaccctgtcggaccgtattctggagctgaccaagagtgtggacgagcgcaccatggaagaccagattttggacaacatggacattgagcgcgagcgcggcatcaccatcaaggcccgcgctgtcaccatgaactataccgccaaggacggcaagacctacgagttcaacctcatcgataccccgggccacgtggactttgcctacgaggtcagccgcagtctggccgcctgcgagggtgccatccttgtggtggatgccacccagggtgtggaagctcagacgctggccaacacctacatggcgctggagcatgatctggaactggtgcccatcctgaataagatcgacctgcccagtgcccacccggacgaggtggcacaggaggtggaggacgtgatcggcctgccctgtctggatgcgccccgcgtctctgccaagaccggcctgaatgtggatcaggtgctggagcgtgtcgtcaccgacattcctgctcccaccggcgacccggatgccccgctgaaggcgctgatcttcgacagcatctacgacagctacaagggcgttatcgtctatatccgtgtgtttgagggcaccgtgaagcccgacgataccatccgcatgatggccaccggcgcggagttcacgctggtagaagtgggccacatgggcgctaccaacctttctccctgtgcccagctgcaggctggtgaggtcggctatctgaccgccagcatcaagaccgtgcaggacacccgcgtgggcgataccgtcacgctggccaataatcccaccgccgaagcactgcccggctaccgtcaggtcaagcctatggtgttctgcggcatctaccccgccgacggtgccaagtaccccgacctgaaggatgcactggaaaagctgcagctgaacgacgcctccctcacctttgagctggagaccagcgccgcgctgggcttcggtttccgctgcggcttccttggcctgctgcacatggagatcatcaccgagcggttggaacgcgagttcgatctggatatcatcaccaccacgcccagcgtgcgctaccgccttaccctgaccgacggcactgtggagatgatcgacaatccttccagctaccccgacccctccaatatcgtcaagcaggaagagccttttgtggatgttcacctgtacacccccaacgactatgtgggcggcctgatggatctgtgccagaacaagcgcggcgtgctgatcgatatgaagtatctggacgatgtgcgcgttgatctgcactatgctctgccgctgggcgagatcgtgtacgacttctttgatgccatcaagagccgcagccggggctacgccagctacgattacgagtttaaggagtaccgcgagagcgaccttgtcaagctggacttcctgctcaatggcgaccctgtggacgcgctgtccatgatcgtgttccgcgataacgcctatgccaagggccgccgcatctgcgaaaagctgcgggataacatcccccgcaacctgttcgagatcccggtacaggctgccatcggcggcaagatcattgcccgtgaaacggtcaaggccatgcgcaaggacgtgcttgccaagtgctacggcggcgacatctcccgcaaaaagaaactgctggaaaagcagaaggaaggcaaaaagaagatgcgtcagctgggcagcgtttccctgcccagtgaagcctttaccgctgtgctcaagctggacagcgacgacgattaaactttatagatcaaagagaacccgcgctctggtatgctgcaatgcacccagcgcgcgggttctatctgtttttttacaacctcagtttacaacaaaaaatgagataggcaccccctttcggggaaacctatctcattttttttgttgggactattttgcaacagtccctttacgttggggcgttagggggccgcttacagtctcttgactgctcttttccgatttgcttctgcccggattatacatgatttcagtgcgaaacgttcttgaatctgcgtgaacgaatcatctgggcagcaaaaaaagccccggaaaggctgtctgggtgccttccggggctgctgtgaaagatgactgcatcagtaatacttttcagtcaaaaagtactactgatacactgcttcgagggctttctcactcacttttctgcttcaggcgggcgtattcggcatcggcctgaatggctgcagaggtgaagctgttgttgttccaccagctgatcagcgcggccacggtggtgatgccggcggtcaccagctgttccacagtctggctctcaatgggcagcataggtttgcccagagcgctcagcacctgattggtcagggcaagcagcagcacagcggtgcgggcgatggtggcggcagaaattttaccaaagttcatatcaattcctcactttctcattttgttcaaggtcagcgatgcggtggttggccaccttcatctgttcttctaaaatcggtacgcggcgggcaaaattgttatgctcacgcacctcgcgggtcagctcttcgagcttggtgtcggtcacggcctgactgcggctgttggcgatcagcacgccgatcagggtcacggccccggcaatgacagcggataagatcgtttccattccgttcaccgcctttacccgacccaccggctttttgctttgcgcacatccacatggacaaagccttttgcggggtagcggccgatgccgccggtgccgggcagcagggtctcggcgtaagcggcaagctgctccaccggcacgccggacacccggatatccgcggcacggccatactgatgctggctgtaaaccgctccgcccacagccttgttgtgtgcagcggtgcggtagccgctggtaatgaccaccggtgcgccaaaatggtcacggatggcctgcagtacctgcaccagttcgctgtccacaaacaaagggtcggtgccgtctttgcaggcaaattcctttgcgcggaagctgcggctcagcagcgtttcgccatcccttgcgcgggagtaaacgttaagcatggccatcctcctgcagcagcgctgccacggcatccctcagccgggcgggcacatcctccagcgttttgatgcccttgcggatcagggccgcatagatccttgccattacacaccacctccttcgtacagttcacacagggccagctgcaggtcggtcagctggcaggtcaggctggcaatcgtctcgggcagacgggctgcttcctcggcctgctggcgctctttttcccgcgcggccaattcttcttccgtatagcggatgtatctctgcaccggcacctgttcggtccatgcggcctgcgcaggcacgcccggcacatcgatgaccttccgcacatccctgccgccgccgggatactccgttacggtctcgtagtggctcacttcctccacgccttccacggcggggtgctccactggctcggtgtcgtccaccagatacccaagcgtcaagtcagggttttcaatggctgcaccgttctcgtcaatgatcttcatggttcaaaacctcctttctcaggccacgcgccgccagatgtgcacatagtaggcggcaggctgcacggtggcgctgcggccgtagatggcattagacttggatgcatccagactgaacttatatacatcagaaaaggaattgtattcgcccgtagatgcgatcacgttgccggcagtgaatgcgccggataccttatgttcacccttttttacatccgcgacaaaagagcctgtgatgttcggcagtccggcctttactgtggtgcccgctgcgtggctactgctggcacccatcagcacgcgctccgatgcgatctgctcccatgtgccgccaaacagggcggcagggctggtggggtcggtgctctggtagatgctgcccaccgggtaggcagcggagctgggtgcggccagcagagcatcgacatcttcctttgtataataggaagaaaaatcggcaccgaaggtgcgcagggcgtttgccttttcggcagcggtccattccccggcggctgcggcggtggtcagagccttcttcacgccataaggcagcagggctgcggtcagcggcagaagtgcatccgtcatgctgtccagctgttcgcgggcagctggtgcgatgatcagggttccgtcgctgcgcacgttgatgccgcaggcggggtccacccgcactgcgccgggggccgaagccgtgggcaccgtgctgctgcgcagatagggcgacagatccggcatggcggcagtatcggtcaacacggccccggtgttggggtccacgctcagcacccgaagcagctggccggagaccggaactgccgggcagggaagcgcccccacatcctgcgccgtcagttttacgatgccacttttgccgttcacgctcactacctgaccgtcggtaggcaccagctcctctgcccgtgcggcagcagcctcggcacgggctgcacagcgggatgcagcggcactgtcggcgctggtgcgctgtgccgcggtctgggcctgtgccgcattggatgccgtgcttgcagcactggctgcggcacgctgtgcggcggtggaagcggtactggcactttccagcacacgcgccacgaactgctcatactgcgagggcggcagctcttccgcgccgccgtcggtgggcaggatagcgtaggtgtcgtagctgccgggccgggtataggcggcgtagccgctggcatcgatggctgccagcatccactgtccgccggtgcttccggtcaggcggcggtccacggtgacgcagtgctgcgtgtccaatgagaccggtgccagcagggtgccgtcgctgcggcgcaggtagagcgcaacggtgcacccggcccatgcttccggcagcgtgaagcacagctcgtccacaccggcagcgttctgtgcaccgaggtgcaggcggtgcggctgggacagaaattcggtgccgccgcactgcctttgaatgatcttgatgttcacttgaaaaccttcctttctgttttttgtttgattgtacagccgctgcccggcagctgccagtgtggtcttttgctgcacaaatttctgtgcttcggcattttgccggaaggcgattttcatgagtaattcgcacagttctttgtgggtgaaaaatgggatgaaaaagaggtggcttcgtacggaaaaccagcgatttttggccgcttgccgcatgggaaaacgaacccaaaagtgcagtttccggtgcaaaaagtccaaaataaatgttaaaaattcgtgaacataacaccccagaaaacaggtcgaaaatcggaaggaaataaccgaaaaaacaatattttggagaaaacaatgttaaagttgcacaaaaaataacgtcaaaaaactaacaaagtatgagaaggtgatttgacaaatggccattgggctggtaaaataagactcgctcaacggaaccaacagacgttgcagcgtttaaaatttatctggatgaagtaaaaagccgtcttatatacggcgcggcgcgggcagatggggtccgggccgggagggcaactgcaccctccgcagcggagtccaaattgtatacgatgctcgattttaccaaaaagagggcatcgtatttgattgtggggccagatggcttctgcccgccccgcagtccgggcggccggggcatgaaaaacatgtccgcagccgcagccaattttgaaaagagaggagttgtctcgtatcgcttccgtaaaattgaagaaagcattgtctgactgcaagcatgcagtctctccccgtgtgctggcgttttgtgtcatggtcgtgtgccttgtggctacactcagtgtgaccgctgcgaatctgcggctgacctacgtcacagactccaatggtgcccggcaggtgatcctcacctccgagaccgaccctgcacaggttatgaacctttccggcatccagtccgaagagggcgatcaggtctattacacggcctacagcggcaatcttgccgccctgaacattgagcgcgcattctccgtcagcatcactgccgacggtcaggagtaccccgtcaaaatggtgttcggcaccgtggcggatgccctgaagcgtgccggtatcaccctggagggtgacgactacaccgagcctgctctggaccagctggtgagcgcaggttccaccatcacggtgcaccgcgtggactacaccgaccgtgtggagacgcaggccatcccctacgataccgagtacgtctacaccagcctgtatttccgcaacaccggccgcgccaccacggtgcgccatggtgcggaaggccagcagaccatcaccacccgcgaccgctatgtggacggcgagctggaaaacagcatcgtggtggattccaccaccactgtggagccgaccaaccacatcgtaaagacctatggcgcaggcgcgccggtctccccgctgaccggcccggacggcaccaccaatgcacccgcctcttacagcaaggtgctcaccggaaaggccaccggctactattccaagaccggcaagggttcttccggtctgggtctgggctacggcactgtggctgtggacccggatgtgatcccctacggcaccaagctgtatatcacctccaccgacggcaagttcgtgtacggctatgcggtggctaccgataccggcattgccgtgcagaagggccagatccttgtggacctgttctacgagacctacgccgagagcgtgatcaatggagccattcaggtgaacgtctacgtggtggactgagcaggccgaaaagaaccggggaaaccggaactgaaaattttcaacagaaacagagagcttctgtacaccttccctttgggagggtgcgcagaggctcttttttattgtcagattggcaggattcaccataaaatttgtaaaaatttagcgggtatgtatataagagaaaaatatcaatgaaaagattatggtaaattttacagtaaaatgcggcgaaactcttgaaaaacagaccgaaattctttaatataaaagggtaaaaagctacaggtgcgctttgtgcatctgtacggggaggagcagtctatgaaaccgaccgaggagaagatccagagcaatgcatcggacctgccggtgtatttgttcaaacagggcaataactgtgaagcataccgctactttggcgcacacatggaaacgcgtgccggtgaagcaggtgtggtgttccgcgtgtgggcaccccatgctgtagccatcagcgtggtgggcgactttaacagctggaagccgggcagccacccgatgcgcaaggtggatggcgattccgtatgggaattgttcatcccgggcatgaaggaatatgatgtttataaatactgcgtgaccacccgcgcaggtgatctggtctataaggccgatccctatgcgttccacgccgagacccgcccgtccaacggcagcaaggtctacgatatcagtggttttgcgtggcacgatgatgcatggcaggcagcacagaaaaaggctgatgtgatcaacagcccgatgaatatttacgagatgcacgccggcagctggaagatgaaggagggcggcaagccctacaattattccgagctggcagacgagctgatcccgtatatcacagagatgggctatacccatgtggaactgctgccggtcatggaatatccgtttgacggcagctggggctatcaggtcaccggctattttgcacccaccagccgctacggcacccccaaggacctgatggcctttgtggataagctccatgccgccggcattggtgtgatcatggactgggtgcctgctcacttcccgaaggatcagttcggcctgtacaactttgatggcgaagcctgctacgaggacccgaatccgaagcgcggcgaacataaggagtggggcaccatggtgttcgacttcggccgcagcgaggtgcagagcttcctgatctccagcgcgctgtattggctggagcagtaccatatcgacggtctgcgcgtggatgcggtggcatccatgctgtatctggactataaccgcaagcagggcgagtgggaaccgaacaaggacggcggcaaggaaaatctggaggctgttgctttcctgcgcaagctgaacgataccgtgctgggccgtcacccccacaagtacatgatcgcggaagaatccactgcatggcccatggtcacaaagcctgcttcggacggcggccttggtttcaacttcaagtggaacatgggctggatgaacgatatgctcagctacatgaagactgacccgctcttccgttccggcaaccacaacaaggtcaccttcagcttcttctacgccttcagcgagaactttgtgctgcccatcagccacgatgaggtggtgcacggcaagggcagcctgatcaacaagatgcccggcgagtacgacgccaagtttgcaaacctgcgcaccttctttggctacatgatggcccacccgggcaagaagctgctgttcatgggtcaggagttcggccagttcgccgagtggaacgagacaaagccgctggactggatgctgctgggctacgataagcacaccgagctgcagacctacgtcaagaccctgaacgctttctacaaggagcatcccgccttctggcaggtggattacagctgggagggcttccagtggatcgtgccggatgactcgcagcagagcgtcatcgccttcctgcgcaaggacacttccggcaagcagatccttgtggtgtgcaacttcaaccccgtcctgcgcgagggctacactctgggcgcaccggtggcaggctcctacaaggagatcctgaacagcgacgatgcagagttcggcggttccggcgcagtccacaacaaggccgtgcgcacccacaaaaagccgatgcacgggtttgagcagagcatcaccatcaccctgccgcccatgagcaccctgtattttgaagtgcccgccaagcgcacccgcaaggccgcagcggacaagaccgataaggcgggaaaaaagaccgcagccaaaaaggcaaagaccgctgcggagaaagctgcagcaaaggtggtaaagaagccgggccgcaagcccaaggcagaagctgccgctgcagaggaaaagccggtgaaaaagaccgcccgcaaggcaaaggctgaaccggaaaaggccgaggaagcacccaaaaagcgcggccgcaagcccaaggcagaggcagaacccaaggcggaaaaagcacccgcaaaacgcacccgcaaaccgaaggagcccaaggaatgacccggcacttcggccgacccataccgcacacgttgacgatcatttccgaacaacggaaatgttaatgttaaaggggagaataaagctatggcaaaagaaattgtggcaatgatccttgccggtggacgtggctcgcgcttgtacgcgctgacacagaaaacggcaaaacccgcagtgtccttcggcggtaagtaccgcatcgtggacttcccgctgtccaactgcgtgaactccaacatcgacaccgttggcatcgcgacccagtatcagccccagaagctgaacgagtacatcggcaacggccagccctgggatctggatcgtctgcacggcggcgtgcacaccctgccgccctacgagcaggcaaagggcaccgactggtacaagggcactgcaaacgccatctaccagaacatcggcttcatcgacagctacgatcccgagtatgtgatcatcctgtccggcgaccagatctgcaagcaggactatgccgacttcctgcgcttccacaaggaaaagggcgcagagttctctgtggctgttatggaagtggactggaaggaagcctcccgcttcggcctgatggtggctgacgagaacgaccgcatcactgagttccaggagaagcccccggtacccaagtccaatctggcttccatgggcatctacatcttcaactgggatgtgctgaagaagtatctggaagaggacgaagcagaccccaactccaagaacgactttggcatgaacatcatccccgccctgctgcgcgacggccgcaagatgtacgcctaccgctttgccggctactggcgtgacgtgggcacgatcgacagcctgtgggaagccaacatggaagtgctggatcccgaaaactccggcatcgatatcttcgacgagaagtggaagatctacagccgcaacccggtcctgcctccgcagaagatcggcccccgtgctgtggtgcaggattctctcgtcacggaaggctgcaagatctacggcaatgtgcatcactctgtgctgagcgcaggcgttgttgtggaagagggcgctaccgttgaggacgcagtcctgatggacggcgttgtggtcaaggctggtgctgttgtcaagcgctgcatcctggcggaggatgttgtggtcggtgcaggtgcacgagtgggcggcgatggccccattgcccatgtgggcaccggcctgaccgtcggcgcaggcgcaaccgtcaaggaaggtgccaaagtctttgaatccgtcaaggagggtatggaagtatgctgagccagaacaccaatgcgttgggtattattttccccaacagttatgataataccgtccccgagctggtgaccgagcgcgcaatggcttcgatccccttcgcgggccgctaccgtatggtggactttgttctgtccagcatggcaaactgcggtatctccaatgtttccatcgtggtgcgcaagaactaccactccctgatggatcatctgggcaccggccgtgagtgggatatggcccgccgtcacggcggcctgaacatcgtgccgcctttcgctgagaagggcgtgcgcatctattccggccgtgtggaagctctgggctccatcatgaacttcctggagaaccagaaggaaaagtacgtggtcatgagcgatgccaacgttgccctgaactacgacttcaacgctctgctggctgctcatcaggcaagcggtgccgatgtgaccgtcgcttaccagaagaccgagatccccgagggccgcaagaatgacaactacaccctgaccgttgatgccgacggccgtgtgaccgagctgctgttcaacgattaccgccccggcgtgcagaaccttgacctgaacatctatgttctggagcgcgagaccctgctcaagctggtccgggatgcgacctcccgcggcctgatctacttcgagcgcgatattctggcccacaatgtcaacatcctgaacatccacgctctggagtacaccggctatgtggcacatgtctgtgacatgaagagctacttcgacgagaacctcaagctgaccgatgacgagaatctggaaaagctgttccccaagaagagcccggtctacaccaagatccgcgacgacaaccccacccgctatgtgccgggctgcaaggtgaccgactccattctggccgacggctgcgtgatcgagggcacagtggagaactgcgtgctgttccgcggcgtcaaggtcaagaagggtgccgtcgtcaagaactgcgtgctgatgcaggatacggtggtggaagccaatgccgagctggactgcgttgttaccgataagaacgtgaagatcactgccggcaagaagctgtccggcaccgagagcttcccggtgtacgtgcagaagaagcacaccgtctgattttactgagttatccataggggcggcttcctccccggtagcccctcttgagaggggcgggggcatctgtgtgcccccgcctgctcttttgtaaaaatggttcgtgctgcctgcaagggcggtgggggagaacgaaaatatcccactatatggaaggagcgatcctatgagaatcctgtatgctgcttcggaagctgccccttttgcaaagtccggcggtctggccgacgttgcgggtgccctgcctaaggctctggtcaaggacggcgtggatgcccgcgtcatcatgcccctgtacggcgacctgaagttccgtgatacgctggagtacgtgaccaattattccgtccccgtgggctggcgcagccagtactgcggcctgttcaagaccgagcggaacggcgtgacctactacttcctggacaacgagtattacttcaagcgccgcggcctgtacggcttctatgatgacggcgagcgtttcgccttcttctcccgcgccgttttagagaccctgttctacatcgatttcacccccgatatcatcaactgcaacgactggcagaccgctctggtgccggtgtacctgaacctgtactatcgccatctggataagttcaaccgcatcaagaccatcttcaccatccataatattgcttatcagggcaagtatggcaccgacattctggaggacacctgcggcatcggccgccgcgaccagcacatcgtagagtacgacggctgcgcaaacttcatgaaaggtgctttcgagactgccgataagatcaccactgtcagccccacctatgccatggagatcctcgacccgtggttcagctatggtctggacgctctgctgcgcgagaagcagtacaagctgtgcggcatcctgaacggcatcgataccgattccaacgatcccgctacggataagaacatccccttcaactacgacatcaccaactttgaagagggcaaggcaaagtgcaaggaagccctgcaggataagttcggcctgaacaaggacggcagccccgtctttgccatggtcagccgcatggtcggcatgaagggctttgacctggtgcagagcatcgccgatggcctggtggatcgcggcatcgagctggtcattctgggcagcggcgagagccagtatgagaacttcttctccgacctgtgcgcacgccacccgggccgcgttggcacttacatcggctttgagccggccctgtcgcaggagatctacgcaggcgcagatgccttcatcatgccttccaagagcgagccctgcggtctggcacagatggtggcctgccgctacggcacgcctcccatcgtccgcgagaccggcggtctgcgcgactccatccacgacagcaccatgggtgagggcaacggcttcacctttgcgggctacaatgcccacgagctgtatgtggcctgctgcaacgcacagaatgcttactatgacaaggaaaactggaagaacctcgtgcatcactgcatggagtgcgatttcagctgggatgtctccgccaagagctatgagggcctgtacaacgagaccgcaaacctctggtaatgtcctgaaaactgcataacagctgccgcccggttcccaaagagccgggcggcttttttgcattctgcacaacagatccatcaaacttttggtattgatgcgcccgcagacgcacaaactccatacagggcgtacagttacggcattagtgtaaacaaactatgaaattttactagaaaacagtggaaaattgattgaaaaaacgatcggtttgaattatactatcgttataagattttttgctgattgcaaatccttggcaaagaatccagaatctggcttttgcaaaggcacatcacacagggaggaaacgcaggttgaagggctggtataaggcactggaggatcttgtctggctgacccagctgggcctgaatatgctgctgccgctggtcatgtgtctgggcggtgcatggtgggcggtgaacaactggagctggccggaatgggtgttcctgccggccatcctgctggggcttgctgccggggcacagaacttctggtattttgcaaaggaacacatggaccgcaccaaaaaggaaaaaccaaagcgggtggggttcaactcgcatcagtaaacttaacaggaggtttccctttatgaaactgcagccggaatccaaaaaggagctgacccgcatcgcctgcggcacggccatctgtaccgccgtcatgtgggtgatctttgcagctctgcacctggttggctgggtgaaatttgattacactgttgttctgggcagtctcatcggcgcggccgtggccatcggcaactttgcgggcatctgcctcgtgtgccagaaggtcatcgacgagcaggatgagaaacggcgcaaagcgacattgcaggcttcctacaatgtccggatgcttttgcaggcggtgtggatcatcgttgccatcggggcaccggtgttccagccgtttgccggtgttctgcccctgcttttcccgcgcgttacgatctactacctgcaaataaccggcaagtacaagcctcttgcaccggccgggccttcggtggacgtctctgtggaggacgaccccgaacccgcaccggagccggaagctgaaccccgtgacgaagggggtgaaacgtaacaaatggaactgaacggcgcaaagatcctgtataccatccatacggacatccccctgctgggtgatttcaagatctcccagaccttagtcagcacctggatcgtcatggcgctgctttcgggtcttgccatctggctgggcagcaacctcaagctggaaaatgtctcaaagcggcaggccgccgccgagttcatcgtagaacggctggaccagttcgtgcacgacaacatgggctatcactttgataagtatatcccgctcatcggcgcgatcttcgctctgagcatcggctgcaacctcatcagtgtcatcggcctgtggagccccacagccgacctgaacaccgaggcggcgtgggccattgtggtgttcgtgctgatcatgtactacaagatcaagaccaacggcatcctttcctacctgaaaggtcttttggaccccatcttcatcatggcacccatcaatgtgctgtcggaggtttccacccccgtcagtatggcgttccgtcactttggcaacatcttgtccggtacggtcatttccacactgctgtactgggcgctggcaagcctgagccacgtcattttcggctggctgccgggtgccttgagtcagatccagctgttccagatcggcatcccggcctttacgggcctgtatttcgactggttcggcggctgcattcaggcgttcatcttctgcaccctgaccgcaattttcatcaaacgtgctgccggtgaggactaagccctcacaacggcatctcccaaaacaaaaaacttttttggaggacaaatcttatgactgactttcagtacctcgctcgtggtatcgctctggcaggctgcggcatcggcgcaggctgcgcactgatcgcaggtatcggccccggtatcggcgaaggcaacgcagcagctgctgcctgtgaagctgtgggccgtcagcccgagtgcaagagcgacgttaccagcaccctgatcctgggcgttgcactttccgagaccaccggtatttacggcttcgtcaccggcctgctgctgatcttcctggcacccggtatgttcatgaagttcctggcataagcggaaccttttacaaaataacgaaaggagacgcttatggaactgtaccaggcgttgatcacgctggacggctggacctttctggcccagatctgcaacctgatgatccagctgttcatcttcaaaaagttcctgctgaatccggtcaaaaacgtgatcgcagagcgcaaggcgaaggcagacagccagatcgccgatgccaccaagctgcgcaccgaagccgaagccatgaaggcagagtacgagcagaacctgcagaatgcccgcaccgaggccaacgagatcgtagccaatgcgcagaagacggccaccgcccgcggcgaagagatcgtgggcgaggcccgcgcgcaggctgctgccctcaagcagaaggccgaagccgacattgcgcaggagcgcaagaaggccgtgaacgaggtcaaggacgagatcggcggcatcgccatggagatcgcctccaaggtggtggagcgtgagatcagcgagaaggaccacaaggatctgatcgacgaatttatcaaaaatgtgggtgaagcatcatgaccgagactgcaaggatgtacggcggaagcctgtacgatctggcggcggaggaagggctggaggcccgcattctgggtgagctggacgaagccgtggcgctttttaaggcaaacccggactacctgcatctgctcagcacccccagcatcccgaaaagagagcgctgcggcctgctggatgaagcactgcgggatcaggtccacctctatgtgctgaactttttgaagatcctgtgcgagaagggcaccctgcgggagctgtccggctgcgcacgggcttaccgtgtgcgctacaatcaggcacacggcattctggaagcaacggcgaccactgcagtggcaatgacggagcagcaggcaaagaacctgcacgaaaagctggaaaaactcaccggcaagaccatcgacctgaaaacaaaggtcgatccggcagtgctgggcggcatccggctggatatcgaaggcaccgagctggacggcacggtgcagaaccgtctgtccgccctgcgcagggacattgcttccgtgacactgtgatcgaatttccacccgaaagatttttaagaattgagtggtgaacaaacaaagatgcaactgaaacctgaagagatctccaagatcatccgtgcgcagatcaagcattacgaaaatgccattgagcagagcgagaccggcacggtcattatggtgggcgacggcatcgcccgcgccagtggtctggaaaagtgcatggcaggtgagctgcttcagtttgataacggcgaatacggcatggcccagaatctggaggagaacaccgtctccatcgttctgctgggctccgacgtcggcatcaaggaaggcagcactgtcaagcgcaccggcaaggtggtgtccgtgccggtgggcgaagccatgatcggccgcgtggtcaacgcgctgggccagcccatcgacggcgcaggccccatcgagaccaccgagttccgcgccattgaaagccgcgctcccggcatcatcgaccgtcagccggtcaaggagccgctgcagaccggcatcaaggccatcgactccatgatccccattggccgcggccagcgcgagctgatcatcggcgaccgccagaccggcaagaccaccatcgcctccgataccatcatcaaccagaagggcaaggacgtcatctgcatttacgttgccatcggtcagaagcgctctaccgtggcaaaccttgtgcagagcctgaccgaggccggtgctatgggctacaccatcgtggtgtccgcaacggcatccgagctttcgcccctgcagtatatcgcaccctactccggctgtgccatgggcgaatatttcatgcatcagggcaagcacgtcctcatcatctacgacgatctgtccaagcacgccgtggcctaccgtgcactgtcgctgctgatccgccgtcccccgggacgtgaggcttaccccggcgacgtgttctatctgcactcccgtctgctggaacgcgcggccaagctctccaatgagctgggcggcggcagcctgacggctctgcccattatcgagacgcaggcgggcgatgtttccgcctacatccccacgaatgtcatttccatcaccgatggtcagatcttcctggagacggagctgttccactccggtgtcatgccggcagtcaaccccggcatctcggtgtcccgcgtgggcggcaatgcccagatcaaggccatgaagaaggtcgccggtaccctgaagctgatctactcccagtaccgcgagctgcagagctttgcacagttcggttccgatctggatgccgacaccaaggcccgccttgcacagggcgagcgcattgtggaagtgctcaagcagaaccgctccgctcccgtgcctgtagaaaagcaggtggccatcctgtatgcgaccattcacgatcaccttgtgaaggtcaaggtgccggacgtggccgagtatgaaaagggactgtacgaatatctggacaacaatgctgcgggtgccgccgtcatggagaccatccgtaccaccggcaatctggataaggacactgaggagcagcttaagagcgtgctcacagcctataccgacagcttcgtcaaggcgcactaaggaaggaggcgtaacgcatggctggttccatgaaggacatcaagctgcgcatcaaaagcgtagagagcaccatgcagatcaccaaggcaatggaactggtggcttcctccaaaatgcgccgcgccaaggaacgggtggagcacagccgcccctactttgaaacgctgcatgagactttgaccaagatcgccgcggccgacccccgcgcccgcaacccctacctgcgccgtgacgaagtgaagcgcaccctgctcatcgtgatcgcaggcgaccgcggccttgccggtggatacaattccaacgtgctcaagcaggccggggccgaagaaggcgaagtgctggtgctgcccatcggcaagcgctcggcagagtatttcgtccaccacgaggtgcccctgttcacgcaggaggtgctgctggcggcagatgtctcggtgggcgagtgcttccagctgtcccgccagatcacggaaggatatctcaagggcgagtacgatgcggtaaagatctgctacacccggttcgattccatgatgacccagaccgcagccaccatggaggtgctgccgctgtccatcgaacccaccgagcagcagaaggcggatgcccgccgcagccagatcctgtacaagcccagcagcgaggaagtattcagcgcgatcatcccggagtatgtggcaggcatcgtctacggtgccgtgtgcgagagcgtggcaagtgagcttgccgcccgccgcactgccatggatgccgccaccaagaacgccggtgagatgatcgaccatttgaacctgtattataaccgtgcccgtcaggctgccatcacgcaggagatcaccgagatcgtggccggcgcggagatttaaaacctatcaaaaaggagttgtagcctatgtccgaaaaacatatcggcaaggtgctccaggtcatcggcccggtgctggacatccagtttgaggatggccagctgccggagctgctcaacgccatcgagatcgacaaccacggcgaaaagctggtggtcgaggtggcacagcacaccggcgataacgtggtgcgctgcattgcaatgaacagcaccgatggtctggtgcgcggcaccgaagccgtggataccggcgaacccatcaaagtgcccgtgggcgaccagtgtctgggccgcgtgttcaacctgctgggtgagcccgtggacaacaagcccgccccggccccggaggcctactggcccatccaccgccctgctcccagctacgaggagcagcagtccaccaccgagatcctcgagaccggcatcaaggtcgtggacctgatctgcccctacgcaaagggcggcaagatcggtctgttcggcggtgcaggcgtcggcaagacggtcctgatccaggagctgatctataacatcgccaccgagcacaacggctactcggtgttcaccggcgttggcgagcgcacccgtgagggcaacgacctgtacggcgaaatgaccgagagcggcgttatcaacaagactgcgctggtctatggccagatgaacgaacccccgggagcccgtatgcgcgtggcactgtccggcctgaccatggcggagtatttccgcgatgtgaagaatcaggatgtgctgctcttcatcgataacatcttccgcttcacccaggcaggctctgaggtgtccgcactgctgggccgtatgccctctgccgtcggctaccagcccacgctggccaccgagatgggtgctctgcaggagcgcatcacctccacccgcaagggttccatcacctcggtacaggccgtctacgtgcccgccgatgacctgaccgacccggcccctgccaccacctttacccatctggatgccaccacggtcctgagccgtgacattgcttcgcagggcatctatcccgctgtggacccgctggattccaccagccgcatcctcagcccggaggtcgtgggtcaggagcactacgagatcgcccgcgccgtccagaaggtgctgcagcgctacaaggagctgcaggacatcattgccatcatgggtatggacgagctgagcgaggaagacaagcgcacggtcagccgcgcccgcaaggtgcagcgcttcctgagccagagcttccacgtggcagagcagttcaccggtatgcccggccagtatgtgccgctcaaggagactctgcgcggcttcaagatgatcctgaacggcgagtgcgacgagctgcccgagagcgcattcctgttcgcgggcaccatcgatgacgtgttcgcaaaagcgaagaaagggtaaaccatgacgacctttcatctgacggtggtcacgccggacggctgcgcctttgacgggcaggccgagcgcatcgtctgccgcgccattgacggcgatctggccatccttgccaaacacggggattactgcaccgcgctgggcatgggcgaagcccatatcgtggatgccgagggccagcgccgccgcgccgcctgcatgggcgggctgctgagcgtgctggatggcgaagtgcgtctggtcgccaccacatgggagtgggccgaggagatcgatcaggcccgcgccgaggcttccaagaagcgcgcggaggagatccttgcgcagaagaacctcgacaagcgggactacgagctggctcaggcgcgtctcaagcgcgcactggtgcgtacctctatccactgagataagaaaaaaggagccattgcacaacctgtgcagtggctccttttgcgtgcatgatgaaattaaaaataagatttccgctgaacatgcccagagcgaatgcggagggcatttaaatcgtaaagacgttacatcatatttgccttctcgatcaggttacggatgtgatgggccagcatctccaccgcagcggtgttctcgccgccgttgggcacaatgatgtctgcgttgcgcttgctgggctccacaaaggcctcgtgcatgggcttgacggtggtcaggtactgattgatgacgctgtccagactgcggccccgctccttcacatcccgcaccagacggcgcaggatgcgctcgtcggcgtcggtgtccacatagatcttgtagtcgaacagggcgcacagctccggctccacaaagggcaggatgccttccacgatcagcaccggtgcgggttcgatgtgctgtaccttgtcgctgcggttgaggttggagtagtcgtacaccgggcagtcgatggcgcggcctgccttcagctcctgcagatggtagatcagcaaagcgttgtcaaaagcatccgggtggtcgtagttcagcttgcagcgctcctcaaagggcagctcgtcgtggcgcttgtaatagctgtcgtgggagatcaggcgcacttcatcctcgccaaaacgctccttcagccgcagagcaagggtggtcttgccgctgccggagccgcctgcaatgccaatgatcagattattcataggggtccctcctgcatcatcctgccgctttgggtggaaaaaagggcaggaatggattataataggtgcaaagctgcctgtccgggacacagcgccgggcgggcttgttcctgtacatcataacacaaaccggcacatttttacagccccagggctgcaaatgtgtgagataagggaaaatgccatgcagaaaaaacaatttcagcaaaatatgaaggacaaggtccgggtgtttgaggatggcggcatccgcctgctcaaacggggacagaagggcgtggtacacgctattttcagccgttttggcctagtgctggttctgctgcttttacaggcgttcgcgctgttcagcctgctgcagtggttcggcgagctgctgccgcattattttggcggcaccctgctggtaacagcggcaatgatggtctatctgctcaatcaggacatggacaacagcgtgcgcatcacatggctggtggtcacagcgctgatgccggtgctgggcgtgccactgttctggtacaccaaaagtgatgtgggccacaatgccctgaagcgccgcctgctggatctggagggccagactcgcgcccagctgccgcagaatgagcagaccgtggagcttttgcaggagcaggcacccgaagcgatgccgctggcacggtatctgcggggcaagggaggcggatttccggtctatgccgacacggtagccacctacttcaacggcggcgaagctatgttcgatgaaatgctgcgccagctggaaacggcaaaaaaatacatctttctggaatatttcatcgtggatgaaggcctgatgtggggccgcattctggaagtgctggcccgcaaggcggcgcagggggtggatgtgcgggtgatgtatgatggcacctgcgagttctccaccctgccgcgggattaccccagccggctggaagcgctgggcatccagtgcaaggtgttctcgccggtcacgcccttcgtttccacccactacaactaccgcgaccaccgcaaaattctggtcattgatggccaggtgggctttaccggcggcgtgaatctggcagatgagtacatcaaccacatagaaaagtatggccgctggaaggactcggccctgatgctggaaggcgaaggcgtgcgctccatgacggcgctgtttttgcagatgtggtgcatcctgtgccagccggagtttgagcagttcctgtccgatcccatcccggcggcagcaaacgccaagggctttgtggtgccctacggagactgcccgctggacggtgagcgggtgggcgaaatggtgtacatggatatgctcaaccgcgcccggaagtatgtgcacatcatctcgccgtatctgattttagacggcgagctggaaacggccctgcgctttgcggcagagcgcggtgtggatgtgcacctgatcctgcccggcaagccggataagtggttcgtttatgcactggccaagacccactacaaggcgctgctttcttcgggtgtgaagatcagcgagtggcagcccggctttacccatgcgaagatcgtgatcgccgacggcgtggaagctgtggcgggcaccatcaatctggactaccgcagcctgtaccatcactttgaaaacgcggtctggatgcgcggcaccgactgcattgccaacatggaagcggattttcaggatacactcacccggtgccgcagggtggagcagacgagagaaagtatctggcagggcaaaaagctgctgcatctggcgggcatcctgctcaagtttattgcgccgctggtgtgaaagactccttccgtcatggctgcgtaatcagactggagaagctctgaatacaaaaaaggcccgctgcctttcgacagcgggccttttgttaccgatttaaataaaaatcagcgcttagttctgcttcatgcgagcgaagcagtcagagcagtagaccggacggtcctcacggggctggaaggggaccttgcaagccttgccgcaagctgcgcagacagcatcgaacatctgacgctcaccgctgttgctgcgtgcgccgccgttcttgcgggcgtcacggcagggcttgcagcgctggggctgattctcgaagccgcgagatgcgtagaactcctgctcaccagcagtccaaacaaattccttaccgcagtccttgcagaccagagtcttgtcttcaaacatagtagtatctcctctttagttagttcttgcccacggaaggattgtaaccatacctttggttttgggaccatcgcgctgatcagtaagcttaccaggggcttgaatgaatggacgtcctccaattgaggacttttctattgtaccgttctttttgaaatttgtcaaccaaaaaacaaccattcgccttgttatttgtatagatagcacaatccgacagggctgatttgggtaaaataactgccggaagatgaaaaaggggctgccgcacattccgtgcagcagccccctgcaaagccctttggaaaacggttacttctcaatgacttccttggtgtcgcgggcgatcatcagctcctcgtcggtagcaatgaccagagtgcgcacctttgcgccccaggcagtgatctcgcacacatcgcccacggggtgcttgttcttctcggtatcgatgcggatgcccagccaatccatgtggtggcagacttttgcacgggcgatcgcgtcgtgctcgccgatgccgccggtgaagacgatggcatccacgccgcccattgcagcgatgtaagcgccaacggtcttcttgatctggtagttcagcatgtcggaagccagctgtgcgcgcttgttgccggcagcagctgcctcttccacgtcacgcttgtcgctggaaacaccggagatgcccagcaggccggacttcttgttcaggatctcgtccagctcgtggccggtgatgttcagggtgtacttcaggtagttgaccacagaggggtccaggtcgccgcagcgggtgcccatcatcaggccggccagcggggtcatacccatggaggtgtccacgaccttgccctgatccacagcggcaatggaggaaccgttgcccagatggcaggtgatcagcttcaggcgctcaatgggctcttccagatactcggcagccttgtgagcaacgtacttgtggctggtgccgtggaagccgtagcggcgcacgccgtacttctcatagtactcatacggaatggcgtacatataagccttcggaggcatggtgctgtggaaagcggtatcgaacacagccaccatggggatgttgccgaacaccttgcgtgcggcctcgatgcccagaatgccggcggggttgtgcaggggagccagagggctcagctcgcggatggtctcgatgacctcgtcggtgatcaggcagctctccttgaacttctcgccgccgtgcacgacacggtgaccgatggcatcgatctcgctgacatcgttgatgcacttgccttcgccggtggtcatcttcttcacgacctcggcaaatgcctcggtgtgggtgggaaagatggcgggcgtggtggccttatggccgttggcctcgtgggtgatcatgctgctttccatgccaatgcgctcgcacaggcccttgcacagcaccttctcgccgtccatatcgatcagctgatacttcagggaagaagagccgcagttaataaccagaactttcatctgtgttgcctcctgtatgtttttggtctgtcctctttttaaacctgaggacagaattttacagattcctgtgtttattatataatagggtgggcggcttttcaagccgcaacccgggcaaagcggtaaagcttgtgtacaaggtttttgtacatcctgcccacaaatgcgcaaaaccactgcagttttctgtatatacgatataaatttaacaatctttccgagggcgcagcagccctgcagaggagcttatctatgaaatttgccggtatcattgcagagtacgacccctttcacaacggccatgcatggcagctggcgcaggcaaaagcgctgggagcacagcatgtggcggtggccatgagctgcgggctgacccagcgcgggagcctgccgctgctgccggaagcggtgcgggtgcaggccgccctgcagtgcggggcagatctgatatttgcgctgcctgcgccctgtgcctgtgcgggggcagaggcttttgcccgggcggggatgcgcatccttgccgccgccgggtgtgatgcgctggtgttcggggcagaaacaccggacgcagccctgctgatggaagctgcccgggtactgaacagcgaggcctaccgcaccgagctgaagcgccggcttgcagccggtgcccgcagctttgcggcggcgcggcaggcggcggtggaaacgctctgcccgggcacggcactggccgcgctgttggataagcccaacaacaatctggcagtggaatactgcaaggccattctggaacaggaggcacccatgaccccggtgccgctgccccgcgtgggggcgggccacgggcaggcccttgccgaaagcggccacgcccagtttgccagtgccagcgcgctgcgcgccctctgggcagagcagggcgcggatgcgctgactccttatgtgccggaaaaagcactggagctgtataaaaaagcggaaatcgacggaatgtataccgactatgccgccgcaggccggtgtgagctggctctgctgcgggcggcctgtgcacgaccggaaccttttgccgcagtgcggggcgtttccgaggggttggaccaccggctggaaaacgccgtgcgcagctgcaccggcctgccccagctgctggacgcgctgaccactgtgcgttacccccgggcccggatgcgccgccttgccatggatgcggcactgggctatgcggcggagaccgtgcctgccctgccgccctatctgcatttgctgggggcaaggcgggaagcacttccgctgctgaagcatacatccctgccgctgagccactcactggcaaagctggaaaaagaaaacgatgcctgcgcccgcatggcggcggcacaggcaggagccagcgattttggcgcactgtgccgccgggtgcccgggccgatggggggagtatatcgtcaaaaaattatctttttgacgaattgacaaaaaataatcgaagaaattttattcagaaacacttgtgcccagacggtttgtggtgtatgattaaagcaatgcaatgttggatacaacaaatgagaacggaatcagaaaaccgcacgcaataaggaggaaacttcatggcacttcacgttctggacgaagccaaccgctgtctgggctgcaaaaagccgctgtgccagcagggctgccccatccacaccaacatcccggaggtcattcggctgctcaaggcaaaccagatggacgaagctggcaggatgctgtttgagaataacccgctgaccaccgtttgtgcgttggtgtgcaaccacgagaaccagtgcgagggccactgcgtgcgcaaccggatgcccagccacgacccggtgcacttctccattattgaggactacatttccacgacctacgccaacaaaatgaccgccggccctgcccccaaaaacggcatgaaggcggcagtcgttggctccggcccggcgggcctgaccattgcggtgctgctggcacgctggggctacgatgtgaccatctttgatgcccgcgataaaattggcggcgtcatgcgctacggcatccccaactatcgcctgccggacagcgtgctggacgatttccagtaccgccatctggagctgaagggcatcaaggtgcggcccaacaccaccatcggcaagaccatcaccatcgatgatctgttccgcgacggctacaagagcgtgttcatcggtgccggtctgtggaaggccaacgccatgcatatcaagggcgaaactttgggaaatgtagcctttggcatcgattatctggcaaactccaaggcgttccgtctgggcgatgatattgccgtgatcggcgtgggcaactctgccatggactgcgcccgcaccgccatccgcaacggtgcccgccacgtcacctgctatgcccgccgcgacgagagctgcatcagtgcttccgagtacgaggtgagctatgcaaagctggagggcgtgggcttccgcttctgcaaagcaccggtggagatccgcgagaacggcctgatctgccgcgataccgtcaagggcgaagatggcaggttcactcaggtggagggcagtgagactttctacccccacaccggcgtgatcgtgtcggtcagccagggctcggagagcaacctcgtcaagaccactaccggcatcgagaccaaccagaagggtctgctcaccgtcagcgaggacggcagcaccacccgcgagggcgtatttgccggcggcgatgccgtgatgggcgcacgcaccgtggtggaggcggtggctgtggccaagaaggtggccgagagcatggatgcctacatgaagagcctgcctgcagaagaagtggctgacccctatgccaatatcccggtgttccagacccccacctcggacgtgctggcaaagcaggagatctgacgaaataaagacaaacttggaagaaactgtaaagcttttgcgtctttgccgatctttgccgctccgtttgttgacggggcggcttttgccttgtatactattcatatacttgtttatgatttgtacaaactggatataaaacagtgaaaggcggtggacgctatcctgaaagcatccctcccgaaactgcgggaaaaactattggaagcgctgcaggcagtgctgcccattgcagccatcgtgctggtgctctgctttaccattgcgccggtgtcacccagcatcctgctgtgctttttgctgggggccgccatgatcgtggtgggcatcatgttcttcacactgggcgcggagatgagcatgacccccatgggcgagcgcgtgggtgcggtgatcaccaaaagtcggaagctgccggtgatcttgggcatcggctttctgctgggtttcctcatcaccatttcggagccggacctgcaggtgctggcaaatcaggtgccctccatcccgaaccgcacccttattttatcggtggcggcgggcgtgggcctgtttctggtgtttgccttcctgcgtatgctcattggcatctcgctgccaaagctgctggtgctgttctacggcatgatctttcttctggcggcgtttgtgcccaaggaatttcttgctgtggcctttgactccggcggtgtgaccaccggccccatgactgtgccctttatcatggcgctgggcgtgggtgtttcgtccatccgcggcgaccgccacgcggcggacgacagctttggtctggtggccatgtgctccatcggccccattctggcggtgctcattttgggcatcgtgttccgcgcctcggacagcacctatctcccgccggtgctgccggaggtgagcgactcggtggagctgtggcagctgttccatgtcagcctgcctacgtatctggaagagatcgctgtctcgctgctgcccatcatcgtgatgttcggcatttttcaatttgtggctctgcacatggaccgccggtcactgggccgcattgcggtgggtcttgcgtatacctacgtgggccttgtgctgttcctcaccggcgcaaatgtgggctttatgcccgccggtaattatctgggtcaggtgctggccgggcagagcttccgctggatcatcattcccattggaatgctcatcggctacttcatcgtcaaggccgagccggccgtctatgtgctgaacaagcaggtggaagaggtgaccgacggtgccatttcggccaaggccatgggcacagccctttcggcaggcgtttccatctcggtgggccttgccatggtgcgggtactcaccggcatttccatcctgtggttcctcgtgccgggctatgtgtttgccatcggcatctcctttgtggtgccaaagctgttcaccgccattgcatttgacgcgggcggcgtggcatccggccccatgacggccaccttcctgctgccgctggcacagggtgcctgcgtggccgtgggcggcaatatcgtcaccgatgcctttggcgtggtggcgatggtcgccatgacgccgctcatcacggtgcagctgatgggacttgtggcacagctcaagacccgcaaggcacggcaggcgcagcatgccgccgcacaggcctttgcctttgccggtctggcggacgatgatatcattgaactgtaaggagggcgcggcatgagttcgttgtttttgatggtgaccatcaccgaccgccgctccaccgatgcctttttgcagctgtatgagcagcgcggcgtggatgtgaacctgcgcacggtaggcagcggcacagcggtgcgagagactctggccacgctgggtctggaaaagaccgagaaggcggtgctgctggcggtggtgacagaggatacatggaaggccgtccggacagacctgcgccgcaaaatgcgcatcgacgtgccgggcaccggcattgcattcacggtgccgctgagcagcatcggcggcagaagggcgctgatgttcctcacccagcaccagccgctgacattgaaggaggagagcaccttgaaggatacccgttacgaactgctgctggtgatcgccaatcagggccacaccggcgccattatggacgccgcccgcgcagcgggtgccggcggcggcacggtgatccacgccaagggtaccggcatggaaggcgcagcccagttccttggcgtggagctggtgaacgaaaaggagctggtactcatcgtggcccgcacgctggaaaagaaccgcatcatgaaagccatcatggacggtgccgggccaaaggcgggcgcgatcgtgttctcgctgccggtgacggataccgccggtctgcgtctgctggaggacgaggaaccggtgcaggagacctctgcgcagtaaacaacaaaatgtaatttgttccgggaatattccgcatttatgggcgaaacgcttgataaatgcggattttttcgttatcatagaagaaagaaattcaagaacgagggacaaaagatgataaagctttcatatgagcagcagatcgcattcaattcgctgtccatcatcgtgggcaatgcactgtatgcgctcacggtggtgctgtttcttgtgccgtcaggcctgatcaccggcggtgccaccggcatcgcactgggcatcaaccgtgcattgggactgccggtgtccggtgtgctgttcgtcatcaacatgaccatgcttgcggtgggctgggtgctgctggggcggcgctttgccatcaccaccattgccagcaccgtgctcagccccctgtttctggccctgtgggagcgggtgttcacggactttgtactgacgaacgatatcgtgctcaacaccatctttgcgggttttggcgtgggcatttcgctgggcatcaccatccgggcaggcgcatccaccggcggcatggacatccctccgctggtgctgaacaaatatttccacatcccggtgtcggccagtatgctggtgttcgatatgctcatcctctgcctgcaggcggcgttcagcccgctgcagcagtgtctgtacggcatcgtgatggtgatcgtgtatacggtggtgctggacaaggtgctcatcttcggcactacccgcaccgaggtaaagatcatcagccagcacgccgatgatatccgcgaggccatcttcacccagctggaccgcggtgtgaccgtgctgcatggcgagggaggctacagccacgagccggagcaggtgctgctgagcatcgtgagcaaccgccagctgccgaagctggaaaagctggcccatgccatcgaccccacctgctttatgatcgtgagccatgtgaccgaggtgagcgggcgcggcttctcgctggataagaattaccagtaaacgctgaaaatcccagcagatacttgaaaaacagtaccggtttagggtatagtatagaagaacggtaggttatgccgtgattttacccaacaggaaaggaaaaccatcatgtttgatattttcaatatgctcaagaaggaagaacacaaggacgcaaagcaggtgacccgcgagaccatcatcggcgatattctggatatggaccagaccaccgctccctacttcatggagatcggcatgcactgtctgggctgccctgcatcccgcggcgagagcatcgaggaggcctgtgctgtccacggcgtggactgcgatgagttgatcgagaagctgaacgagcatctggccgcaaagaaggcataaattgctgcccacactggatgcgcgtctggctgccgccgcagagcttgtgcggccgggagagccggtggcagacatcggctgcgaccacggcaagctgacggcggtgctggcggcttcgggaaaatacccgaaggtgatcggtgccgacctgcggcccggcccgctggcaaaggcagagcagacgctggaacatgcaggctgtaaagaccgcgctgagcttcggcttggcgacggtctttctgtgcttacggagaacgaagtaggcagcatcgtgctggcgggcgtttccgcccagaccacttgggaaattttagagaaagccccgtgggtgttcaccgtgggagggccgcggatcatcatgatcccggccacccgccacgacgcgctgcgccgctggttgtgggagcatggcttctcctttgcagccgaccgcccggtgcaggcggcgggccgctggtacgcggtgatggcggcggagtacaccggcagggtgtatgcgcccacctttaccgagtgcctgtttggcagtacgggagagtggcctgggggaaaaggctacgccgactggcagaaggcaaagctgccccggatgcgccttggcgtaccggatggcagcgaacttgcgcaggaaatcgatagtttattagctggcttgccctctcaggccgcttcgcgtccagctctcccaaagggagagcctttggcaaaatgatgaacgctgcatggaatgccaaggcctctcaccatgggagaggtggcattgcgtaagcaatgacggagagggcgaggatggtgaagatatgataacagttaatcaggtatacgaagcaatgcaggccatcgcgccgctggagctggcggaacactgggataatcccggcctgctggtggactgcggcgggcagatgcaccgggtgctggcagcactggacatcacccccgaggtggtggccgaagccgccgcaaagcagtgtgagatgatcgtgtcccaccacccggtcatttttgatccgctcaaaaagatcggcccgcaggatgtgcctttccagctggtgcaggcgggcatttctgccatctgtatgcacaccaatctggatgctgccgagggcggcgtgaacgaagtgctggcaggcatctttgacatgaagaatatggaaacctttgccgagggctgcggccgtgtgggagccattgaagaaatcgcggttccaaagcttgcccgcaaggcacagcaggagcttgctgcgcactgcaaccagccgaagaacggcccggcggtgcaggtaaagtttgtggatgcgggtaagccggtcaagcgcttggcggtcatcagcggtgcgggcggaagcctgtttgcagatgccattgctatgggcgcggactgcctgctgaccggtgaagccaaccaccaccacgccatcgatgccaagcggctgggcctttcgctcattgcggcgggccactatgccaccgaatttccggtgactgccgccgtggctgcaaagctgcgcgccgccctgccggagctggaagtgctggtgagcaccgagaaccgggacccgtatacgtatttataagggaaagctgctgctttttcttgcagcgattttccggctgagatgaagattgccgctgcaagcctcttctgtgaaagagtaattcggcaaagcccgcaggctttgccgaattacaaatacaaataaaaattccgctgattatggccaaagcgaatgcggcggccatttaaaatcgttaaatgaggtaaacactatggcattggatgccgcgacactggcccttacggcagcagagctcaaagcaacgctgaccgacgccaagatcgcaaaactatttgaacccacccgtgatgagctggtgctcaccctgcgtacccgcacggatacctatgcgctgctgctttcggcccgcagcggttccgcccgcgtgtgcctgaccgaagaaagctttgaaaacccggaaacgccgccctccttctgtatgctgatgcgcaagcatctcaccggcggcaggctgctggacgtacacatggagccgggagaccgcatcgtgtattttgatttccagtgcaccaacgagatgggcgaccttgtgcgcaacaccctgtgtgccgaattgatgggccgctactccaatctggttctggtgcagaacggcaagatcattgacgcactcaagcgcgtggattttgaggacagcgatgtgcgccagctgctgccgggcctgccctacaccacgccgcccaagcctgcaagaccggacttcctgctggtgagcagtgcgtccatcgtggcagcagcctgccagagagatctgccggtggcagatgccctcaacaagaccgtggccggtgttggcccggtggtctgccgcgaagctgcatggcgtgcctttgacggcgaacatctgcccgccaatgagctgaccgaggaacagaagcgcaagcttatggctgccatcgacgagctgaaggaagagcacgcaaccggcggtacgccctgcagcgtcaccgaccccagcggaaagcccatcgagtataccttcttccgcccgcagcagtacggcgaaaaatatattataaaggagtggccctccttcaacgccatgctggagggctactacgctgagaaggaccgcgcggaacgcctgcgcaccaaaagcaaggagctgcacaaggcggtgcacaatatgtacgagcgcgctgtgcgcaagcaggccgcccgtcaggaagagcttgctgccagcggcaagagcgaaaagctgcgtctgtacggtgagctgctctcggcaaacctctatctggcccagaagggcatgaagagcatcaccgtgcccaactggtacgacgagggcaaagaggtgaccatcccgctggatctgcgctttacccccagccagaacgcccagaacttcttcaagaactataaaaagaagcagaccgccgcccggatgctggtgaatctgctggcagagggtgaaaaggagatcgcctatctggaaacggtgctctacgaggtggagtccgcttccggcgaagcggccctcaacgagatccgggcagagctgaagagtcagggctacctgaaatactacaagcagcgggataagcgccagaagcccgcagacttcctgcggttcacttccaccgatggctttgagatcctggtgggccgcaacaacgtccagaacgacaagctcaccctgcacaccgcccggggcaaagacctgtggttccatgtgcagaaggcccccggcagccacgttgtggtcatgagccggggcgaggagatcccggacaccaccaagcaggaggccgcggagctggcagtcatctactccagcacctacaaggcgggcaccggtgccaaggtggcggtggacaccaccgaggtgaaaaacatctggaaagccagcggtgccaaacccggcatggtgctgtacgaggtgtacaccacggtctacgtcacgccccgggatgggctggcggaacagctgaagaagaaatgatttgaactgcgcgccgcgctgctctgcgcatcttcagcggaagaattattttaaatttgccaatcgggaaaatctgcggattttcccgattgactttttcacgggtggggtcgtaaaggcgaccggcatctgcagcgcctgcttcctgcggaagcacggcgcgaaccctctcagtcatcgctgcacgatgccagattcccccttttgtcgctgcgcgacatcttcccccggccgggggaagtcttttctctcagggggagctttatttgtgctgaccggcagatggcaaaaagctcccccctcgggggagctgacgaacggagtgagcctgagagggttggctccctccctttgggagagctgtcacgaagtgactgagagggcgaggacggtagtgctccgaccctgccttttattatatatgtataaaagcggcagaacggtccatactaagcactgcgcagcgggcgcggcagagttttccaccggcagaaaagcctgcggattgtgcatcttgcacagaaaatgcgctctttgacaaaacggagaaaataaaaaagaaaattcgttcttttttctaaaaaacacttgccaaatgcacgaaggtgtgatagaataactctcggctgcaaagggcttgtgcgatacaagtcgtgcaggccagcgatatgcgtagatgcgggaggttgtcatccggcgatagctgcgatgggttatttccgcggagtatgtccgatcttagaaccgggcgaaagaattactgacagcgatggaatacgttccctcggcagagaagttactcctctgcgaaacgggcggaaccaatgttcggatttgatttgctaatatgtttccgggagaac

SEQ ID NO: 1102 - DNA, 84559 bp, Unknown
  gut microbiota DNA sequence
ttttgtcaagccttattttttagaagcttttgaactttctgaacttggacatccaagaagtttctcagaacaaactggaacttttcagcgtctattggttcttttcaaaggcttcctgctgaggctttggaagtcattcttttgcctcagcgcttggcgctcaagtataataccacacccccgcctccttgtcaacactttttgacaacttttttcatcttttttcttgcgctgctgaaaaacgttcattttcttgtattcaacgttctctttttacgcaaaaaagccgcctgcacattcctgcacagacggccttctattacttctataatagagttaacggatctcgatgcccagcttgaacttcaggttgccgaggatcttcttgaccacgcgctctacttcttccgcagagacttccttcttcgggtcggacagagacagggtgaatgccatgctctttttgccctcgccgagatttgcgccgcggtagatatcgaacagcttgatctcacccaccagagggctggccttcttgatggtctcctcgatctcgccgcaggtggtcttttcgtcgcagaccaatgccagatcacgcttgacagcagcgtagggactgagcggctgatagcgcagctcaccgtccacgcaggacatcagagcctcgtagtccagctcgcccagataaatattctggctatccttctgatcctttgcaatttccagctcgccgttgatctcgttggacagcttgccgaacacacctagacgcttgtcaccacagtaaacagcggcgctgatgccggggtgcagccacggggtggtctcgcgcttataatcaaagctcaggccaaagccggctgccagtgcttccagtgcacccttgaccgtgaagaaatcttcttcggggccgaatgcaccaatgcagagggtctggcgctcgtgcggatgctccttgatgggcagttccttggcaagatacaccggtgccatctcgaacagacggccttctgtgttgcccttcttgagattgtccacaatgacgttcagcatggagggagccagcagggtgcgcatgatggacaaattctcgctgatggggttcaggatgcggatggccttgcgggcttcatcatccgccgggatgtgcagcatatccagttctgcgttggagtagaaggccagcgtggaggcctcatagaagccctgtgcagccagcaaacgcttggtcttgagctgctgcttctggtcatagttcagaccgccgtttgtaacggaggcagtgttcaggaaggtgggcacaatgtggtcgtagccgtactcacggatgacctcctcggccagatccgggaagctctccacgtcctcgcggtacaggggtgcggacacgtcccagctgccatcggcctgtacatccaccgtgaactccagacgctgcagaatgtcgatcatggtctgatccggcacggtgatgcccagcacgccgcagatcttagccggagtggtaacgatgtgcttgcgctccatcgggcggccatcggtcaggtcatattccagtgtggtgatgtcgccgcagtccagctcctggatcaggtgcagggcacgggcaaggcccagttcaggagagtgacggtccacgcccttctcgtagcgggcagaagagtcgctgttctggcccagagcgcggctggtcttacgcacgcaatcgcgggcaaaggtggcacactcaaacagcaggctggtggtgttctcatccatgccggagtttgcgccgcccatgatgccggcaagtgccaccggattttcggcatcgcagatgaccagattgttggggttcagagtgaactccttctcatccagcgtgacgattttttcgcccgcatgggcgcggcgcacatcgatggtgcggccggcgaccttgttcaggtcaaaggcgtgcatgggctgacccatttccagcagggtgtggttggtgatatccaccacattgctgatggagcgcaggccgcacagagccagatggcgcttcatccagcggggagactcgcccatgcggatgttgcgcacatagtgtgccatgtagcgggggcacaggtccggtgcctccaccttgacggtgatgggcgcatccggctcgcagacggccttgtagtccatggcgggcatgtgcaggggcttgcccagaacggcagccacctcgcgggcgatgcccagaacggactggcagtccgggcggttcgcggtgatggagatatcaaagatatagtcatccagacccaccacgggagcaatgtcggtgccggggacagaatcctcgggcagaatgagcaggccgtagacctcagagcccgggaacaggtcgtcgttcaggcccagctcttcgccggagcacagcataccgttggactccacgccctgcatcttgcgagccttgatcttgatgccgccgggcagggtggagccatccagagccgcgggcacgcagtcgcccagcttcatgttggcggcaccggtgctgatgcggatgtcgtggccgtagtcgccgcagtccaccacacacttggtcaggtgggtgccctcctgcttttccatctccacgatcttgccgacgaccaccttgctgatgcctgcatccagcgggatcagctcttcgacctcaaagccgcaggagaagagcttttcctccagttcctgcgcagtaacgtcgatatctacaaattcttttaaccagctgaaaggtactttcattgtctcttctctcccctcttattcgtggaactgcttgaggaactgcaggttgttctcgaacatcaggccgatgttgttgatgccatacttcagcatggcgatacgctcgatgccgatgccgaaggcgaagccggaatactcgtccgggtcgatattgcagttctccagcactttgcggttgacgacaccgccgcccagcacctcgatccagccggtgtgcttgcacagcgggcatcccttaccgtggcactcgaagcagctcacgtccacctccacgctgggctcggtgaacgggaagtaggagggacgcaggcgggtgcgggtgtcagcgccgaacagcttctgcacgaaggtattcagtgcgccctgcaggtcgcccagcgtgatgcccttatccaccaccaaaccttccatctggtggaacatggggctgtgggtggcatcggagtcagagcggaacacacggccgggcatcaggatcttgataggcggcttctgaacgtccatggtgcggatctggccgccggaagtctgggtacgcaacaggaactcctccgacaggtagaaggtgtcctgcatgtcgcgtgccgggtgatccttgggcacgttcaggcgggtaaagttgtggtcatcgtcctcgatctccgggaaggtgcccaccgaaaagcccatgccggagaacacgtcgatgatctggttggtgatcagggtcagcgggtgcagaccgcccacagagcgggtcttggcgggcagggtgatatccaccgtctccgcagcattgcgggcagcaagctctgcctgcttcacctgttctgcggcagcgtcatagtctgcctgcaccttggccttgagttcgttgatgatcttgcccatggcaggacgctcttccggcgcaacggtgcgcaggttcttcatcagggcagggatcttgccgtttttgctgaggtactcctgccagaaggaggccagcgtttccttgccggacacctgaccaaggctttcagcggcctgttttgccagctcgtcgatcattgcttgcatggatgttctctcctttattcttcgtgttgatgagcggagtgcaacaaaaaagctccgtcccctgcccgatttctcaggcaaaagggacgaagctgttgattcttagctccgcggtaccacccggtttccacccgtgcacagatgccgggcggctctcagaacgccgtaacggggcgtggccgttctgtactactgctgtttcgcacagaccgctcaggagcgaacttcagcacagatacacccggaagccctttcagccggtgaagcttctctctttgccgtgtacgccatgcctactctctccgtcgctgcgtttgggagtattcaggtttataaccgtatgtatactaccacatttcgcggaagtttgcaagggctgtgcagtgactttccgcaaaaatcgcgttcgattgatttttttcacaaagccgcagccattatgaatcgtttatgtcatccattatgagctgaaacaattctcccaggtcgatcagtggcgcaaactctttatcaactttgtaatcatctgaaatttttaccacgaccacaccgtcgatctgctggatatatccttcctgcggatagactggcatctgttccagctctgttctgctgtacagttccccgtactgttccaccgagcaatgcttgagttttgccggagtaatatccctgaaaaccgctttccaagacgctctggccgagtaatcgttcagccagaagcggcccatctgcgcatacggatttgcatagaggtaatactccctcttcataaaactggagttcgagctgggtctgcccacaaacagtaccggcagctgctcgttatcgtcaaaatatccgctgctcatcaggtcgtccgcgatgtgatccgacatgctcttgagtgttttccttccctcatacatagcttcctgatcgatcacggcagagcagacattgccatagacgaccaaaaccgcaagtactacagcccctgtccgggcagcacgtacatacttttttaccataggctgatttgtgcgcgtcccttcaagcagcagcagacataccggcacgaacagattcaatccttcgcccatctgcaaaagccagaccgcctcgcttgtgatcagcatgatggcattgcacatgatgggcaaaacgatcagcgctgccactcccagaaggatatattcccaatttttccggtgaagcatttttctgaagcggttcagcagtccgatgctcagcgccagaaataccaaaacgaaaaagcccaccggctgcagaatgttatgccgatagtaattctgaaaaaagtaagctccaaacagttggtaggtctctgcaatggcattgggcagatttttcagtatagaaagtaccgaaacatccgctcctccattataacttgccatctgccatccacatgcccatacgatcagctttgtgagcaggaaatacaaaaccattcctgcagctgcgctgcaaagacttcttccaatgtgggcatggaccttttctctgtccacattgcggaacagaagcagcagaagatatgtcagcaggagcagacaaaagttatcaaggctcgtctgatagcacgcaaggctcatgaccagaagcagtgctccctgtacgaccgcttttctaaaatctgcggcacgaaccacacgctctgccgccagaacagaaaataaaaatgagcagccaaacaccggcgactgaaaccgatatgacagctgtattccagtgaccgtgctggccagaacagccatacccgccagataggtcacgacagaatccttctctgtaaaaaacttccgaagcagggtaacagccagcgccgacatggaaagcgtcagcaatgaattgaaaggttccgtctggatgccaaaccgcagcacatcgatcaccggccagagccatcggcccgtgactacctgccaatagccgccgaagaaccatgtattgttccacaatccgtcaaatgtattggtcagccgctggctgatcagcaggaaaaacactaccgccgaaaacagcagcatcaccagaaaatatcttagatccgatatatccagcccaaggtcgtccggtttctgtacatcgattttttctttcatcgttattttctccatctgtcctgttttatgttctcaggctcatttgttattcatcgatcagataatcctctgaaattttgatcacatatacgccgtccatttcctgcatggagcctttctcagggaatgtcggcattcgtttgatttcttctgtccggatcagttcgtcatatacctcatcactgcacagctccagctgcatcggtgtgaggtcacgaaacaccgcattccatgagtagcgcattgtggcggcattttctttttcgaaaaggcccacctgtgcgtagtcgttcgcatcccaatagatgatgtgtgtccggaacagtgggcttgcactggggcggcctaccagcatcactggcagtttttccggcaaatcataatagccctctgccaccagctcaccggccacaaggtccgcgatttgttttgttgccttgcgtccctcatacatcgcctgctgatcgaccgccgacatgaatacgctcccgtaaacgacagcagccgccgtaagcaggatcagtgctttttctgctttattccagcatttgcggaacgcatcacaggctgtttttccctcccggctgctgtccaatagccagaaacagaccggcaggaacaaggccagacctccggacatgggaatataaaacaacgcctgcgaggttgccaccataaataccgtgcacatcatgggcagcaccagcagcgctgctgtgccatagaaagtgttttcccaatctttccggcgtatgagccgaaccagtctgcacgcaagcgcggcacccaccacacaaaaaatcaaagcaaatacaactgcagtttcctgcagcatattgtgttttacaagggtaccaaagaaataccgataaaaaagctcatagcacttttcaacgctggaaggaagatttttcagaattccagacactgaaatatctgcaccaccctggtaatcggccatcgccgttcccgtcgcccacagtgtaatctttaagatcagcagatacagcactgcgccggatgcagcacttgccaggcttttgcaaatatattcccgaatcttttgtttttctccattctggaaaagtagtaggagaaaataggccagcagcaccagacagaaacaggcaaggttcgtctggtacaggccaaggctcagtgccaaaagcaccgctgccggcacaatgctgcttacggctgattttccccggatcacgtgctctgtagccagcattgcaaagaaaaacgaaaatccgtactccggtgcaatgaagtgaaacgaaagatagcacccgaccacaacattggaaacatagcataaacctgcgagccagtcaatgcaggatgttctcatccatgccggtttgaagagcatatgaagcctggtgactccaagagaaaccagcaccaagcataccaccgcattgatgggttctagctgcagactgaaacgcagaaaactggtcaccagccagaaccatcgcccattggaaagctcccatgctcccgccatgtactcagccgttgtccacagaccatccactgtgttcgtcagcttcaagctgatcagcggaaaatagaccatcaccgcaaagcccagcatcacaaagaaatatttcttatccaactcccgcagccagtgtctgatatccgcttttatttctacagacatgatattcctccatccataaacttctgcttttcagtatatcaaactcttccacatggttcaataaaaaaatcccctgccgggcagtcggcagaggatcttgcgtatttttccagagtgctttattttgccacgatttccgcagccagagcatccatctgggcttctgcggcagcattggcagcactgcggatggtgaccacagtatcacacacggcgatgttcttcatgctttccagctcggcgcgcatgagctttgcggccatgggtgcccatgtgccattctccatcagacccaccgtgcggttctggaagctcttggtcttgaggtgggtcagcagattttccatcggcgggaagaggaagccgtcgtaggtggcgcaggccagcacgatctttccgcagcggaaggcttcggtgacggcataggacacatcggtgcgggtcaggtccatctccactacctttgcgccctttgcacgcagcttttctgccatgaggtgggctgctgcacgggtgtggccgtggatggaagcacttgccacaaggatcttttccggctcctcgggcttgtagctggaccagatgtcgtagtagttcaggtacttgcccagatctccggtcagcaccgggccgtgcagcgggcaaatggtctggatgtccagagccgcggcctttttcagcagcgcctgcacctgcgggccgtatttccccacgatgttcaggtagtagcggcgggcttcgctggcccagtcggccttttcgtcaaactttgccacagcgccaaagcggccaaagccatccgcggagaacagcaccttttcggtggattcatagctgaccatgacctccggccagtgcaccatgggggcaaagacaaaggtcagggtgtgggtgccaaggctcaggctctcgccgtccttcaccactacacggcgctcctttgccacagcatcagcgccaaagaactggtccatatacaaaaaggtcttggcgttgcccaccacctgcatctcagggtagagtgccgccagctttgcaatgttggcaccgtggtccggctccatgtgggagactaccagataatccggcttacggcctgccagagcttcagtcaggttttccagccacggctcggtagcgcgggcatccaccgtgtccagaacggcggtcttttcgtccagaatgacataggaattatagctcacgccggtgggcaccggatactggctctcaaacaggtcaatggtggtatcgtccacgcccacacccaaaatggcttcgctgattttcttcacgctcatagctttccgtctcctttttatgatatgccgcagactgcagcaattatttctaagaacagttcctattatagcacattgttagaaatttcgcaagagatattattcttctccattttccggcagtcttgccgttaccggcctgcccggctcagcatccagttccagcagagcggcagcagcgctttcgtccatggtctgcaccgcgcgcagtttgcggctgatggcacggctgcgcacgccaatgagattatccagctcttcgtcggtctggcgcaggcgctgctgcatcttggaaagcccctgcccgaacttgtcaaattcggtcttcaccgcacccagcagctgccatacctcaccggaacgcttctggatggcaagggtcttgaagcccatctgcaggctgttgagcagcgccgccatggtgctggggcccgcgatgttcacctgatagtcccgctgcagcacttccagcaggcccgcgttcaccacctcggcatacaaaccctcgaagggcaggaacaggatgccgaaggccgtggtatagggcggctccacatatttttcccggatgtccttggcctcggcccgcagcaccagctccaatgcgtggcgggcgttctccacggcctgtgcgtcgccggatgcctgcgcatcctgtaaatgggcataggtgtcgccggggaacttggagtcgatgggcagccacaccgtgccgccatccgcgccgggcatccggatggcgtactccacccgctgggtgctgcccggaatggtggccacgttggtgtcgtactgttccggggcaaggatctcttccagaatggctcccagctggatctcgcccaggatgccgcgggtcttcacaccggaaagcacctgtttcagcccgcccacatcagcggcaaggttctgcatttcgccaagacccttgtacacctgttccagctggtcgttcaccgccttgaagctttcggtcacccgcttctgcaacgcatcctgcagctgttcgtccaccgtatggcggatctcgtccagcttctgggcgttctgggcctgcagggcagccatgccctcggcaagggtgcggcgcatctcttccagcttgcgggcgttggaggcttccagcccctgcaggcgctgctccatggtctgctgctgggtgccctgccctgcggcaagggcggtgctcatactctgcacagaagcctgcagcgtttcactgatgtggcccatagcggcaaggttctgctgcgccatctctgccagcttcgcgtccatctggcggttctgcgcttccagctgctgacgcagccattccttccgttctgcatcgtcccggtttgcggcaggctttgccgagcggtacagcagcagggccatcatcaggcagatggccaccagaagcaccgtgtaaagaaacgctaaaaattccataatgtctcctattgcaaaatccgggctgtgcagctgcaaagcccggatctgcgtactttatattattttgtctgttcttcccagaaggcagcggcttcgtccagccagccatccgcagccgtgccgcggccaaggccgatgccatgggctgcgtggtcatataccacttctttgtaaggtacgccatgcgcggccagtgccttgctgagggccggcccctgcagcggccagcacagcaggttcaaggtcaggtcatccctgccataccagaagtacaccggcggatagtcctctgtgatcaggtcggcaaggctgtattcatagtagaaccggccgcacacaaaggggtcgatacccacacggtagatcggtgtgatctcggcaaactgcacgatgggatacgccaggatgactgcgccgggcttgggcaggccatagtttttatagcccagagcgtccgatgcaaacaggcccgccagatgtccgccggaagaatagccgatcagggcgtagctttccgtctgcacgccgaactgctgtgcgtggccgatgatgtacttcaccgcccgtgcaatgtcctccatggggccgttgttgtcgttatccgggtaggcgcggtagcgcatcacgaacaccgcatagcctttctggtgcagctggtaagctgtggagatgcactcctttaactccgccgtgcggttgaagatgttgccggagagcaccagcgcatactttgcatccggcgtgctggccgggtagtaatagaactccgcattgttgcgggagctgtcctcggcgatctcctgctccgagtagagcttataggtgatctgcacgcctgcattgtaattgcggatgagcaggttcagaccatcggcacaatcctgtgccacatggctgctcacatatttttccagcgtctggtcattgcaccagtcctcggtgccgggcaggttctgctccttggaataggtccaaacgcctgcgccaaggatgctggggttcgagcggatctcgcccatggtggtctgcggcgtgatatccggctcgccatactctgctgcaaatgcgggcagcgccatcatcagcagcagacagatacaggctgctgcggtgcatatcctgtgtttcaactcaacatctccttttcagccgacctgttcctcccagaaggcaactgcttcattcagccagccctctgcatcggtgcccttgcctgcggccactgcatggggagcatcatcatacacatggtagatatgcgtcacatggttgcgggccagtgccttttccagaacaggcccctgcgccgaccagcacatggtcataagggtcatgtcgtttttgccgtaccagtgataggtaggcgggtaatccggtgtgatgtaatcagacaatgtcattttataataccgctgcttgcacacgccggggtccagcaggatattatagaccggtttgaactccagaaaggtgtttaccgggtagcccagcagcatggcaccgggctttggcaggccgtaatttttgtagcccaccgcgtcggtgccgaacagtccggcgatctgcccgcctgaggaatagcttacaatggcataatcctccgcctgcacgccaaactgtcctgcatgttccgtgatgtattgcaccgcgcggaccacatcctgcagcggcgcattgttggaagccttcatgccgatgcggtagcgcagcacgaacaccggatagcccatttcgtgcaggttccatgcagtggaaatgccctcgcggatctccgcactgaccacaatcgcattaccgccgatcaccagcgcatatttctggttcgcctgcgccccttctgccggcagataatacagttccacaccgtcccggctggtatcctgcgcgatctcctccgccgtataaagcgggaaggtcacccgctgcccagcgttataggtgcggatcagatagttcagtccatccgccgcatcctgtgccgtccagtgattggaaaggcggctcagcggctgcgcgtcccagtacatccggtccagcacacggtcctgatccagcgagtaggtgtagatgcccgcacccacaatgctggggttggagcggatctctgccattttggtgcgcggtgtgatgttggcctgaccaagctcctccgcaaacgccggctgtgccagcaggatcatcaggccaataccaaacatcaccgtgcgcaatcgttttctcacagcaatcccccatttatctctttatttgcactgtttttcccagaattccgttgcctgcaggatccagccgtccgcatcggtgtggcggcccgggccaatggcgtggggtgcgtcctcgtacacatggcactcataaacagccccgctctcccggagcttgcgctccagcagcggcccctgctgggagtagcacatgcgctgcatataaagatcatttttgccgtagaagaaataggtaggggtaaagttttcgttcaccacatccgaaatatcggtccagtagtaacgccagccaagcaccagcgggtcaatggccagctgatacagcggcttcacctcaaagaaatcgttgatggggtaacccagcagcagcgctgcaggctgtgggagaccaaatgccttatagccgaacttttcgttgtctgagccgatcaggcccacgatgtgtccgccggaagaaaagcccatcagcgcatagttttcgcgctgaacgccaaactgatctgcattttcggtcaggtactttatggcattggcaatatcgtacagtggcgcattgtcggatgcattcaggaaagagcggtaccgcagcacaaaagccgcatagcccagctcgtgcagctggttggcaatggatgcaccctcgttcagctctgcggtggtgttgccgccgttgccgggcaccacgatggcgtactttgcgttggctgttttagccgggaaataatacagctgcaccatgcccagagaagaattttccgcaatttcttccggggtatacacctgccatgtgatctgtacgcccctgttgtagttttcgatcacaaggttcatgccttcggcggcatcctcggcagccgcgtagcttacatagccctcaatgggcgtatcatcgtactgcgtgctgccctcgatccattcgttgcagtaggtgtagtagccggagcctttgatgctggggttctcccgcagctccttcatggtcgtctttgttgtgatgttcggctcgccgtactctgcagcaaatgccgaaagcgatacgcacgccagcattcccagcgcgcacaccatcgttctgatccacttcattttgggacatcctccattctgcagcggcgtatcctgccgtgcttttctttgttatgatttattgtatcacaaaccttccgcttgtcaaagaaatttctgtgcagtacggcgcttgtaccgcaccgcaaattctgctatactggagccggatatttttgagagttgagggtgcggaaagctatgcactttccgtcgggatcgaaatatgagcaaaatcgagatccggcccatggagccggaagactggagcgctgtttccagaatttatttggagggcattgctacagaacatgccacttttcagaccacctgtccgccgtattctgcgtgggatgcttcccacgcaaaagaatgccgactggtactgctggccgacggcgtgatcgccgggtggacggcgttgcgccgggtggacccgcgctggtgctaccgcggcgttgccgaggtgagtatttacgtgggtgagcagttccgaggccatggccttggctatcacctgctgaccgagctgtgccatcaggcagaaaaggccggctactggacactgcagtccaccgtgctgcaggacaacgctgccagccgcgccctgcacacaaaatgcggctttcgcttagtgggccgccgggaacgcattgcccgcgactgtcacggccgctggctggacacattcttaatggaataccgcgctgccgccaatgaaccggaaggctataaaaagctgtaagatgcaaaagaactccgcgccctgtgaggcgcggagttcttttttgtccattgataaaatgataaaggtaaaaacaggcttaccactcttcgccgtcgatgtccacgctgccgtccaccacggcaccggcacgggaacgctggaacatgctttccaccacggcgcagtacttatcggccagacagacgatgactgcttcgcggcaggtgggcacatgacggaaggtcagcggccacatgtggcttgcaatgatgctctgttcctttctggtaatgctgaacacccgctttgcattgacgcaggcataacccggatgggagaagccgtgcatctcaaacaggcggcgcaggccgtgaaaggtaccggtggtgtgccagtcgtacagataaaaatcatgcagcagggcacccactgccagcgaggtctcgtcagcgtgcagatgcagacggcggttgagccagaagctcaccagcgccacattcttgcaatgctggtaggtggtgacagagccgtgctggatgtactcccgcatccgctgcacatccgggtgatgatcgtatttttcaacgatggcataaagctgttcgcgctcgatctcagaaagctgcatgctgcaaaatttcctttcgctttaaggtgatgttttcaggagcggagctggaccggattggaattgccgaagttctctgcactggaagggttctcccgcttgagagaaagatctaccagatactgcttgccgtcgcccagttcttccagctgggccagttttgcctttgcggcggcttcgtctgggtaccactggatcaggaagaaattttctttctctaccccgtagtacagccactggccgtcggcacgcagccagtcgtccagatgatccacttcttcgccgtccggcaggccaaggccttcttcggcataaaggttttccggttccacctgcagcatttcgatcacctgaatggagctttgcaggtattcgtcctgcgagactgtcttgtccgaaagctcccatccggtgagaaaagcctgcatcatcaggtcgcgcacagagatgcgcggcagggtcgggtccataaccataggtatttccttcttcctttagtttgtccctgctgaccagtatacgtcaaaggcttatgcaagtcaacagtttaattgtgaattttttgtaggttcgttcaaatatatccagacttaacagacggaaaaggcaaaagtgtctcccagccattccactgccagttccacccagtgatgccggtggcggctgggctggtccacctctgccgtgctgatgctggtaccgtgcacccccttttcaaacagatgcgcctcgcagggcacgcccgcccggtgcagagcgttcaccagcatcagggtgttctccaccggaacggtggcatcctccatggtggtccatacgaacaccggcggcatctgcggcgtgatcttatcctccagcccgaacacctgctgtgccgccgggtcggcgctgcccgccagctgcacaaagctgccgcggtgggcatactgccctgccatgaccaccggatagcccagaatgaccgcattgggccggggctgggccgcttcgccgggaatgtccagcacagcaccggaaagggccaggtggccgcccgctgaaaagccgcacacggcaattttttccggcaggatatgccactgggccgcgtgctgccgcacaaggccgatagcctcggccagctggcgcagcggcatgtagtcctttgccttttcgcagatggcgtagtccagcacagcggtgtggtaccccgccgccgcaaactgcagcgccaccgggtcgccctcacgggcactcacatgggtatagccgccgccgggcaccaccagcaccaatggccggtcaagcacattcggcatccgctcacagcaatcacgcagataaacggtcagtgtcccaccgccggccagttccagctgtttcagctgcatgatatttcctccttttacagcatcctttgcggttcattatagcacaaaacgaaccattttttaaactttttatgaaagcccttgatttttgctttttgtcggtgtatattagcactcgaaagttacgagtgctaagtattcaaaagtaatatcctattccgagtgcttggtgccgaatacagataaaaagaggttttgcattatggctaagaaagaatttcaggctgaaagcaaaaagctgatggatatgatgatcaactccatctacaccaataaggaaattttcctgcgcgagctgatctccaacgcatcggatgccatcgataagctctattataagagcctgaccgatccttctgtgggcatgaacaagggcgatttccgcatcctcatcacccgcgataaggagaaccgcatcctgaccattgaggataacggcatcggcatgaccaaagaggaacttgagcagaatctgggcaccattgctcactccggttctctggatttcaagaaggacaacaaggacgagaacatcgatatcatcggccagtttggtgtcggcttctactcttccttcatggtagccgataaagtcaccgtcatttccaaggcttatggctcggatgaagcatggcagtgggagtcctccggtgtggacggctacgaaatgacccccgcccagaaggacaccgcaggcacccagatcatcctgcacatcaagccggatactgagacggaccactacgacaacttcctcgatgagtacggcatcgtggccatcgtgaagaagtacagcgactatgtgcgctatcccatccagatggagcgccagcacgagcgccagaagccggaacccgatcccaagccggaggactataagcccgaatgggagacttacaccgagctggaaactctgaacagcatggtgcccatctggaaaaagcagaagagcgaagtgaccgacgaggagtacgcgaacttctataaggaaaagtttggcgattataccgaccccgcccgcgtcatcgtcagccgcaccgagggcactgcaaattataatgccctgctgttcgtgcccagccaccgtccctacgacttctacaccaaggattatgaaaagggtctggccctgtacgcatccggcgtgctcattatggagaagtgcgccgacctgctgcccgattacttcagcttcgtcaagggcattgtggacagtcaggatctgagcctgaacatcagccgcgagatgctgcagaaggacaaccagctcaagctgatccacaacgctctggaaaaaaagatcaagaacgagttgcacgccatgctggccaatgaccgcgagaagtacgaggaattctggaaagagttcggccgtcagatcaagttcggtgcttactccgactacggcatgcacgccgagttgctgcgcgacctgctgctgttctggtctgccaaggagcagaagatggtcactctgcaggagtatgtggacaagatgcccgctgagcagaagtatatctactttgctgccggtgattctaccgaccgtctggcaaagctgcccgccgctgagctggtcatggataagggctatgacgtcctgctgctgaccgaggatgtggatgagttctgcctgcagatcctgcgcacctatccccgcaaggatgccgaaggcaaggatggcaccgtggagttcaagaatgtcaacagcggtgatctgggccttgagaccgaggaagagaagaaggccgccgaggacgctaccgctgagaacaagagcctgttcgatgccatgaaggacgcactggacggcaaggtgaaggaggtcaaggtctctacccgcctgaaggatcaccctgtgtgcctgagtgctgacggcccgctgtccattgagatggaaaaagtgctgtccaagcagcccggcagcgaaggcgtaaagagcgataaggttctggaactgaatgtcaaccaccccgtgtttgccgtgctgaaggccgcacaggaggccggtgacaccgacaagctcaagaagtacagtgctctgctgtacgcacaggctcagctgatcgaaggcctgccggtggatgatcccgccgcctacgccgaggccgtctgcagcctgatgaagtaactttttccggcaggcaacagacttactcccctgccgcttccacgcacatcaatatttccccccttaacaaaaaggccgtgctccgctataatagagtggaacgcggtctttttctgttcttttgccggacagtcaggataaattgagaggtttttgctcatgcagcccaaaaaacattattttgcccacatccccaccattgccatctttattgtgtttgccatgtcgacaccgctgggcgtgctgctgttcatcttaaaaagcatcgataaaaacgccgaaaaagaggaaaaggctgctgcgcaggcgcaggcagactatcgttccgacctcggccccgcatctgcgcagacggccccccggcaggaaaacgagccagcctacggccacgatgttcccaccaaagagcagaaggacgctaaggagcgtcataaactccttaccaccctgtgcaccatcggcggtgctgtctttctgttcgcgggcttcagcaccctgttcatggatggtgctgccagcatgatggaggcctttaccgccattgcccagatgctgggcggcggtgctgctctgctgaccggcctgcgcatggatcgtacccgcaagctggaacgcctgttggacaagatcgcaggcgaccgcgacaatattccgctggacgagctgtttgctgccgcgggcatcgatgccgcaaagggccgcaccgtggtggaaagtgctatttcccacggttacttcggtgcagatgcttacattgataaccgcaccaatactctggtagtgcgcggcgcggctccccagccgccccggaaaccgaagcctgcgcccgccccagaacctgcaccagcggaccaatataccgcaattctgcaacagctgcggcaggtcaacgatgccatcccggaccccgtgatgaccaccaagatcagccgtctggaagcggtcagtgcccgcatctttgagctggcaaagcaggaccccggcaaaaaggcccagctgcagaaattcatggactactatctgcccaccgccctcaagctgctgaacacctacgccaaccttcctgcgcaggatgtgcagggggaaaacatcgccgatgtcaaaaagaacatcgagcgcagcatggacctgctggtgaccgcctttgaaaatcagctggacaagctgttccagtccgacgcactggacgtttcggcagatgtggccgcactggaagggatgctgaacatggacggcctgaccggaaacgagtttacaaaataatattttgggaaacagggaaaaggcccatgcgctttttccctgttttttcaaagcgcaaatctccatgttgtgcagctcttgtccgtcccgcgcaaagccgtggatttgcaggcatttttgccaatggtttttccgttttatatctaattttatttcaaccgtcaaattccactctgtgcgccaatttcagtctttttgcaacttttcatccagatgcaacaataacacatggttttttctgtccggattttatatgataaggacagaagtgtgcagagcatcctgtatgcggccctgcactgcagttccaacccgctcaaaaggaggattatcctatgatgaaatctgtttccgcatggaagcaggagctttccagcggcgctcacgctgcccggctggcagcactttactgctgtgcgcccgacgaaactcctgcacaggctgcccgctacgaagctgttctgaatggtctggatgccacctttggcccccatgctgaagctggtctttacagtgcccccggccgcaccgagatcggcggcaaccacaccgaccaccagcatggccgcgtgctggccggcagcgtgaatattgatatgatcgctgccgccgcgcccaacaccctgaaccagctgcgcgtgcagagcgaaggctacgacctgtgtgtgatcggccttgatgaccttgctgcccgcaaggaagaggaaaacactaccctctctctgctgcgcggcgaatgcgaagccttccgtcagcgcggcgcaaagctggccggtctggatgtgtacatttcctccaacgtgcccaagggcagcggcgtttcttcctccgccgcctttgaagtgctgatcggtgtgatcctgaatgactgcttcatgaccgataaagtctcccccatcgagatcgcgcagatcggccagtgggcagagaacgtctactttggcaagccctgcggcctgatggatcagatggcttccagcgttggcaacattattaccattgattttgcggaccctgcccacccggatgtggagccggtggccgtggatttctccaaggcaggccttgccctgtgcattctggattcctgcgcagatcatgccgacctgaccgacgaatatgccgctgtgcccgccgagtgccgcgccgtggctgctgtgtgcggcggcgaagtgctgcgggatgtgccgtttgagaccttccttgcaaagcttccggagtgccgcaagcagtgcggcgaccgtgccgtgctgcgcgccttccatatctatgctgataacgaccgcgtggcaaaacaggtagctgccctgcgcgagggcgattttgacactttcctgcgtctggtcaacgagtccggccacagcagctgggaatacctgcagaacgtgatccccgccggttacaaggagcatcaggagatgggcgtgaccattgcagctgccaagcattatctgaacggcaagggcgctgtacgcgtgcacggcggcggctttgccggtacggctcaggcctttgtaccggtggaaatgctggccgacttcaaggcccacatggaagccatccttggtgagggccgctgccatgtgctgagcatccgcccggaaggaggcgcagtgctgtgatttctaccgccattcagcagctcgtgaattacgggctggacaccggccttatcctgcccgatgatgaaatttacatccgcaaccagctgcttatgaccatgcagctggacgactttaccgcgccggagggcgaggtgtgctataccgatctggaaagcatcctcaaaacgctggtagatgatgccgttgcccgcggtgtgtgcgaggacaactccaccgcccgcgacctgttcgacacaaagctcatgggcgtactgaccccgcggcccagcatcgtgcgcgccaatttcgaggaacgctacgaaagcgaaggcccgcaggccgcaaccgactggttctataaattcagtcaggacaccgattatatccgccgctaccgcatcaagcgcgacctgaaatgggtcaccaagaccccctacggcgatctggatatcaccatcaacctctcgaagcccgaaaaagaccccaaggccattgccgccgccaaactggctccccagagcgcctaccccaagtgccagctctgcgccgagaacgaaggctatgcaggccgcatgaaccaccccgcccgcgagaatcaccgcatcatccctctcaccatcaacgacagcgcttggaacctgcagtacagcccctacgtctactacaacgagcactgcatcgtgttcaacaaccagcacactcccatgaagatcgagcgtgctaccttccgcaagctgctggatttcgtgggcctgttcccccactatttcgtgggcagcaacgccgacctgcccatcgtgggcggcagcattctcagccacgaccatttccagggcggccactatgaattcgctatggcaaaggctcccatcgagaagaaatgggtcttccccggttttgaggatgtggatgccggtatcgtgcactggcccatgagctgcatccgcctgaccagcgaggatgatgcccgtcttgtggagctggccgataaaattctgaccgcatggcgcggctactcggacgaaaaatgcttcatctttgccgagaccgacggcgagccacataacaccatcacccccattgcccggatgcgggacggcaagtatcagctggatctggtgctgcgcaacaacatcaccaccccggagcatccgctgggcgtgttccatccccatgcaaagctgcatcacatcaaaaaggaaaacatcggtctgatcgaggtcatgggccttgccgtgctgcccagccgtctgaaaaaggagctgtttgagctggccgatgcactggtggcccgcaccccggtgagccagtacccggaagaactgcagaagcacgccgagtgggccgaggatattcttgcccgccacccggaactgaacggcgacaccgtgcacctcatcctgcaggacgaggtgggccatgtgttcgctcaggtattggccgatgccggtgtctataaaatggacgaggctggccgcacaggctttgtgcggttccttgcaagcgtgcaataatctattaaaaaccgctctccccctttcccccgccggtatgccttgccgacgggggatttttattgttcagcggaggtcccaagacgttttccgtcccgtaacatagcacaaaaaagccgcctttcgtgccaattagcacaaaaagcggctttttatcgtcttatttcaggagcaaagagccttgcggaaggttattccggcagatcctcttcgttctccaagctgtgccagacgttctggacatcatcattgtcttccagcgcatccagcagcttgcccatcagcttcagctggtcggggtcggtcaggcgggtggtggtcatgggcaccatggccagatcgtcggagaggatctcgtagcccttctcctccatggccttgaccacagcagaatagttctcgggatcggtggtgatctcggctgcatcctcgctggcatcgaagtcctcggcaccagcatccagagcatccatcatagcctcgtcggcatccttatcttccagagagatgtcaatgacacccttctggctgaacaggaagcccacgcagcccatagcacccagattgccgccgttcttgtcgaagtagtggcgcaggtcggcagcggtacggttgcggttgtcggtcagggtctccaccatgacagcaacgccgccggggccgtagccttcgtaggtgattgcttcgtactcggtcttatcgccgccctcagccttcttgatgatgcgctggatgttatcgttgggcacgctcatgcgctttgccttggcgatcaggtcagccagcttgctgttggaagcagggttcgggccgccggtacggacggcaacgctgatctcgcggccgatcttggtaaagacctttgcctttgcgccatcggtcttttccttcttgcgcttaatattgttccatttgctatgtccagacatgggaaagagcctcctgtatattctcaaatctccgcctgcgggcagacgggctgtggtcgcccgcattgtggcagcacacaaaatctaactctattattgtagcacaaccgggcagagcgttcaagccttatccgcccggttttcagcattctgcgcgaaaaaatgcgctttttctgcccgttcacagcagccgcagcgccttgggataatggtttttcacccgcccgccggataccttgccgccgcccagcggccagccgtccaccgtcacgcagcaccagccgtcagcagcgatgcgggcttccacctcacggccggaaagatactccacgcagcgcgggtcatcaagggtgagttcttcgcggtttacgcactgtgcgccaaatgccgtgaacagatggtgctccggcacaaagcggcctttctgcacgctgcccacaaatacgcccgcccgcagcacatgcaggttcgtctgcgggaacggcaccggcagcagcacaccgccgccgtgcaccacagccgggcggtctgccagcgccgggaaatactgcctggcaaacgcgtgccatgctgcaaggctctgggcaggacttgtctcccctgcctgtgcttcgcggctgcgcttttcaccctgcaccgcttcccggcaggcacgggcattctcgcggcgggcactgcgggcatccggggtcttggcaggcttgccgcccttccccttggcctttttgcccgcagcttccgctgctgccagccagagctgttcttcggcagtgtactcgccctctgcgggcagaacgcgcggagtgccagctttgacgagccgggccataaagtggccctcgccgccctgacagggccagatacggcgcaccttgctcacatccagcggcaggccgccggtgcggttggcttcgccctcactgccaaaggtgtagtccacatttcccaaggcatccgcaagggtgaactccgggtggcgctgcaggaacgccgccacctgtccctcgtcctcctcgggtgcaaaggtgcaggtggaatacaccagctgcccgcccggggccagcacagcggctgcacagtccagaatttctgcacccagctcagcacactgcttcaccagcgcttcacagtgctgctgacgggccaccggctccttgcggaacattccctcgccggaacagggcgcgtccaccagcacccggtcaaaaaattccggcagcgcatccgcaatgcgggcaggtgcttcgttcagcaccactgcattgggcacgcccatgcgttccagattgcttttcaggatatccgcacgagctgcaacgtattcgttgctcaccagcacaccccggccctgcagcgccgccgccagctggctgcttttgccgccgggcgcggcgcacatgtccagcacacgcatcccgggctgcacgcccagcaggggtgccgccgaggacgcagacggctcctgcgagtagaacacgcccgcatggtggtacggatgccgcccgggccggaatttcaaatcatccggctgatgcaccacgaatgccgccttgcaaaagggcgatgcttccagtgggaaatcggcttttgcggcaaactgctccggtgagctgcgcagggccgacaccgttacgccgcgctccgccgtttcctgcggggctgcatacaggacatcgaaccggtctcccagcagagcgcgctcccgctgttcaaaatattccatgggcattctgcattcctcctgtgggatgtataaagccgccgtctgcggccaaactaggtcttgtgaggggcacaccgccccgcacggaaaaccgaaaggagatcattcactatggcaaccgaaaaccgcagcaataactgcaagaatcagacctcgaaccgcacgtccaaccagaccaccaacagcgccaccaacgagcacaagcatcccaaccagtacaccaagggtgccgacgatgagagcgccaagaactccacgagcagccgttccagcaacgccaaaaacagccgctgacgctgcccttcgcgcctgatggaccacgggcgcgaacctctgatctttctcaaatcgcaaagcccgctgccctccggcactgttttccagtgcggaaagcagcgggctttcgcgtcagaagttgtttttatagtcagggtgcgccgaatgggcgcggctttttgccgccagccaaggcggttttccgcagcaatcctaatggattgcaaggaagagcaacgcagtatggcagcaaaaagaccgttcaggcggtgtgcaatgattatgaaagcaacttctcaggtcttgttggggtcgaactgctgccacagtgtttcaaacagctcgtgcacacggcccagctgaccgttcagatacagccagcccagcaggcactcgaagccggtggaagcacggtattcctccggggaagcgtgttttgccacgctggccttgctggcgttgcggcctcgcttgaacacggccagttcgtcctcagtgaacagcggctccagcagctgttcctcccggaactgtgcccgggccgagacgtatttgaccttttctgcgttgagctttccggcagacaggcggtggtgctccaccagacgctgtctcaccagcagttccagtacgctgtcgcccacaaaggccagcgccaaggggctaagctcccgcgggtcgatcttttcaggttcgttcatagtgacctcttagaagatataatcgaactggtaatcgccaatgagaatggtgtcgttctcctgcacgccctttgccaccagagcgtccagaatgccgctctcacccaactgacgctggaagaactgcaggctttcgtagtcgtccacattgctgccggccagaatgtattccagccacggggcttccacgctccatacatgggcttccatgcgcttgatctcaaacgcacggtcgttggccttgggttcgggcttcttgtactcgggagcaaacaccggcaccggcgggatatccttcaggcggttatacacgaggcccggcagttccttcacgccctgcatcgtagcggcagagatgggcacaaaggtcaagcccttgccctccacatacttgcggaaagcttcgatctgctcctcggtggccagatcgcacttgttaccaatgacgatctgcgggcgctcagccagcacagggctgaactttgccagctcctcgttgatcttttcaaaatcctcaatgggttcacggcactcgctgccagaaacatccaccacatgcagcagcaggcggcagcgctccacatggcgcaggaagtcatgtcccagaccgatgccctcgctggcaccctcgatcaggccggggatgtcggcgcagacaaagcttgcgccctccgccacggacacaacgcccagcgtgggcaccagcgtggtgaagtggtagtttgcgatcttaggcttggctgcgctgatggtggaaatgagggtggacttacccacattggggaagccgatcagacccacatcggcgatcagcttcagctccagcgtcacctgaatgtcttcgccgggcataccgggctttgcaaacttggggatctgtcgggtgggagtggcaaaatgcgcattgccgtagccgccgcggccaccctttgcaatggtgactggggtgtggtcggacaggtccgcaatgacaaggccgctctcggcatccttgatgacggtgcccagcggcaccttgatgacaaggttctccgcgtttttgccgtggcacaggcttgcaccgcccttgccaccctccggggccacatacttgcgcttatagcggaaatccatcagggtggtcaggtgatcgtccaccacaaagatgatatcgccgccgcggccgccgtcgccgccgtccgggccgccagcggccacgaatttttcacggtgaaagctcaccgcaccgtcgccgcccttgcccgcgtggagccatatcgtggcgatgtcgataaagttggtttgtgctgccatacagcccctccttagttttatatgttcgtttattccccttcccttgccgggaactccttccggcatcgttgcacgatgccacctccctcaaggagggaggctttaaggcccctccccgagggggctgtcgccacaggcgactgggggagtttctgccagacagtcaaaaagagaattcttcatcaaaaagagccgggccacgagggtccggctctctacgttttgcagttatccgaaagaagttactgcttgacgctgcacttcttgccgtctttacccacgcgctcgaaacggacggtaccgtccaccagagcaaacagggtgtcatcgctgcccttgccaacgttctcacccggcatgatgtgggtgccacgctgacgaaccaggatgttgccggccagaacaaactgaccgtctgcacgcttggtgcccaaacgctgtgctgcggaatcgcggccgttcttggtgctgcctacgccctttttatgtgccattgtaatttacctccttagccgttgatcgcagtgatctcaaccttggtgaagggctgacgatggcccatacggcgagcactgtgcttctttgcgcgataggtgatgatgttcagcttcttgcccttgccattcttgatgaccttggcagtaacggtagcaccctcaacaacgggagcgccaaccttcacagaaccctcctcgccaatagcgagaacctgatcaaacttcacttcggagtcggcctcaacgtccagcttttcgatgtagacgatgtcgccctgctccacgcggtactgcttaccgccggtaacaatgattgcgtacattttgttcattccttttcgttgtactcgctggtcgtaaaggcaggcccttacactgggccatttcaggcgcccacaccatgcggctagaatattatagcaaaaaaacgatggaaatgcaagaggaattttcctctttccgaaggattttttatttttccgtcttcccgctttccgcgatggtgcgttttacttcggcattatacgcttcggtgcgctccacgaagagcttgcgcgggctggaggccagcagttcagtatctgcatccgtcatcagaccgataacagttttttctttgctcagcttattgactgcggctttgttgtccgccgtcattgccagctttaccatcaggggcttgtccttgaacttgtgggtgaagtaaatttccgcagccacaccgactaccacagcgatacctgccaccagctgggatacccgcagaccaatggagggcaccagcatcagactgtcggtgcgcagggcttcgatccagaagcggcccgcgccgtaccaaatcatataccgcagggcaatgtcaccgttgaacttgcgctttttaatgtaacggaacagcaggagaaagcccacgaagcaccagatgctctcatacaggaaggtgggatgcaccggcagattcgggtcaatggtcacgccgctctgggccgtgaccgtgctgcccatcaggtaagcgcgggtcgtttcgctgaacatgccccacggcagggtggtattgcagccgaaggcctcctgattgaagaagttgccccagcggccgcagccctgtcccagcagaaagcccatagcggtcaggtcgaacatgggcagcaccggcacgccccgccgtttacaggccaagccgccgaacagaaagccgccgatgatgccaccgtagatggcaaggccgccatcccgaatggcgatcatctcccagatgctttcgtatttaaaaggtgccatggccacgtagtaggcgcgggcgctgacaatgcccagcacgatgccgatcaggatcacgtccaccatgctgtccgggtccacgccgaactcgatgctgtggcggaacgcaaataccagcgccagacagatgccaaaggcaatgcacacgccataccagtaaatattgaacccgccaatggaaagggccacgcggttgatctcaaagctcaggcccagccccgggaactgcaccagatttgtcattctgcttcctcctcgttctcggccagcggcgcagtgccatctggcagaatatccatcacagccatgcggtcggtgctgaggatgtgctgcagcgcagcgtccgcatcctcggcagtcagccctgccagcatggtgatctgctgcgccaccgtctggccggagagggcaaagtctgccatctggctggccgagtcctccacattttccaggttttcgatcagctggccgtatttttcgttcttgcacagggtaaagatctcccggtctacacccgcggcacggatgcgggcgatctcgtccagcagcagcttccgcacggtatccggtgcatcgctctcgccggtgaacaggatgcagcagcagccgtccacccgcagcacttccccgccaaagccggggttcacaaggcccccgtcgtacaggcggcggtacagcggcgacatgccgcctgtgatgcagctcaggatcagatcatacagcgcttcagtgcgcagatcgttcgggggcaacggcttctccttgaagcccacgccgaagcagggtttggacaccggcattttcagggtcttatgggctaccgccagcgtcatgggttccggcttccacagccgctgcaccctttcggtgctgcgcggtctcatcaggccgtggcgctcacaggcagccaagatctgctccatggtagtgttgccggcagccgccagcaccatattgcccggtgcatagaaggctttgcagctgtcgtaaagcatctccggcgtgatcgcagcaatgctctccaccgtgcccgcgatatcgctgcggatgggatgctcgtggtacaagcactcgaacaggccggtgatgagccgccagtccgggctgtcatcgtacattttgatctcctgcccgatgatgccctgctccttggcgatggtctgctcggtaaagtacggatgagtcaccatgcccagcagcacatccaagctttcgtccagctgctgggtcgcagtgaacaggtagcaggtgcggtcaaagctggtaaatgcgttggcattggcaccggtcttggcatactttgcaaaggcatcgccgtcctgatcttcaaacatcttgtgctcgaggaagtgtgccacgcctgcaggcagatgcacctctttgccttccagccggaaatcccggtcaatggagccaaagcgggtagcaaaaatgacatgagtgctggaataacccggcatgggccgcacgataacggtcagtccggagggcagggtctgccactggtcagccacggtcttttccagcagggtctggttattctgcggcatgagcggccacctcctttgtgagcagatagctgaccgagagggtcagtttgcgcaggatggcgcgcacatcgtccttggtcacagcctgcagagcggcgcgggcttcggcgggtgtctgcaccttggccgggtcgccgccgcgcagcacttcaatgtaataccatgtctcgatgccgcccaaggtatcctctaccccctgcatcccgctcagcagcccccgacggcagtcctcaaattcatcgtcggtgatggggccatcgcacaggtcggccagttccttcaaaatggcccgctctgcccgggctgcgtcggcgtgctccacgccgctgttcacagccatgcttccggtaaagctctggaacgaggacgagcagtagtagcacaggtggtcacgctcgcgcacattcaggaacaggcggctggtcacactgccgccgtacagcgccatggcaaggcgcacagcagccagctgttcggtgcgcatgggttcgcccagcgtgaacagcatacagagcttcgcctgcaccatatcataggtttcggttttgtgcaccggctcccggcggggcatggctatgttttctgccagcggcagcggtgcgcggtcaattgccgcaagctctgccagcagtgcatcctttaccgcagcggtctgctctgccgtgcagcccagcacaagcagttcaatgttggcggtgcgcagcatctcgtaataggctgcggtaagctgttccggtgtcaggccttccacctcttccagatagccctcctgccgcacacccgccgggctgtcgccaaagaattcccggttggcctgatgcaggcagtaaaggcgcttatcgttgatctcatcttccagcgcctttttcagcatctgcttttcaatgcccacggcttccggatcaaaagtgccgcccacaaaatacgggtgaaaggccgcacccagtgcaatggatgcatattcccttgtaagggtctccccttccagcgcaaactgatccttgataccggtaacactaacacacaggttgtggctgcagcccatgggccgggcatccactgtgaggtctgcaccgtagagcttggccagctttttggtcaggcgggtcatatccgggcagtcggcatagccgcgctccagcaccagcggcagcagcgcatgtgctgtggccgtttcccgctttgccggaaaggcaaagtggacgctgatgcggcagcggttgaatttttccgccgggtcacaggaaagatgcacacccggcgcaatgagagtacgttccaatttgttcctccgccctgctttcacagggagcttttatttttatgatgccttctgcaaggcaagaaattcttccagactcaggccgctggcacggatggcaagggcattttcaacgcccacataccgccagtgccacggctcaaacaccacgccggtagcagcctgcctgtcctgcgggtagcgcaggataaagccgtattcggcggcgtaggcggtgagccactcgtaggcgcgggtcgtatcaaagccggtatcacgggtcgggtagtccgtactgaggatatccgccgcatagccggtgccgtgatcattgcattccgcaggcggctggatatctgccgcaaggctggcggcttcttcctcggttttgcccttttccagatactgctgcttctgcgtctcataggccgcgctgcgggcatctgcgtcctgatagcctgccgtcagcaccagtgcaacgccgtccttggccgcagccgcagccattttctggtaggctgcagctgcttcggcttccagttggataccgctggcttcatcggcatcggcaagggccggagagggttcctcggcaaaaggcagattggtgtttaccagcacaaaacgctcatcgtcagcatcaaagctgtagccggtgccatcgtagctagacgcatcaaagctctgcggccctgcaagcatggcgttcacctttggcagcagccagaggatgcctttggtcataagcgccacaatggcggcgcagacgagaatgagaatggcccagttgcgggccagacgcagccgcttgcggcgcttccactgagcgcgggtcaggcggggctttgctgcatttctatcagtcggttccatggtgcgttgcagctccttttgcagaatttgcagcgcactgcgccgcacagatacagtgtatattatacacccctttgcattttgtgtaaacgtcggaagtgtaaaataagtatgaccgaaaaaactccttccgtctgctcgcacgctcgcatccacctccctcaatgagggaggctctggcgaaacagaaaagtttcccgctctgccaaaggccccctctcagagggggctgtcgccgcaggcgactggaggagttttccacgcaaaaatgccgcaccacctaaaaggcgatgcggcattcctatatttttatttaatcaaacagcatatcgtggatcgcagaaacagccttgtcggcatcgtcgcggttgatgatgcaggagatcttgatctcgctggtggagatcatcttgatgttgatgttgttgttggacagtgcctcaaacatcttggaagcaacgccgctgtggctctgcataccggcacccacaatggagaccttggcgcaggtggtgtccacgctcacatcgttgaagtgtgcgctttccttcagcacgcgcatggccagatcggcttcgccctcagagcaggtaaagctgatatccttcttgccgtcacggccggtggactgcaggatgatgtccacattgatgttcttctgggccagcagaccgaagatcttgaagctcatgcccggctcatcgggaacgttcagaatcgtgataacagcaacatcagtgtcctttgcgacacccttgatcagcataccttccatgtcttttgtaacctccttgaccaccgtaccgggcacgggattcaggctggagagcacctccagctccacattatactttttggccagctccacgctgcggttgttcaacacctgtgcacccagagatgccagctccagcatctcgtcaaaggtgatctcatccagcttgcgggtgttgcgcaccttgcgcgggtcggccgtgtaaacgccttccacatcggtaaagatctggcagcggtctgcgtgcagggctgctgcaatggcaacagcgctggtgtcggaaccgccacggcccagagtggtgatgtcatccatcttgttcaggccctggaagcccgccacaacgaccacacggttgcgctccagctcagaagagatgcgctctgtctccaagcgggtgatgcgcgccttggtataggcgcggtcggtgcggaagccagcctgccagccggtcaggctgatggcatggcagcccagctcattcagtgccatggccagcagcgaaatgctgatctgctcgccgctagccagcagcatatccatttcacgggccgaagggttgtgggtgatctccccagccttggcgatcaggtcatcggtggtatcgccctgagcggacaccaccacaactacgtcattgcccgcgttgtgggtgtttgccacaatgcgtgccacgttgaagatacggtcacggtccttcaccgaagaaccgccgaacttctgtacgatcaacgccatatcttgtcactctcctctttttgtccctttgtcaaaagggggtacaccgggcggaagcggtcagcaacgccttgcacttcccttacccatttatcattccaccgttgcgccggtgttatcggcatccaaacgcagcaatgtaaatgcttcacatccgtccagaccttccagcagctccagacccttttccagcttggaatagaacttttcggcctccgccttttccgctacggccatcacggtgctgcccgcaccggaaacgtaaacagcctttgccccgcacaggcgtgccatatcgaacacttccttggagccgggcatcagcggcatacggtagggctggtgcaacttatcctcggtggcaatggccagcaggtcatgtctgccctcgcagaaggcggcgggcaccagcgcagcgcgcgaaaggttatatactgcgtccttgtgggagacttctttgggcagggccgcacgagcggcttccgtcagcagcttgtagtccggcacgatggcggcaaagcacagtgtttcatccacatcgcgcttgaccgagtacaccttgccatcctcgaacacgctgctggtcaggccgcccagaagagccggggccacgttatccgggtggccctcaatggaggtggccagcgtgagcagctcctgcgtgttgagcacatcgcccagcatccggttggcacccagcagacccgcgatgatgcaggccgaggaagaaccaaggccgcgcgccatggggatgggattcgtctgggtgatcttgaggggcggaatctgcttgcccaccttctcaaacagcccctttgccgaacggtacacgaggttcgattcaccgcgcgggatacgggtaccgtccacagacgagatatccagcacttcgctcttttcaaaggtgaccgtattatacagcgtcaccgccagacccagcgcatcaaagccggagccgatgtttgcactggtggccgggacagaaaccttgatcttcatagccgccgcacctttccttattccgttatcagttttcttccggcagacgcttgagcaccagcttcacgctgccgcccacggcttccaccttgcgggctgcttcggccagtgccttttcgtcggctcgctccacaaagtaagcgcagccttcgtagcgttcgtccaccaccctgccatagccgtagatggcttccaccaccgccggagcaatgcctgctacacgcacataatatgcagcaggagccgggtcggtgagcattccctccaccggctcagcaggctgccagaacaggctgtcgtgcaccttggagccatgcttcagggcatccacaacgtcggccaccacggcgctggcggtgggcagcttgcctgcgcccttgccgtagaacaccacgtcgcccagcatatcgcccttgaccagcactgcattgaacacatcgtccacgctggccagctggtttgccttgggcaccagacacggctccacaccggcagccacgctgccgtccttgccgcgcttcatccatgcgatcagcttgatcacacagcccagcttttccgccgcttccacatctgccgtggtaatggcacggatgccgcgggtgggaatgttctgggggtagatctgatggccgcacaccagcgaggacagaatggcgatcttgcggcaggcatcacggccgtccacatcgtcgctggggtccttcgtctcggcgtagcccagctcttgcgcgatcttcagcgcatcgtcaaagcccagattttcgcgcaccatcttggtgagcatgaagttggtggtgccattcacgatgccctccacctcggtgatgacgtttgccgccagacactggtgcatcggggtaatgatgggcgtaccgccgcccacagaagcctcgaacaggaaggcacagccgtgctctttggcaaggcccagcagctctgcgccataggtggccaccatctccttgttggaggtgcatacgctgcggccgctctcaaggcaggcctttacatacggatacgcaaagcgggtgccgccgatggtctccaccaccaccttgatctccgggtcttccagaatggtatcgaagttctttataaacaggtgtgcatccggatggtttgaaaaatccttcgggtcaaggatgtacttgacctccaccggctcacctgcacggcgggagacacccgcagcgttgcggcacagtacctcgtacacgccgctgcccaccgtgccaaagcccagaattgcaattttagccattgttgttctccctcgttttctgaagactgcttacagattgtacccgcagtgcacacctaccaccatacgctgacgcgaaagtttttcggtcagctcttcgggagtcatctgcatggtatcggtgcggatggtgactgccaccagtgcggcaccgttttccggtgtagactggttgatggtcacaatgcttgcacctgcggcgctgatgccggccagcaggctctgcagtgcaccggtctcgtcccgcagagtagccatgacggtgatcacctcacggccattctcggagtcaaaaatgcagtccttatacttataaaaagcgctgcgcgaaagatcgactgcgcgggtggcagcggaaatgctgcgtgcctccccgctggccagaagttccttggcgcgtaccaccttgagaaaaacctcaggcagcacctgcgcatctaccagataaaagcggcgttccaacttgttcacctcacaaacacaagtgttcttgcagtgaatataatagcatccggccccctgcaatgcaagaggtcggatgcgtttttgtcagattatccagttttgctgcggcaagcgcggtatttccttgccggattcaccccgcgccggtgccgatagtacgtctttgtccttcatatggctacagatcagtctgtatcctgattacctgtatccgcaggaatgacagcctgctccggtgccgcagtctccgcaggtgcagccgctgcaggagctgctgcatgggagtagttgcaggtaccaggcagctcatcggcgcggtagtagcccacggcggtgctggggcaggagccgcctgccagcagaccgctctgggtgcagtagcggcgctccaccacaccggcagaggtcgggaatgccttatacggcaggtctgcctgcacctgttccatcagcgccttccacgccataacgcaggtacgggtcttggcctgctgcttacccagcgtcttggtcatatcatagggtgcatcgtagccccaccacacggcggtaacgtagtacggcgtgccgcccacgaaccacagatccttttcgtcgctggcggtaccggtcttgccaaaggcttccatgccgttggagttggggtagcggccgccggcggtgcccacgctggagtacagaacgttcttcagcaggcggttcatcacataagcggtatccggggtcagggcctgatagctggtggagttgttctccagatagatattgccgtcacggtccagcacgcgggtatacaggtgcggggtggtgtactggccatcgtagaaaatctggaacgcagctgccagcgccgtgggcgtaacgccatgggtctgactgcccatgaccatctgcgccagacccacatcgtttaccgggtccagcgtgttcagctgcagggtgttgtacacaaaattgaagatgttgcttgcgcccaccagatcacccacacgcaccgcaatggtgttcagcgagcgggccagaccgttccacagcggcacatcactgttgtcgccgtagttgccgccatagttgcggggccagctgcgccatgcgttgggataagcgcgcagctgcttgtcggaaaggcccatcaggccgttcttgcggcagtaatcctcatcgcggatcaccatatcctgcttctgatacaagggcgagttgttgagcatggtggaccagttcaccagaccatactctacacccagtgcatacgcaccgataggcttgatggtagaacccgtctgacgattgacactgtaggcacggttcagcgagaggctcttgttcttttcgcccagaccacccacaatggcgatcacattgccgtcatagtccagcgtgaccatggctgcctgagtacgcacattgcggtaatagtaaacggtaccgtcgtcgccggtgcgggtcttgggcgtaccgtcctcgttcatcacctgtacatcgtcgtccgagatagaggtcacctcttcctcatgccagccggccgggaagtaggcatcgtccgtgttgagcatcaggttttccatggcggactgcaccttggtgttcacagtcgactcaacggtaaagccgccggtgtacagcagcttctgtgcctcggattccgaaatgttttccttgtccatgatgtcctgcaccagctcggtgaacagtgcatcggtaaagtaagaggtaacggaagaattcttcttagtatcctcttcctcggccagtaccagcggctgggccgctgcgttgcggtagtcctcttcgctgatcacgccctgctgccacatgttgtacatgaggaagttacggcggttgatcaggttttcggggttggtgtaggggttatagttggtggggtttttggtgatggacgcaatggtcgcacactcccacagggtcagctggctgacatccttattaaagtattcgttggccgcagtctgcacgccctgaatggtgccggtaaaactgatggtgttcaggtacgcttccagaatggtctccttagaatagctgcggctcaggcagagggcgcggtagatctcgcgcagcttgcgcagtgcgccttcaatgccgctggcgctcttgtcgtcggtcaggttcttgatcagctgctgctccagcgtggatgcaccctgcttggagctgtagatgggcagcaggtattcgttgaccattgcgccgatggtgcgcttgaagttgacgccgggctcgttgtaaaagtccttatcctcggtgcagatgaacgcatactgcaggttcgtggggatctgctccagatccgcccacacgcggtggctgttggaagagcgcagcgtggcatactccacctgtgcaccggtgtccgggtcggtggccatcaccacactggactggctcagctcaatgttgtccagatccagcaggtcgccgtcgttggcggtagcctgcaccacgtaatatacagcacccactgccaccagactgcctgccatgatgcccagacaaatcagtgtagcaatggttcggccaatgaagcgcagaatgggatgtctgcccttttcacggggttcctttggttctttgggttcccggccgcgtttgggtcccggctgggactcccggcggctgttgctcacatttaccttccgccccgccggtgccggggaatgcccctcaccggcacggttgatctttctcatatcggagatagaaatcgcctcctaacattcaggctgctttttcagcgccatgcgctggtacttttccatcaaagcgcacagaactgcacgcaataccatattatagcacgtgcacagaacgcgggcaagaaccaatcttcggccctgataggtctaatcatctgtagtataacacaatctgccggacaaagtacagcattcccgtgtgaaaattgactgtgcccccctgttttggggcatacttcagccggaaaggagcgtgtttctccatgcgcaaactgtgcacctgcctgttctacgggctgtgcgtattcaccatcgtgttcagcctgttctggatggccctgcccaagctcagccttccggtgcccgaccccggcagcgaagcaccgccttcctccgcagcagaccttgccgcacaggccatgccggagcttgctgcccagagctaccgcctgtgcgacaaaggcgggcgcgtggccgtttaccgctgcggcaccaatggccagccggatgtgcttgtcaccgtcaccggcatctacaccaatcttctgccggagaacgatgccgtgcgcatcaagcgcggtgtgaccgtatacagcgaacgggaactggacctgctgctggaagatctgggcggttaagtgcagaatgctcaatttttatctacttttactgattatttttattgacatcccgatgtaaaaattatataatgataatagaagtaaagtttcttaaccacctgcagcgatcataaaaggaagtgcttcctcatgtcagaacagatcaccctccattaccagtgccgtctttgcggcaagcagctggaccgcggtatccacctcggcccgcccagccccggcacctgcagcaaagccgccaaggtggacggctttcacgggccgcaccgctgggtcattgtctctttgcccaaaagtgcctgatttttaacgcaaaaaagacctccgggaaaagcgtcccggaggtctttcttagtttcaggcttccatttcttccagcggaacaaggtaggccttgcggcactcctcgtattccagcatgtagtccttggtggggttgtggtgcatgatgctcttgagggtgtgggagtcgtagtcctcgccggcatccatgccgatcaggcgggcagcaacgttggagcagtgatccgagatgcgctctgcattgttcagcacatccaggaacacgacacccgtatcaatggagcacacgccgtccttcaggcgcaggatgtgctggtcgcgcaggcgctccgccatcacatcgatcacttcctccagcggttccacctgagccgccagacgcatatcgctgttttcaaaggcatcgttggtcaggttcaggatgcggttcagcgcattctccagcagctgcagctccttggtggcgctttcactgaaggacgcttccttttcctgcagttcttctgccttttccataatgttcaccgcatagtcgccgatgcgctcgaactcggtaacaaaattcaacagttcggtcacagtgtggctctcatcgtcgcccagctcctgatcggtcatcttgatcagatagttggagattgccacctccatgcggtcgatcaggttttcacgcacccggatggcgctgacggtatcctcgtccatcttcagcagcagcggtgcagccagattcacattgcgggcagcacggcgggacatcttgatcacagcgctcttagcctgctgcagggccacagccgggcttttgaacaggcgctcgtccagcaccggcatgctcagctcctgtgcttcctcggcgctgtccggcacagtgagcagtgccagcttggacagcacaccgctgcacggcaggaacagcagcatggcgcacacgctggaaagggtgtggatgtttgcaatggtgctcttgttcatcacgtcgttccacatggggatgccaacggtgaactgcaccgcatacaccagtgccagcaggatcacgctgccaatgatgttgaagtacagatggatcagtgcagcgcgcttgccgtccttggaggagccgccaatggtgagcagcggcgtaaaggccgtgccgatgtgtgcgcccagaataatggggatggcagagctgaaggtgaccagacccgtgctggacagtgcctgcaggatacccaccgatgccgaggaggactggatgatcaccgtgaccaccacgcccaccagaatgcccagaacgggattcgtcatggtaacgaacagattctggaacacggcgctctcacgcagaggagccacaccggtgtccatcaggctcatgccggtaaacaggatgccgaaacccagcatgatctggccgatgttcttccttttagcgctgcgcaggaacacataaaaaatgcagccaataaacgccaccacgggcgcaaaggtcttgggctggatcagtgtcagccagagactgtcaccggagatatccgccatgcggatcagctggccggtaacagtggtaccaatgtttgcacccataatgacacctaccgactgcgtaagggtcatgatgccggagtttaccagaccgacacaaataacgaccgtgccggccgaggactggatgacacccgtgatgagggtgccaaaaataacgcccttgagcgttgaggaggtcagcttttgcagcacgccctgcattttgccgccggccagtttttccagaccagcgcccataatggacatgccgtacagaaacagcgcaattccacccaacagagaggtaatgtgtgtgatatccataacgatactcctaaaaatgatcttccttttgatccttgtacatctgccctgcccgcacaccgggcctgcttgaaccggcagatgctgcggcctgccgctctgttgcacagaacggcgcacaatgaccgcgcttgaatctattatatcattttttatcctgtcacaacaaggtttattttacaagaaaatcactttttctacacattttttccgtctcttaatgaattcgtgctctttccttttcaattattttacatcaattttacatttgcgccgaagtccctgcctgtttgcgggcgcttactctgccagttcttccattgcttcccgcaccgtatcggccgaaaacaggaacaccccgctgccggtgtatacttccacatggcttccgacataacgcagttcaaaatctttcatccgtgttccctcctgtatctcgttttttgcagcttttcagaacgtttttgttccatggctgtattatcgcacacagcaggtaccataaatcggattttcaacgcattttgcagacaaaaagccgcccggcttcagatgcggaaccgggcggctgaccacctatttatatcgttcaatgcacagcggcatattccgggatgcgctgctcatgggcctgctgctctgtgcgggccttctcatagcagtaacggatgatcgcctgcctgcgcacgatgccaatgaagatgccgcggtcatccacaaccggcacaaagttctggttcatggccgcttcgatcagctgatccatgctggtggtcacggtgacagccttgtagtcgcgcttgtgcgggaaggccgaaatggggacatcctcagccgcttccagatccagaccatggaactttttcagcccccagagaatgtcgccctcggtcagggtgcccacatattttccctgccggttgagcaccggaatggacgcgtagcggttattctcccacttttccagcgtctgccgaagggtgaaatcgtcgtaaacatacatcagatcctgcttgggtgaaaggaaaaacagaatattcatgacaacagctcctaaacattgttccacgcgccgtgcgcaaaaaataacgcagttcatccgcacaagcgggaccctgcgccgcagtccctatccttgtttctattttagcactttttcatagtcggataaagagttatcacccaccttttatatttttttaacagattgtttgctttctttcgtcatactttcgattttgataaaaagcaaccagcgtccgttatgctatcaccttcccggtgcgaagccgcccgaaccatgccgtcaatgcaaaaacctgcgcaaaaagttgatataccagcattttgcgctgtacaagcgcgccccaaagttgtataataatgtgggtgtttctcggcgcagtatgtgtatctgtccgccgctgcgccccagaccttgaatgtgttttatgaaaataacataaaggagcagagcgactatgatcacttcccgtttccctctgggggatgtcagctttacgtccgggtattttgctactctggtaggtgaagcagccaaacagtgttacggtgttgccgcaatggcaccccgtgatatgaccgatgccgtcagaagcatggtgcacggttctgattacccggaaaagggtgtccgtgtcacgcaggaggatggtcgtctggtgatcgaactgcacattgcagtgagctatggcctgaacatttccaccgccgcacgcagcatctctcaccgcgtcaaggacgaggtggagcaggctaccggcctgaaggttgcccgcgttgtggtttcggtagacgatgtgatcgcctgatttttgttggttcatccgaatgcgccgggcttttccggcaagtacaaggagtaaaaaagaatgatttctggtaagattttgcgtgacgccattatctctggcgccaacaacatcaacaatcagcgctcccgcgtggacgagctgaacgttttccctgttcctgatggcgacactggcaccaacatgggcatgaccgtgggtgcttctgtgcgcgagctggaagcattggacgacagctgcaccgtgggtgaggcttccaagaccgctgcttccgccatgctgcgcggcgcacgcggcaactccggtgttatcaccagcctgctgttccgcggcttctccaaggcgctggaaggcaagaaagaagccaccgctgccgacattgtcgaggctctgaagaagggtgtcgagggcgcttataaggccgttatgaagcccaccgagggcaccatcctcacggttgcacgcattgcctctgaggaagctgctgcctgcggtgccgaggatgtgcccgctctgtgggatgtggtgatgaccgccggccagaaggctctggaggacacccccaacctgctgcctgttctgaagaaggccggcgttgtggatgccggcggtcagggcatcatgattatctttgagggcatgggcaaggtgttccatggcgaaggcatcgtggcaggcggcgaggctgctcccaataaggcaaagctctccaccgagaacgccggcaagggcgtgttcaccgacgacctgatgaaggtggaggacatcaagaacggctactgcacccagttcctgatcaacaagtatgagggtgcaagcgccgcaaagatgcgtgcctttgcagaatccaacggcgacagcgtggtgtgcatcgaggatgacgatgtgatcaacctgcatgtgcacaccgctgatcccggcaagatcctgagcgaagccatcaagtatggctacctgaccaacttcaagatcgagaacatgcacgagcagttcctggcccgtcagaagcagggcaagagcctggaaaagcaggcttctgctgagaaggccccttctcagtccagcgagttcgtctacgctgctgtggaccccagccgtgactatggctttgttgccgttgccgccggtgaaggcctgaaggccgtgttcaccgatctggctgcagacgcagtggtctccggtggtcagaccatgaacccagccaccgaggatatcctcgccgccatccagagcgtgcctgcaaagaccgtgttcgtgctgcccaacaacaagaacatcatcatggctgctgagcaggcccagaagctggccgaccgtcaggtggtcgttctgcccacccgcaccgtgcccatgggcattaccgccatgctgaactttgatccctctgtgaacgccgagaccaacactatcaacatgatggctgctgccgacaaggtgtccaccggtctgatcacctatgctgcccgcgacagtgagtacgacggcaagcgcatcaagaagggcgagatcatggctctggagaacggcaagatcgtttccacctccaacgatatcaccaaagctacctaccgtctggcacgcggcatgtgcaagaaggattccagcttcgtcaccatcatctccggctgcgacgtgagcgatgaggatgccgagaaggtcaccgagatcgtaaaggcaaagtgcccgaaccacgttgaggtcagccacatccgcggcggccagcccgtttactattatatgatcagcgtggagtaaacactcccccgttctgctgaatttttaagcacctgcgatttttgccgcgggtgcttttttaaagcaaaagtgcctgcacagctaaagccgtgcaggcacttttgctttcagaatcctcagaagaagcttacctgactgctctccggcaggtcgcccagagcgcccacctgacgcaaacggtccagaatgctgctgccgacaccggaagcctgctgcaactcttccaccgagatatattcttcgccgtggatggtcaccttttccagtgcatcggcggcagcaccgccaagacccttcagcgaagagaaaggcagacgtaccttgccgtcctccaccacatacttggagccgcggctcttgcccagctcaatgggcaaaaactcgtagccgcgcaccagcatctcgttgacgagctgcaggctgaccagcacatcttcgtccttggcgttcttctcttccttcaggcggcgcttgacttcttccatgtgggcgcgggccactgccgcaccgcccacagcggcctcatagtcgatgtcgtcgccgcgtacggtaaagtataccgcatagaactccggtggacggtagatcttgaaccacatcagacgaatggccgacatcaggtaggccacggcatgggccttggggaacatatacttgatcttgcggcagctctcaatgtaccagtccggcacctcgtgctcccgcatggcttcctcccagccatccttgaaaccgcccttggccaccttgcccttacgcacagcctccatgatatcaaaggccatcttgggttccagacccttgcgcaacaggtacagcatgatgctgtcacggcagccaatgacctccgcaatggtgcaggtgccgctgcggatcagctcgtccgcgttgccggtccacacatcagtgccgtgggacaggcccgagatctggatcagttcggagaagttcttggggcgtgcctccaccagcataccgcgcacaaagttggtgcccatttccgggatgccgaaggttccggtctggctgtcgatctgttccggggtcacgcccagcgcttcggggctggtcagcaggctgtacaccttggggtcgttcatggggatgctgtcgatggggataccggtgtactcctcaaaatacttgtagaaggtgggcatatcgtggcccagttcgtccagcttgagcagggtatcgtgcaggtacttgaactcgaagtgggtggtcagcaggccgcctgccacatcgtccgccgggtgctggatggggcagaaatcgtagatctcgtaggtgtccggcacaacgaccatgccgccggggtgctgacccgtggtgcgcttgacgccggtgcagcccagagtcaggcggttctcctccgcatggttcaccgtgcggccgcgctcatccagatattttttgacatagccgtaggcggtcttgtcctgaataccggacacggtgcccgccttgaacacgttggctttgccgaacagctcctcggtatagcggtgcacattggactgatattcgccggaaaagttcaggtcgatatccggctctttatcgccgtagaagccgaggaaggtctcgaagggaatatcgtggccatccaccagcatccgggtgccgcagttggggcagtttttatccggcaggtcaaagccgtcgtccacgctgccgtcggtgatgaactcgctgtgcttgcacttggggcagcgatagtggggcggcaggctgttcacctccgagatgccggagaagtgggccacggccgatgagccgaccgaaccacggctgcccacctgatagccgcccgcgttggaataggccaccagtttgaccgcaatgacgtacagcacggcgtagccatgaccgcagatggagtccagctccttctgcagccgcttttccacaatttcgggcagcgggtcaccgtaatcgcgcttggcgtgttcccacgtagcatcgcgcaattgctgctctgcaccctcgatgctgggcgggtaggtgccgcgcgggatggcacgaacattgttgtcgatcatcgccgcgatcttgcgggggttcttcaccactacctcgtaggctttttccttgggcagatagtagaactgcgccagcatatcctgcgtggtgcggaagaacagcggcggctggttgtcggcatctttaaagccgttgcccgcctgcagcacagcgcggtacgccgcatcctccggctcggtaaagtgcacatcgccggtggcaatgaccggcttgtgcaggtcctcgcccagcttgatgaccgtgcggttgaagtttttgatgtcctcttcgctgtccaccttgccgtcccgcaccatgtaggcgttgttgcccagcggctggatctcaagaatatcgtagtaggacgcgatctttttcagttcttcatagctggtgccatccacgatggctcggtacagctcgccggcttcgcaggcggaagtgagcagcaggccgtcccggtatttgttcaaaaggctccggggcacccggggctttttgaaaaagtagttcacatgggcttcgctgacgatcttgtacagatttttcaggcccatctggttcttgaccagaatgatgaggtggtaatacttctttttcagcacctcgcggttgccgccaaggccggtgttgatctcactgacctttgctacctgcttttctttcaggtcgttcagcatgaccccgaagatgcggcccagcgcggcagaatcctcacaggcacggtgggcctcgtaggcaggcagctccagatgcttgttgatggtgccctgcttgtagttgtgcaggccggggtacatggcctgcgccatggtcagggtgtcgatataggtcggctccagcttgatgccgctgcgcttggcggcggcgcgcaggaaacgcatatcaaaggcgtggacgttgtggcccacaaggatgcggtctcccgcaaatttgaggaaggcttccagtgcttccttttcgccgggagcatccgccaccatttcgttggtgatgccggtcagctcggtgatcttgggggtgatgggcttgccgggcttgacaaaggtatcaaattcctccaccacctcgccgtttttcacgataacggcaccgatctcggtcatatactccacgccggggtcaaggccggtggtctcggtatcaaacacgcagaactccccgtccagcggctgatccttcacaccgtatacacaggggatcatgtcgtccacaaagtaggcttcacagccgtagatcagcttgaagtccgggtctgatttatggatatcgtccgctgccagcatggcttccgggtaaccctgacacacaccgtggtcagtgatggcaacagccggatgtcccatgcggtgggccagcttgacgatgccgccgggatcacagaagccgtccatgctggaaagcttggtgtgcagatgcagctccacacgcttgaccggtgcggtatcctcccgctttttgcgctccacgatgagcacatcgtaggggtagacgatataatcgtgttcgtacttgtcgtaggagcagtcgccgcgcacgatgagggtggtgcccttgccaaggctctcccacttggagcagtcctcaccttcctgcgcgcggatcttcaggttgatggagccctgataatcggtgatggatacggtataaattttgcggaagttgcccttgacctccgagaagaacacatcgccccagatcgtgcacttgccgccctcgccgccaaggtctttcagcggggtgaggttcttgggggtaaacatcttgccgtggaaaatggtgacgggcttatcggtcaggtccagaccatccaccttgatggacggtgctgtgttctttttctcaaacttgaccaccggtggcgcgatcttgcgctccagcttttcttccatctggtgctgctcggcttcgcttacagcgctttgcagcgttatctgcggcgttaccccggtgtgggccgcaatgcgctctgccagcagcttttcaaagtgcatctcctgcaaaaacttggtgccatggcatacgccgatggtgatcttctgtccgatgatgttgatcttgcaccggtccagaaagccgttgatgggcacgccgtcccgcttcatctcttccatcagatcgcgcagggccgtttcgtccagcatggcatagccaaacaggttctggatgcgcagctcaaagccctcataatccggctgcagggatgccagcagccgggcacagagatttttgtccagcggcgcaccgctgcgcagggtaaagatgacctgccgctcctgccgcagcatctgcgcatgctccacaatgacctgcccgaagcaggccgcaaatgccgggtcaaccatgaactgcggccacaggttggatacgagtggtgtcacaaatggtactcctttttatacagcacaaactgccgcacccgttttttgcaggtgtggcagctgtgaaaaaagccaaattacagtttatagatctcatccatgaactgatccaggatgttgtctccggtcagctttttgatgggcttgccgtggatgaacagcaccgcctcgcccttgccgccggcaatgccgatgtctgcttcgcgggcttcaccggggccgttgaccacgcagcccatcacggccaccttgatggattttttgcagccctgcagccgcttttccacctcattggcgatctcggtgcagggatactgggtgcggccgcaggtggggcaggtgatgacctccgggcctgctaccgggaagcccacggcgcgcaggatgttgtagcccgcttccacttccttttccggctctgcggccagcgagacgcggatggtatcgccaatgccttccagcagcattccgccgatgcccatgccgcttttcagcagacccatctggtaggtacccgcctcggtaacacccacatggagcgggtaatccgtgacagcgctgagctggcggtaggcctccatcatgcggggcacattggagttcttgatggaaatgacgatgttgttgaaatcgaatttttccagcaggcgcacatggtacagtgcactctccaccatggcctccggcgtgggtgcgccgtattttgcaaggatgtgcttttccagactgccgccattcacgccgatgcggatgggaatgttcttgcgctgacaggcatccaccacagccttcacccggtcatcgtcgccgatgttgccggggttgatgcggatcttatccacgcccacatctgcgcaggccagagccgccttgtagtcaaaatggatgtctgccacaatggggatgttcaccgcattcttgacggcttcgatgcactttgcatccgccgggctggggcaggtcacgcgcaggatctgacagccagcagcttcgcaccgctttgcctgcgccacattgccctcaatatcctccaccggcacgttgagcatcgtctgcaccgcaacaggattcttgccgccgatggtcacattgccgattttcacttcccgttttaactgccgcataaagtttccctttctgtttttgctcacattgcaccggtcacaagccggatgatatcattataggttgcaaagagcatcaggccaaacagcagtgcaaaggccgcaacggtcagtgtgccctgcagcttttccggcactgcatggccggtaacgccctcaatgatcaaaaataccaccttgccgccatccagtgccgggaagggcagcagattgaacacgcccagattgattgtgatgagggccagcagctccagcagatcctgccagccatagcttgccgcctgaccgatcgctgtcacgatacccaccgggccggacagattgttgatgctctcacgtccgcgcacaaggtctgccagcgagataaacgcgatgcgtccgtagtacagggtgctgttccatgcttcttttaacacattgagcggtgtttttttgatgccgtacaccgtaaagccaagggtcatatgggtctggccgttctcgtcctgccaggtgtcgaactgcacgtccggcagttccaccttttggccgtcccgcttcacggtgaaccgggcgcgataggcttcggtgcgcaccagctcataaaggatgtcgttggccacaaagcagcgcctgccgttcacggcaacgatctcgtcccccgcctgcaggccggtctggccgcagagggcatcgttctcaatggaatagatggtcttgctggtgatggctccttcctgtgctgccacaagaatgaccagcaccacaaagcccagcacgaaattcatgaaggcacctgccaccatcacaagcgcacgctgccataccggtgcctcgttcaaagggatgccggtgcgctgctccggcgggacagggttttcgtcctctgcttcccgttcgtcgcgggccgcttcggcctgctggctctcggggctttcctcgccctccagcgccacatagccgcctaccggcaatgcacgcaggctgtactgggtgcccttgtaaattttcttccacaaagccggccccatgccgatggaaaactcgttgacctgaatgccgcagagctttgccacggtaaagtgcccgaattcatgaatggcgatcacagcgctgaacacgatcagtgcggcgatcagggtgataaaaattgacattgcgtctcctaaagatcaaagatgtgcgcgcacgaactctcgtgccatgcggtcgcactcgtacacatcgctgagggtatacccgccgccaaagctgtcgctgtccacgactgcttccaccagacggccaatatcgaggaagccaattttgtcctcaaggaagagcttgacagcttcctcattggcaccgttggcggcgcatgggccgagacctccctttttgatggcctttttgcaggcggcaaggcagcggaaggtctcgtcgtctgccacatcgaaggtgagcaccttgagtgcagcaaagtccagctccggcacaacgccgggtacgcgctttgggtaggtgagcgcatactggatgggaatgcgcatatccggcacacccagctgggcaatgaccgaattatcgctgaactgcaccgccgaatgcacgatgctctggcgctgcaccacgatctggatcttctccggcggcaggccgaacagccacactgcctcgatcagctccagacccttgttcatcagggtggcagagtcaatggtgatctttgcgcccatgttccagttggggtgcttgagggcatccgccttggtcttaccgcgcagctcctcggtcttcatcccgaagaaggggccgccggatgccgtgagcaggatcttggtcaggctgggggcactctccttatcctgcaggcactggaagatggccgaatgttcactgtccaccggcagcagctttacaccatgctttgccacggcctgtgtgaccagatggccgccggtgacaagactctccttgttggcaagggccagatcatgcccgctttcgatcgcgcacaggctggcaccaaggcctgcaatgcccaccacgctgttcagcaccacatcggtgccgtccagtgcggccagctgcttgagcccttccggccctaccagcagccggggcgcatctgcacgaccggaaagctccgcatctagcctgcgggccgcatccgggtcggtcatgcaaacatagcgcggatgaaactcttcgatctgctgcaggatcttgtctacatggctgtgggcagaaagaccgaacacctcatagccctgtgcacgaatcacatccagactctgggtgccgatggaaccggtagaacccagcagagtgatttttttcgacatcacacgttcccccttttaatagtagaacaccgccgtaatgaccatggtcacaaagggcgcaatgaacatcacactgtcaaagcggtccagaatgccgccgtgccccgggaagatggtgccgtaatccttgatgccgcactggcgcttgaccacgctggcaaacagatcgccataaatgcccagcaccgccgccacgcagcccagcagcgcaatgatcacgtacatggaaacgccgatattggtgcgggtgaaggcttccatccggtttgccgccactgagtacaccagtgtgatgatcacaccaaacaccatggtgcccagaacaccgccaatggcaccttccacggtctttttggggctgaccaccgggcagagcttgtgcttgccaaaggcacggcctgcaaagtaggcacaggtatcgccgccccaggcaaagcagaggatgagcaagataaagaacaccgcatcgtagccgtactgctccaccggcagcagctccttgagccggataaaggaatagaagcagaagatcacgataccggagaacatcagcaggccgctggccttctgatagctgatggtgccattgcgcaccaccagatagatggcataaaaggtgaccagcagaaaggacatcggcatcaccagccgccgcatgacctgatagttgctcgtcatgaccagcagtgtatacggcaccagaaccgcatacatcagccagtccttcttttcaaagccgagggcactgtagatctcgtgaacggcgatcagcgtaatggccgcgatgaccagattaaagatcagagtgttgaaggtgaacatcacgccgatcagtacgatgatgcccacgatcgcagtaataacacgtgttttcatagattggatctccttttcaccggtcggtgccgcacccctctggattaagtttggctccggcaaagccgccgggccgtccggtccctgcaccgtgtgcaggaggtcttgggttttacagtccgccaaaccggcgggaacgatgattgaactcctcaatggcagcgtccagatcgctgcgggtgaaatccggccacagaacgtccatttctaccagctccgagtaagctgcctgccagagcatgaagttggacagccgcttttctccgctgggacgcaggataaaatccgggtccttctggccagcggtatacatggcatcgctgagcagctgttccgtgatctcttcgggctttatctcccctgccgccgcctttgccgccagctgctgcgccgcccgcacgatctccgggcggccgccgtagttgatggcaatgttcagggtcatgccggtcttgaccgaagaatctgcttccagcttgttcatcagctgctgcagtttttcatccagcaccgtgcggtcgcccatgaacttgatgcggatattgcggttcttgtagtcaaagcccttcagcagatattcgccgaacagccgcataatggcgttgacctcttccagcggacgcttccagttctcggtggaaaacgcatagaagtacaccgacgaaacgcccagctcatcgcagtaatctgcgatatcgctgaacacctctgcgcctcttttgtgcccggcagtgcggggcaggccgcggttctttgcccagcggccgttgccgtccatgatgatgccgatggaaaggccctcggcaaattctttaggatgcgccattgtttcctcccggcagcaacgccgccttcaacaaaagtgccgcgcactcttcttcagcgcacggcacctccagtctattgcatctgcgcagatcagacagacatgatctccttctgcttttcttccactgcagcatcgatgttcttgatatacttgtcggtcagcttctggacatcctcttccatggtcttctggctgtcctcggtcagctcgccggccttcttcatggccttggccttatccatagcctcgcggcggatgttgcgcactgccaccttagcctcctcgcccagcttggaaacttcctttgccagctgcttgcggcgctcctcggtgggagccgggaagttcaggcggatggtagagccgtcatcaatgggagtgatgcccacatcgctggccatgatggccttgctgatggggcgcagcagagtacggtcccacggggtaatggtcagggtgcgtgcttcggccacagccacggatgccacctgctggatgggagtgggggcaccataataatccacgctgaccttatccagcacagcgggatttgcgcggcctgcgcgcacagcgcccagttcgcggcccagatgttcgaccgagctcttcatcttgtcttcgtaaaccttggtgttgctgctcattgcggtagtctcctgttcctttttatcttggggctgcgctgcaatgcgtctgccctataatgtatgtcggctgcaggcgtttcagccctcgtaaaccagtgtgcccacattctcgccctgcacggcacgggcaatgttgtccggatcggccagatcgaacacgaggatgggcagcttgttgtcgcggcacagagtggcagcagtgccgtccatgacagccagctggtcttccagcaccttggtaaaggtgagggtatcatacttctttgcgtcggcgtacttgtggggatccttatcgtaaacgccatccaccatagtagccttgaacatcacatcggcgctcacttccacagcgcgcagagcggttgccgtatccgtggagaagaacgggttgccggtgccgccgccgaacacggcgatcttgccctcatccatggcgcgcagggcatccttgcgggtaaagggctgtgccacctgcggcatggtgatggaggtgaacacctcagtgggcacacccagctgttccagcttgtcggagacagccaatgcgttcatcacggttgccagcataccgatcttatcggccagtgtgcgctccatcttgccgctggaacggccgcgccagaagttgccgccgcccacaacaatgccgatctgcacgccgagatcgtgtgctttcttcacgccgccgcagatcgcgtccatggtgggttcatcaaaacccatgcccttttcgccgcccagtgcttcgccgctgattttcagaaggatacgctgatatttcaatgccataatccaaacaccacctgtttttatcttccgtcagggcataggcataccctgacattttttactatagcttattttacaataaaacatccataaagtaaacaggaaatctgcgcggaaatccggaagcttttatgaacggctgcgcagaccgcgcagcagctgcttcattccgggcggaatgcggcggctttccaccgctttctggatggctttgttgtgggtccacagatccagccgcttttctgtgagccacggcagcgcggcatccggctgctttgccagtgctgtggcaaaataccatgcccgcatcatattgatatagtattccgtgctgcgcacatcggccacccattccagatattccggccggaatgcatcatccagataatagcgcatcagcatctccatgccatagcgcacggtgtacacctcgcccgaatccagccagcggcgaatgggcaccagcagttccttcttgtactttgcaaacactttggggcaaaagcagtcacaggtggcccagttgttgatgtagggcaggaacgcttccgtttcagccagcgccctgtcgtagtcccggatgagctcgatcagaaacgcgtggaggttgttctcttcgtagtatccatgcggcagggcctgtaaaaacacttctgcttgcgctgtgcctgcgagctgttttgccaacttgcgcagagccggaacgcgcacgccgatcaccgtttccggcggcacggtgggcatcaacgcactgtgaaaggtgcggtatgcttcatcccgcagggcaaacagctgcgcacgaatgatctctgcttccggctccatcctctctccctccgttcttttctattgtagcagagccgtatggaaaagcaaggccgttccggcattcttttccggtgctttaaggaacacacaaaaattgggctggacatttgtgccggaacatgctataatatcgttcgtaaatgcgggcatcgtacatcggctagtatatcagccttccaagctgaggaggtgggttcgattcccattgcccgctccatgcaaaaaagcgccgtggccttttgggccacggcgcttttgttttgctttatcggtcccacttatcgcacagggcattgatctggtcggcaaacttggcaaggtctttgtttgcgccgccctcgttgtgctcgatgacccgcagcaggcgcttgccggcgctgaccagccgctggaacacactggcagcacggctctggccttcattagccttgtgctcaatgcggatgcgcatgccctcctgcaggcatacggctccctcggctccgatggcccactgtgcgccgttgtagggtgcgcaggcagtgaagccctgttccgtcaaggtctgcacaaagtggtcctcggtctcatcttcgccgtgcatcacgaacacacgctttggtttctgctcaaaggagttcacccaccgcagcagaccttctctgtccgcatggccggacatgccggtgagctggcacagttctgcctgcacctcaataggttcaccgaacagttttaccgtcgtggcgccttccagcagggtgcggcccagcgtgcccaccgcctgatagcccacgaacagaatggtgcactccggccgccacagattgtgcttgaggtggtggcggatgcggcctgcctcgcacataccgctggccgagaggatgacctttggcacgcggtctgcattgatcatgcgggattcatcactggtcaccgtgacgcgcagccccgggaaggtgatcggatcaatgcctttttccagcagagcgcgggtgtccgcatcaaagcagtccgggtcggtatctttaaagatgcgggtcgcctcgatggcaagcgggctgtcaatgtacaccgggaagttgccgtgtccctttacaaggcccttttccttgatctcacggataaagtagagcatctcctgcgtgcggcccaccgcaaagctgggaataaccacattgccgccccggtcaaaggtgcgctgcaggatcttcgtcagttcgctcacatagtccggcttcgggccgtggctgcggtcgccataggtagattccataaaggcgtagtccgcctctttgatgtaagcaggatccttgatgatgggctgatccagattgccgatatcaccggagaataccagcttggtcgtggtctcaccctcggtgatccaaagctctatgctggccgagccaagcagatggcccacatccacaaagcgggcttcaatgcccggtgcaagctggaagcgctgctcataggccttgcccacaaacagcttcatggctgcttcagcatcctgcacagtatacatcggttccaccggttctgcgccggagcgctggcccttgcggtttttccactccgcttcaaattcctgaatatgggccgagtcccgcagcatgatgccgcacagctccaccgtggggttcgtggcatagatcttgccgcggaagccgttgcgcaccagcagcggcagcataccggtatggtcgatgtgtgcatgggtggccagcacccagtcgatctcgccgggtgccaccgggatgggctggttctcgtatacgtccttgccctgctccatgccgcagtcgatcaaaaagcgctgcccagccgcttcgatcaaagtgcagctgccggtgacctcatggttcgcgcccagaaatgtgatcttcataaaaacacctccggctttatttcttctgtatccttagtatagcatattctaaaggtacacgccgcacaaatcgcatggcttttctcaggcattttgccgaaaggttgaaaaattttttatacaatcttgacaaaccacccctttctgttataaacttaaacttgtatgacgttcgttcgtattttatgagttttaataatagagaggttgaattttatggttcgtaacgatttgcgcaacgttgccattatcgctcacgttgaccacggcaagaccaccctggtggacgcaatgctgcgtcagagcggcgcattccgcgataatcaggtcgtggctgagcgcgtcatggacagcggcgatatcgagcgtgagcgcggcattaccattctggccaagaactgctcctgcacctacaagggtgtcaagatcaacattgtcgatactccgggccatgccgacttcggcggcgaggtggagcgcgtgctgaagatggtcaacggcgttctgctgctggtggatgccgccgagggctgcatgccccagacccgttttgtgctgcagaaggctctgcagcagaacctgagtctggtggtggccatcaacaagatcgaccgccccgatgcccgcatcaaggaagtcatcgacgaagttctgtacctgctgatggatctgggcgctaccgatgagcagctggactgccccatgctgttctgctgcggccgtgatggcaccgcaagcctggacccggatgtgcccggcaccgacctgatccctctgttcgatactctgctgagcaccatcaagccgcctgagggcgaccccgaggctcccttccagatgctggtgtcctctgtggactataacgacttcgtgggccgcatcggcattggccgcatccagaacggcgttgccaaggtgggcgaggaagttgtcgtctgtgactggcacaatcaggatctgaagatgcgcggtcgtctgaccaagctgtacgacttccaggccaatggccgtcagccctgcgataacatcaccgccggcgatatcgtggccttctccggcctgcccgatgtgaccatcggcaataccctgtgcagcccctccaatgtggagccgctgcccttcgtgaagatcaacgaccccaccgtggaaatgaccttctccgtcaacgacagcccgctggccggccgcgagggcaagtacgtcaccagccgccagatccgtgaccgtctgcagaaggaactgctgaaggatgtcgctttgaaggtggaggattccgccaccaccgattccttccgcgttatgggccgtggtgagatgcacctgtccatcctgatcgagaccatgcgccgtgaaggttatgagctgcaggtctctcccccgcacgttctgaccaaggtcatcgacggcaagacctatgagcctatggagcatgtcgtcatcgatgtgcccacccagtatcagggcgctgtcatgaccggtctgggccagcgcaaggctatcctgcagcagatggaatctctgggcaccgaccgtgtgcgtctggagttccgtatgcccagccgcggtctgttcggctaccgcaaccagttcctgaccgatacccacggcgaaggcatcatcaaccagatcttcgacggttacgatgtctgggctggcatgattgccaaccgctccaccggttctctggtcagctttgagaccggcgaggctgtcacctacggtctgttcaatgctcagcagcgcggcacccttctggtgggcgctggtgagaaggtctacgagggcatggtcattggctacaccgcttccggcgaggacgtggatgtcaacgtctgcaagaccaagcacctgaccaacacccgtgcatccggctccgatgatgctctgcgcctgatccccattagcaagctcagcctggaaggctgcctggaattccttgcacaggacgagctgctggaggtcactcctgaaaatctgcgcatccgcaagcagatcctgaaccacgagcagcgcatgaaggccaagagcaaactgaaataagcctttccttcttttataatatgtactttaccgtcctgcagcgtttcaaaacactgcaggacggttttattttgccaaaaatgattcattttttaaaaaaaggcttgcaaaaggcattcttatgcggtataatatctctcgcagtcacaaatgtgatctgcctctttagctcagtcggttagagcacctgactgttaatcagggtgtcgcctgttcgagtcaggcaagaggcgccagaagaaaaggcaatgttccacagaacattgccttttttgtttgtcccatactacaccctttttctgtacagccatgcagtcgtgtttctcctctgtttttgggcttctctgtcccaaaaacacagtattcatgcgaaaaaagcatcaagcataatgatttcttaaaatttgactacttgaagaagatgtcacattgtggtatactgcttataagctttgggaatttgtatctgtttttccaaagtccggcacacagatcaaagggtaggtgctcccttcttttgatagcagccgaccggtgttttgtcatggttctccgcaggacaggacaaagcaccggtctctgtgctgttgtttcaggctccggctcttttcacgttgtcagatctgcggcaggccgcttcttcaaaacgcctgccgctgtttgaataaatttgtatatgatcaaaggaagcatctatgcgttatacctatgtccggcagcacgacaccactgactgtgcggctgcctgcctcgcaatggtgtgcctccattacaaaaaggaagttaccatcacccgcctgcgcgatatgatgggtaccgacctgaaaggcacgaaccttgttggtttgcagaaagccgctaatgagttgggtttcaccactgcagcggttcgcgtagaccgtgaaaatttcctcagcgatttctcgctgccctgcattgcgcaggtcatcaccgatcagggtctggcccactttgtggtcgtcttcaaaaagaccaccattaaagatgacggtgagcgtcgtcggcacatgctgaaagaagccgaagccgtcaaggaagatgagaagaacggcaaaaaacacaagtgcaaggattatgtcgtgatcggcgaccccggcagtgagctgaaaaagatctctctggatgagttctacaagaactttaccggtgttctgctgctgatgaaccccacctcggagttcaagggtggtaagatcgaaaagggcggcatgttcaagcgttacgtcgacctgttgctgccccagaaaaagctctttgcctatgcgatcctgagttctctgattgttacgatcctgggcattgcctcctccatgttcaacaagatcctgatggacgaggtcttgccatatggcctagacaatctgctggtcacgctgatccttgtgttcagcatggtcagcatcaccaatacgctggtgggctttgtccggcagtgggttctgatccacctatccatcaagatcgatattccgctgatgctgggttacttcgggcatatcttccgtctgcccatgaagttctttgccacccgcaagactggtgatatcaccacccgttattcggatgcaaacaccatcaaatccatcttcaccagcattgcgctgagcctgatcatggatatctcgatggccattattaccggtatcatcctgttccgcatgaatgcgatgctcttctcgatctcgctgttcatggctctggtcagcattctgctggtgctgatctacaagcagccttacaaaaagatcaacgaagagaccatggtgcagtccgctgcactgaacagccagatgatcgaaagcctgcgcggcattgagacggtcaagtgcaacgccaacgaggataccgaaatggagaacctcgagcgtgagtacatcaagagcctgaagatcagcctgcgctccagcaagatcagcaccacgcagggcctgatctcctccttcatttccaccggtttcagcatgctgaccacctatgtgggtatcagtcaggttctgaagggtgagatgacactgggcggattcatggccttcagcacgctgtcctcttactttacttccccgctgagcaacctgatcggtctgcagatgcagattcaggaggccagcatttccatgaagcgtctgggcgagatcatggattatccctccgagacggtcggcgacgaagaccgcaccgatctggacaaggtggagggcgatatcgagttcaaggatgtcactttccgttatggcaaccgtgcccctgcactggatcacatcagctttaccattccggccggtaaaaaggtcgcgctggtgggcagcagcggcagcggcaaatccacgatcaccaagcttctgctcaagtattatgaaccggaagatggcgagatcgacttgaacggtgtgaatctggctgaatacaccaatgactctgtccgccgcgcaatttcttatgtgccgcagaacgttgagctgttcagcaagaccatttatgataacatccgcgtttcccgtatggacgctacgatggacgaagttaaggaagctgccaagaaggcagatgctcacgactttatccgtcatctgcccctgcagtataacacctatctggaagaagcaggcaacggcctgtccggcggtgaaaagcagcgcattgcgctggcacgcgctttcctgaaagattccaacctctacattctggatgaatccaccagtaatctggactttgctacggaaaatctgatcttcaacatgatctacgatcagcttgcagatcgttccatgctgatcgtagctcaccgcctgtccaccgttcgtgactgtgatctgatccttgtgatggaccacggcaagatcgtggaacgcggcacgcacgatgagctgcttgccaaggaaggcaagtactacgagctgtggaacatgcagcagggtatctaccgcagcaaaaaggcagagcccaagcagtctgtcatgcaggccgtggtggaagaggatgacgacggtgagtcgatcacctattgatgtgttgcagccgggtgcgtacccggttacatatgaaagggagtcattcatgatggatagcttgatttgacatagttttactgtgtcagataaaaaagagctagaaagactttctgtttagtagaagtagatggtgttatcctgaacaggccccgcctgctcaggtaactatgcctcactatggtgtgcccggaggcaaaatgcctccgggcacattttatttgcaagatccctattacttttataagtagtaggcgatcgggagcggagaggaagctgctctctgcagcggttttctcccctttctcgattgcctattactgcctcttctgaggtaaatctgaaaaggaaccgaggtattcaacatgaaagagatcaaagtagccgagaacaagaccctgaagctcaccaatgtgctctcccgtgagattcatccggaagagatggccagtctgcccgtggtgctgacccagatgcacaactttatcaagagcaacaacgcacagcccattggccccattgtgcaggccatggtggttggtgaggaccgtcagatgcacctgtacatgatgcagcaggctacccagttcatcggccagatggagcaggactaccatatggatgctattctgcgcgtgaagaactgcctgtatgcccactacaccggccccatgcccgaaagtcagctggcttcctacaagctgcaggtccacgcttttgagaatgagcagaaactgaccggcacctcctataccatctatgtcaatcaggatgaggatgatgccgtggtcgatgtctttatggagaccaagtaattatgacgattaaagttcagaacctttcggatctgcaggaccgccgcatcatgatggaaaaaaagctgccgccttatggctacgcttttgtcattctggtgggcatcttcatgctgtttctggtggtgtggagcacccataccaaccgcatttatgtcagccagaacgcaggcaccgtgcaggccagcaataaaacctatatcatgtccagttattccggctccattaccgagatgtatatttcggagggcagctatgtgaacgagggcgacctcgtggcccacatcaagagcacggatatcgatatgcagcaggataacttggaaagccagctcaagatctaccagacccagctggaccagtacaacaagctgctgcagtgcgtgcaggatgataccaactacttcagcgagacaaaccccgaagatcagccctactactatcagtacgagacctacaagagccaggtctctcagaagacctttgatgccacggcctatcaggctgccggttactccgatgctcagatcaagaccatgatggagcagagccagagcgaagtagaagctctgtactactccaccatgcagtccatctcccagagcattaccagcgcacagagcaacgtggacaacgttcaggctcagctcgatgccttgaacaccggtgccaacgattactacatctacgcccccacctccggtgtgatccacatggatactccttacaaagagggcatggtgctgagcgcaggctccccgctggccactgttgccagcgagaacgacgatctggagatcgttgccatggtcactgtgaatgaccgcccgctgcttcatgtgggtgacccgtgcaagatcgccattaccggcctttcggagtattcctatggcaccctgaccggcactgtaacggccattgacagtgacgtgacggccagctccaacgcttcctactataagatgaccattaagcccgatgccacttatgtggtgagccgcagcggcgacaaggtggatctttccaacggcatgagcgttactgcccgcgtggagtacgatcaggtcacctatttcgagtacgcaatggaagccctgggcgttctgttccgctaaaccggagctgtgctgactgccagccgccgttatatcacccaaagaggtacacttactatgaaatcaaccgcaaaaaaactggccgtctgtgcggcagcgctctgcctgctggcctgcggcacagctgtgtctgcggccgcagcaagccctgtctccggccttgccctgagcggcgttgccatgccgtgggatcaggacgtgcctgccgaaagcattgaggccggcagctataccgccaacatgctgctgggttcctctcagcagctgtctcctgtggtgcgtccgcgcaactctaccgactcggttgtctttatctcggacgatacttccattctgaccgtgagcaactccggtgtcgtgcaggctgtgggcgtaggcaccacccgcatcaccgctgccgcaggcaaccagatctgtgcctacaccatcgttgtctccatggattcttccatgatcgttaccgagatggacctttccctttcctccaacaccatctatgttggcaactcggtctcggcacagctgcaggtgcggcctacttcggcttccaactatgccaccgtcgccctgacctcttccaatgagaaggtcgccacggtgaacaatttcggccgtgttaccggcattgcccccggcaccgccaccattaccgctacctgcggttcggtgactgctaccaccaatgtcacggtcatgagtattcccaactccagcaccggcaccgccagcgctggttcttccaacagcggtcaggtcgtcacggtgaatccttcctacgttgtgctcaagcccggtgccacccgcaccctgaccgccagtgtcaagccttcttccgcttcccagaagttcacctataagtccgccaacagcaacattgccacggtcagccccagcggcgtgatcacggctgtgggcaccggcgctacttccattaccgtttccaacggcactgcatccgccatggtcacggtcatcgtcaaccgttcggctgcatcttcttccgataattcttcggacagcaactccaccgaaccggataacgatgctcccatcgagatcgatcccgttgtgcaggccattcaggacagtgaggacaacgagatcgttttcacacaggccgaggtgcctaccgtgaccggtgatatcctcaatgcgctgcgcaccaccggcaagaccctgtgcgtggtgggcgatggctacaccatgcagattgcaggcagcggtgtcaagagcaccaccagtgagctggacaccatgctcaccctgactgagtccgatcagggcatcgagtttgagctggacaaaggcaaggctcttccctgctcggtgcgcatcgatctggatgtgagcacctatacccgcctgtatctgtacaacgccgtctccaacaagtggcagtacctgaacagctacaccgacggcatcatcactgccgatactgcaggccgttatctgctgaccaaccagaacctgaaatttgccaatatcaactggaccttcttcattgccggtggtgttgtagtggttctgatcggcattgcatatgttgtgctgaaaaagcgctactggttctggtaattttcaaaaccactctttcatgaaacagtaagaccctctctgagtgtgatatgctccccctagagtagacagagtaaaacaaaaactctgcgtactctgggggtatttttatgtcaggaaagaacaatcacttttgcacaaaaaattcgccgtctccttgtggaaacggcgaacaaaaacttatattatttctctatctacttgacggagcgcacttcaatggaacgcctgggctttgtttgcattatgatgtctgccttcgttacttttcaatgggctgcgagggcttccagtccttgtagttctcgtagcggctctcgcggatcttggtgtgggaccagatctcatccgccgtgggctgccagttggctgcatagttcttgcacttctcgcacaggtgctccacgctctccggcgactgcaggtcggtgctgtgggcaccggtctcgtgcaccatcttctgcagcagttcggggttttccagcatcgggcagggacgcagatggttcttgttgaagggctggccgttgtgataagccatgaacagcggactgtgcagaatttccagaatgctctggtcgtggatattggcattggagtagtggatgaacacgcacggctctgcgtcaccggcagagttgatgtggaagtagttgcgtccgccggcaatgcagccgcccacgaactcgccatcgttctggaaatccatcgggtagaacgggatatcgcactcttccgagcgcagatagcggatgcggtcgatcatatatttgcgctgctccggggtgggcatcagttcgggcgctgcgtcgttgcccacgggcatgtagtggaagtagaagccgaagtgtgcacccttctcacacaggaaacgcatgaactcatcgttggtgacagcttcgatgttatcacgggtatagcagatggacgtgccgaacacgatgccgtgctccttgagcagatccatagcatgcataacagcggcatagtgcccctcaccgcggcgggcatcgttggtctccggggtgccctcgatggacagcatgaaggcaatgttgcccagacgcaccacctctttgcagaacggctcatcgatgagggtggagttggtgtagatggcaaactgcacatcgttgtgcttctcggccagcttgaggatatcagccttacgcaccagcggctcaccgccggtcagcatgtacaggtacacgcccagctccttgccctcggtaacgatcttgtccatatcctcaaagctgaggttattcttgtgaccgtattcaccggcccagcagcccacgcagtgcatattgcaggcggaagtggggtcgaacaggatcagccaggggatgttgcactgatacttcacgcggttctcgcggatggtcttggtgccgcggaagaaagcctcgtagcccagattcagcgccatggtgcgggccacgttggggttggtctgatccagcacacagttgatgagcttggaccacttgctgtcggggtcggtcagggtctgtctggcgtgctcgtaggcttcatcgctgaacgaactgccatagaactgctttgcgacatccaccagctgtcccacggttttctgacgatctttatcggcatgagaaagcaccacgtccaccattttaccaacggcagcacgctgcattttatgagtcaggctctcaacagaagtattcattatccttttcctccaaacggtatttttcggaaatctctttttctatttctatgccattactctaccactctatcccacaagttgccataaacagaaaaagcgccgtgatagaaaacccatcacggcgcggattatgataaaattttgtcgttcttccggttcaaccgtcctgttccagatggatcttattgctggcaaggcggcataacgcgcggcgcagatcgccctgcagcatccgtcccatacgttctaccatcacagcgggctcggtcttcatatcccggcggatccattccagcaccacgcccaccagcgcatatttgtaaaaatccaccacaaactgcttgtcatcgtcctgcacggtgatgtcgcggcattcgcgatccgcaaattccttcagcatggagtccagaagtttgtacagatactgctccacctgttcacgacccacagagcggtatacgttcagtaccagtgctttgttatcccggatctggtgcaggatgtccagaaatgcttcggtccatgtatcaaagctctggcggccttccatcgtcttggccgcatcttccatcaggatccagtccaccagatcgtaaatatccttaaagtggtagtagaaggtcatgcggttcacgccgcagtcctcggtgatatcgttgattgtgattttattgaggggcttttccttcagcagctttttcagcgatgcttccagtgcccgcttcgttgtttgtgacacaaaaaccttcctttcccaaccgtagaaatttttcccgctgcgtacggtgattggcagcttcgtacattataataccgcaaaagccgtcccgattgcaagcattgattctgtccattttgtaaacaaagaacgacttcctgcgttttcactccggcagtttctcgtttcaaaaaccgtttctcagccctcccaaaccccttccggcggtgcgcaatgcctgcaaaagcggcttcttccggcaaaaaagcggaaaaggcccttgattttatattcctctacgcttagaatgggagcagacggctgtgattgaagtgccgttttgagggagggtacaaactatgatggataccattggttttctgggctgcggcaacatgggtggagccatcgcccgtgccgtttgcaaagctgttgaccctaagaaagtttttctggcaaaccgcactgtggccaaggcacaggcactggccaaagaactgggctgcaaaacagccaccaatgccgaggtggccggtgactgcgacctgatctttctggcggtaaagccccagatgatggaagctctgctccagccgctcaagttcacctttgacgagcgccccagccgttttgtgctgtgcagcatggcagcgggcctttcgatcgcccgtattcaggagatggccggtgaggactttcctgtgatccgcatcatgcccaacaccccggcttcggtgggcgagggtatgatccagtactgttccagcaatgtcaccgctgaggaagaagaagccttcctcaggatcatggctcctgcgggccgtctggacgccgtgccggaaagtctgatcgatgccgccagctgcgtttccggctgcggcccggcatgggtgtaccagtttattgaggctctggctgatggcggcgtggcctgcggcctgccccgcgccaaagcgcaggaatatgccgcgcagatggttctgggcagcgcaaagctggtgctggaaagcggaaagcatcccggcgaactcaaggatgctgtgtgcagccccggcggcagcaccattcagggcgtgcgcgtgctggaagagcacggcctgcgcggtgcggtgatggatgccgtgatcgcctcgtacaataagacaaaggaaatgggaaagggttaaggatatcatgcgcatcgttgtaaaagtaggcacttctactctggcatacgccaccggacggctgaacatccgccacacggaacagctggtcaaggtgctcagcgacctgaaaaacgagggccatgaggtcattctggtgtcctccggtgccattggcatgggcgtgggcaagctctcactgccaacccgcccaaaggacaccaccaccaagcaggcctgcgccgctgtgggccagtgtgagctgatgtacacctacgaccggctgttcaacgcctacaatcacaccgtggcgcagatcctgctcaccggcgtggacgtggagcacaccgaacgccgcgtgaactttcagaacaccctgtcccgcctgctggagctgggtgccctgcccatcatcaacgaaaacgacaccgttgccaccgatgagatcacctccattggcgacaacgacacgctggcggccatcgtggcctgctgcgccaaggctgacctgttggtgctgctgagtgacatcgacggcctgtacaccgccaatccccacacccacacggacgcaaagctcatcccgctggtggaggagatcacccccgaggtgatggctctggccgatggtgccggttcggcccttggcaccggcggcatggccaccaagctgcgcgctgcccgcatggtaacgggcagcggtgccgatatggtcattgccaacggcgcacacccggagcttttgtacgacattgccgcaggcagatccgcaggcacccgctttgcggcccgcaaggaggactgaacacatgaccacacaggaaattctggaagccgcccgcagcgccaaaagtgcccttgcgctggccgataacaccgcccgcaacgcggccctgctgggcatggcagatgcgctgtgcagcgtagacgatcaggcggccatccttgccgccaacgctgaggacatggctgcggccaaggggcacatcagcgatgtgatgctggatcgtctggccttgaccgcaccgcgcattgaagccatggcgcagggcatccgggaggtatcttccctgcccgacccggtgggccgggtgctgaaccgggtggagcgccccaacgggcttgtcattgaaaagacggctgtgcccatgggcgtgatcgccattatctacgagagccgccccaatgtgaccagcgatgccgctgcccttgccatcaagagcggcaacgcctgcatcctgcgctgcggcaaggaggcttggcgcagtgccaacgccatcgtcaccgttctgcggcagggcctgaaaaaggccggtctgcccgagacagcggtctgcctgatcgaggacaccacccacgcttctgccaatgctctgatgaccgctgtaggctatgtggatctgctgattccgcgcggcggtgccgggctgatccgtgcctgcgttcagaacgccaaggtcccctgcatccagaccggcaccggcatctgccatgtgtacgtagacgatacagccgatctggacaaagctctggacatcatcgagaacgccaaggccagccgccccagcgtctgcaacgccgaggaggtgtgccttgtgcactctgccattgccggggagtttcttccccgtctggcccagcggcttggcccggaccgcattgcaaagggtctgcatccggtagagcttcgtcttgataagcgcgccgccgccataatcgctggcacgcctgccggcgaaaaagactttgacaccgaatttctggactacatcctcgcggtcaaggtcgtggacagcgtagaggaggccatcgggcatattgctgagcactccaccggccacagcgaggccatcctgacccagacacaggcccatgccgacctgttcactgccgcagtggacagcgccgccgtgtatgtgaactgttccacccgctttacggatggcggtgaattcggccttgggtgtgaaatgggcatttccacccagaaactccacgcccgcggccccatgggactggccgagctgtgcagctacaagtatatcatccacggcaatggtcagatccgctaaagcccgctgaacccacctttccagtgcggaaatcgggagtgagcgttttctccataatattcataatttagaaacgaaactgaaaagttttttccgaaacaggctggtgcgatttgcgccagcctgtatttttgttttattcccatgaaatgttctttcagtaaagacaaaagctgaattatgttttcaatctgcctttcctgttcgctcactgatatggatgattgtatcccagttttctgcacttctcacaaagatatagtcttactttctccattttgttttgtaaaaagtacaagaacccccttgacagcccctattttgatgcggtaaaactatattggaaaacttgataacgatttcacttcatttcactttccaatgagaaagttgttcgtcacacacaacactatacttggaacaaaggagagagcaatatgacgatcgccattcttgcacacgattcccgcaaagagcttgcactgcagttctgcactgcttacagcgccattttgtccaaaaacacagtcattgctaccggcaccaccggacggatgctggcgcagactaccggcctgcccgtgcactgttatctctccgggcgcttgggcggtgtgcagcagatcacttcccgcattgcgtgcgacgaagtggatctggtgttgttcttccgtgacccgctgaaagcggatgccgccagcatcaccgagcagaatctgctccgcctgtgcgatatgcacagcgtacccattgccaccaacattgccaccgccgaggtcttgctgcgcggtatggatcagggcgacctggactaccgcgaggggatgcatcccgctcttgtggagccaatgcccaccgtgcagcgccacgccgtgtgatgaatcgtgtatagagtatcgggaaagagacagcgccgcaggaaacttcctgcggcgctgttgttttttgttttgcttttatttcagtaaagcctgcagcttttccagccggcggacggcttcgtccagcacatcggtgccgcgggcaaagtgcatccggatcagatggttcaccggctcccggaagaagctggagccaggcacagcggccacgcccacttcccggatcatccactcacagaactgcaggtcggtccagcccttgaactggggcagcgccagaaaatcggaaatatcgatcatcacaaaataggttccctgcggaacattgtgcttcagccccacacggtccagcccggccaaaaaatgatcgcgcttttcggtgtaaagggcctgcagctcttcgtaatagctggcgggcatctccaaaccggccacagcggcctcctgcaggggtgcagccgcacccacagtgagaaagtcgtgcaccttgcgcgcaccctcaatgacctctgcgggtccgatcagatagcccagacgccagcccgtgatggagtaagtcttggagagcgagttgcaggtgatggtgtgctcaaacatgccgggcaggcttgccatgcagatatgctctgcgggcgcatagatgatatgctcgtacacctcatccgtcaccacaaaggcatcgtactggatggccagctttgcaatggcttccagctcgtcgcggcggaacaccttgccgcagggattggaggggttgcacaggatcagcgccttggcaccctcggcaaagcccttttcgatcaggctgatgtcaaactcataggtgggcggcaccagcgggatatagatgggttccgcgcccgaaagaatggcatcggcaccgtagttctcgtagaacggtgagaagatcatcaccttgtcgccggggttgcagatggtcatcatggcggccatcatggcctcagtgccgccgcaggtcacgcagatctcggtgttggggtctacttcgtggtgcagggcagggctggtcttttttgccagcgcctcgcggaagttttgcgcgccaaaggtcacagcgtactggtgcgggcctttgtaagccgtttcggccagagcgtccagcaactgcttcggcgggtcaaaatccgggaagccctgcgaaaggttgatggagtcgtactgattgttgatgcgggtcatgcggcggataacagaatccgtgaaggtacccacacggtcacttaaaacaggcatgcgctctccccttttcagcccttaaaataagccttctggatggccagcagcacgcctgcacggctggcagcaaagttcagaccgccctgcaggtagcaggtgtacggctcacgcagcgggccgtcgcaggaaagctcgatggtgctgccctgtgtaaagctgccgcttgccatgaccacctcgtcggtatagcccggctccggagaaggttccggggcggcatagctgtccacgggacttgcagcctgaataccctgacagaagccgatgagcgcatccgcagtgcctgcatcaaagcaggtgacgatatcgttgtggtcgtcgcagtagcgcggcactggattcttgcccagcagctccagcatacactgggcgtaaatggcggtcttgatggcctcgcacaccacgccgggcgcgtagtagaagcccagatacatatcacggggcgtttccagcgtgcagcccagatccttgccgagaccgggcgcattcaggcggtaagcgcacagctccacaaggtctttgcggcccgcaatgtagccgccggtgggagcgatgccgccgccggggttcttgatcaggctgcccaccacaaggtctgcgcccatctgacagggttcctgcgtctgggtgaactcgccgtagcagttatccacaaaaataatgatgtccgggtttgcggcacgggcggtatccgcaatttttcggatcgtttccagatcaaaggcattgcgctgcagatagccgcggctgcgctggatgtggcacacctttgcaccgggggccttttgggcgatcaggtcataatccggggtgaagtcggctttcagcggagcttcatcgtaccggatgccgtaatccatcagggtgccggtgcccctgcccttgccgtccagaccgatcacgccttccagcgtatcgtagggacggccggtggcagccagcagggtgtcccctgcccgcagcaggccgaacagcgccacagccagcgtgtgggtgccgctctggaactggctgcgcacgagggcgtcctctgcgcccatcacctcggcaaagatctgctccagctttgcgcggccggtatcccacaggccgtagccggtggtgcccagcatatcggtggaggacatctgggtatccgcaaaggctttcagcattttgagctggttaaaatcgcggatctcctccatatggcggaagtagggctggcacagctccatagccttttcgtccagcgccagaacttcgggtttgtaattgaaaaagtggttcagcattgacattataatggttccttaattttatagattttatagagcgcaggctttctgtcggaatgactccttcagccgcacttcgtgcgccagctccctcagggagggagctcctgacgaaaccagaacgtttcacttatgcagaaagcttttccgtcctgccaaaggctccctcattgagggagctggcaaaaccgtcaggttttgactgaaggagtttgttcatatcttgcatattcccccagcttttcaaagccaagccgggtataaaagtgcacccgctccgggctgcagagaaacaccgggtgctcccccttggcggcaagctcgttcgccatctgcacaatgagccgcccgccgatgcccttgccccgcaaaggctgggctgtctgcccgcaggccatgtaggcctgcctgttcgcaagggcataggcccctaccgtgcagatcgtttcacttccctgccgcagcgcccacacaagggctttgccgcgggtgcgctttgtgcaaagctcggagtaaaagtcctcctgctttgccgtatccgccgggtagagcgcccgtgccacatccatggcagagggttctctgtcaagggtcaatccggcccagagcgtctcgtctgcagcgggcagcggcagagccttgccgggtgcaaggccgaatacagtcagcgtttcagctttgcaccactcggcaggcggtgggcattcgttttcgtctaaaatgatgctctcacacccgcagaaagccagaaagctggccatctcttccgggtttgcgtgccctgctgcccatgcggtactgccgctgagttccagcgccagtgtaggtcctgcgtagaatcgccacggctggcttttgctaaaaagggcaagatccagcggcagggtcgcccccagcacccatttcccccggcaggcatttaaaaagcgggcgcggtgggcttttgtgctgacctgcgcgatcacttcagctcgttgacgatcttcttgaactcgcggccgcgcacctcaaagttggggtacagatcaaacgatgcgctggccggggacaggatgatgatgtcaccgggctttgcgcaggcacgggccagctccacagcgtgctgcatgttgtcggcatgctggatgggcagctctgcttcgttgaagttcgggtcctcgcgcacagccttttcgatgcgggggccggtggcacccatcagcacaaggttcttcacgtgggccaccacttccggtgccagcggctcatagggaatgtgcttgtcgtagccgccagcgatcagaatgaccttctggttaaagctgcgcagaccggcaatggtgcgcgtcgggctggtgccgatggagtcgttgtagtacagcacgccgtccagcgtgcgcaccggctcaatacggtgctccacaccggtaaaggtgctgcccaccttctggatggcttccacgggcacctcgccccacacggcagcggcagcggccagcaggttttcaatgttgtgcaggccgcgcagcttcacgtccttctgggccaggaagggggtcacaacgccatcctcggccatgcagagcatgttgtcctccttgcgcaggaaggcaccgttgtcggtatcgtgcaggcgggtgaaccacacctgcttgcccttgcagtcggactgcatggaacggctgatctcgttctcatagcccagcacagcgcggcagggctgcttctggtacagcaggatgttgcgcttggcatcaatgtactcctgcatgtccttgtggtggtccagatggttgggggtgacattggtcaccacggcaatgttggggctggaatgcatgctgatgagctggaagctggaaagctccaccacagccacatcctcgggagctacctcgggcagcatgggcagcagagctgcgccgatgttgccgcccagatgcaccttgcggcctgcggcctcgtagaacttggagatcagggtggtggtggtggtcttgccgtcggagccggtcacggctacgatctcgcaggggcagaagtcgaagaacagctccacctcactggtgaccatggtgcctgcggccatggcatcctgcaggggcttttcaaagtagcccacaaagcccggggtgcgcatgatgatatcctgacccttgaagccatccagatagttttcgcccaggctcaggtcaatgcccagctccttgatggttgcagcgtaatcgccaaagtcctccacgctctttttctggtcgcacagggtcacatgggcacccagctccacaaactccttgatcagggtcttgtggctgacaccggcaccaatgaaggccacttttttgcctttgatgagttcaatcagtttctgctgatccttctgcataaaaacagttcctcctccataatatcgtattcagaacgcacctcaaaacgggtgcagagatgtttcgctgtaccattatagtccatttagccgcaattggcaacggaaaaacgccctttttgccccaaaaagtaaggtaaattcacaattctgcaattgtattttgccgctgtttctgctacacttgtcgaagtagagtgctttttgtatacaagaagccttttttcgcaaataccatagaatgaggtcatccccttgaaacagttcttccgtattaccgcagcagtgcttgctgctgcgttcctgcttgcgctcaccggctgcggcagcagttccagtgcgccaagctttacatggttcgtggataccattcccgcaaacctcgacccgcaggtggcttctgctgccccggacgtgatcgcctgcgagaacctttacagcgggcttgtccgcaaaaaagcggatggcgagatcgtgcccgatctgtccgagagctggacgatctcctccgatggcaagacctacaccttccagatcaaggacggcctgacctacaaggccgtcaagggcgcttccacggatcacaccatcactgccgaggactttgtgtttgcatttcggcgcatattccagccgcagacaaattccccttatgccgtggagtttgccgcccttgagaacagtgctgccgtgctggctggcacagccgatgccagcacgctgggcgtttcggccgccggcccgctgacgctggtgttccgcctgagtgaaaaggacgacaacttccttgccaagctcaccctgcccggtgccatgccctgcgatgaagcattttttgagagcacccgcggcacctacggcctgaccgccaagaccaccctttccagcggcagcttctatctttacaactggacggccagcggcctgttcctgcgccgggatgtctcctcccccatgatcggcagcctgcgtctggtgcagaacaccggcagcaccggcaagagcgccgcccagctcattgcagacgaaaaatgctccgccgcgctggacgacaccggcgaggatacctcgctgcagtcggtggattactccgacaccacctgggcactgctgttcaacagcgccgaagattctgtgtttgccgatcaggaactgcggcaggcgcttgccggcatcgcccgggagaatgtggatgtgccctcttccggtctgtacaccgctgccgagggtcttgtgcccaccggcctttccgtggacggcatcgattaccgcaagtctgccaggaacccgctgcccaccatcaccgacccccgtacattgtacctgaatgcacggcagggcatggccagctcggatttttccggcgtgaccatcctgctgccgaaggaagccggcctgaccgaactggccgagcagatcaacggcgcatggcagaaggactgctcccttttcttctcggtggaagaggttccgcaggaggagttcgacaaacgccttgcagcgggcagctacaccattgcgctggctcccatccgcgccgaaggcggcagcgtataccagatgctgcagcagttcacggccgagggcggcggcctgaccggctggtccgaccccatctactctcagcgtctggccgagagtgcccagcagaccggcagcgcccgctgtgccctgctggccgattgtgagcgccagctgctggaaggctgcgccgtggtgccgctgctgggccagaacaggcgtctgctggtggcggacggcatcaccggccttgtgttcgatcccttcacgccggtgctggacctgaccgatgcccagaaaaactgacattctccggcccttgacaatcccgtccctctttgctacaataaatgagcaacttgcagggttagctcatccggtagagcggctgcttcccaagcagcaggcggcgggttcgggtcccgtaccctgctccaaaaacaaacggcaaaccgtggaatatcggtttgccgtttttgcttacagccgctccctgcaaaatacgaaaggactctgccatgatctttgttcccctgctgcattacttcaaatgcaaaaattcctacagcggcaacgaatacggcctgcgataccggatgatccccggcaagcgcactgtgccggacccggacggcggcgagggtgccgcaaaggaggaaagcatcctcaccgtggactactggccggacccttggaccattgaaaagaccgaccccgccctgcgggtgcagaaggtgtttccgctcaccgacgagggccgggaggccacagccgcttttttgcaggacgcgttcaatgccgatcctgaccgctggaaaaactgccccagcatgatggacagcgacccgtgggagccgcctgctgccgaagccgagccggacaagccgaaggaataaaacatgatctatcgtttaaaagaactcaagggcgataccattgcagtgccgcagctggtgttttccaaactgggcatcgccgaagaatacaatgtgcgcgtggctctgtatgtgctggcgaccggcatcaccgacccggacaagatctgtgccgacctcaagttgcgcagccgcatcagcgccgagagcgccctctccttctgggcgggcgctggcctgctggagcggtacgaagagaacgctgcaccgggcgaggaacccagcgcccccgcacccatgacctgggccgagatcgctgcggccagccgcaccgaccccatgatctccagcctgatcgactgcgcacagaccggctttgcccgtccgctgacccacagggagatggaaaagctggtcaacctttatatgcaggagggctttgcgccggagaccgtgatgctgtgcaccgcctacgttgccagcaccggccgcagcaccatggccgccgtagtgcatgagctgaaggtgtggcgcaccgagggcgtggagaccggtgagcaggccgatgcccacctcaaactgctggcactgcgccagagccgcgagcagtatgtcagcggcctgctgggcatctccaccgacgagctcaccctgggcggccgcaaggccattgcccgctggtacgaggtgtacggctacgatgacgccatggtacaggaagctgctgtgcaggcaggccccaagcgggacctgtggtactggaacagcatcctgaaaacctggaacgccaagggcctgcgcaccatccacgacgtgcgcggcccggtggccgatgccggagccaaccggaacatccgggtggaccgtgaagcccccagcggcaacgattttctgggcaacagcagcctttctgcgtcgctcaaccggctcaaaaagcgctccaacacataacacgaggttacccatatgcgtaccaaaaacgaactgtatcaggaagctttgcgcaccgtagccgcccggcggcagatggcccgtgcccgggccgaggatgcccgggccgaggcagaggccgccgtgcccgccctgcgccacgccgaggacgaggtgcgggtgcggggtctgcgctgcgcactggccggtgcttccggcaaggaccgcaccgaggccgctgccgcgctggccgatgcccggcagaagctgaccgccctgctggcagccagcgggcggcctgccgacgcgctagagccgaaattcagctgtaagctgtgccaggacaccggcacggtcaacggccgcacctgcagctgtgtgcacaaggtcatgcagcagctgcgccgacaggagattgagcagctgtccagcctgtccatttccagctttgacaccatggagctgcgctactaccccaacacaatggatgcccagaacggtgtgaacgtccgcgcctatatgggccgcctgctggacggcctgaagcagtatgccgaggatttttcccccaccgagagcgaaagcctgatgctcatcggcaacgcgggccttggcaagacccacgctgcgctggccattgcgggccttgtgctggaacagggccacgatgtgatctatgtgtccagcccggatttctttggcaagatcgaagcttcccgctttgacccctccggtgatgccgacactctgctgcgcactgcctccaccgccgacctgctgatcctggacgatctgggcaccgagttcgtcacaccctacttcattacggtgttctacagtctgctgaacaaccgtctgggtgccgggctgcccaccatcatcaccaccaacatcaccgacggtgccctgctggaaaaacgctataccgaaaaaatttccagccgcctgtcggcgttcattcccttccgcttcctaggtgaggacatccgcccccagaaagcaaatgaataaacaaaagcgcatcgtatctacg

SEQ ID NO: 1103 - DNA, 32057 bp, Unknown
  gut microbiota DNA sequence
actgtatttttcatcgcatcagcgttaataatccgtcactgtatcagataacactcccacagtagcacctgataaagttccctgaaaccaagggctgggagtttctccagcgaatgtccgggaagtggggccccgtgcgtaagcacaggggcggaaccgtgggttccgggctgttcgcggagaaagctcccagcacgcggcctactctacagcccgaacagcaaaaaagctcccctttgcaggagagcttgcgaacattctttaagcgtttgcggtgcgggcatcgtgttccttctcgacgtccttttccttctgcaggcgtttgcgcaccacaaagtaggccggaatgaggaagaagcaggcaaagaaccatgccaccgggcttgcgatgcaggccgcaaagtagccccacagcggcacgaaccagaagcccaccatggcgcgggcgatcatctcggccacaccggcaaacatggcaaggccggagaagcccagaccctgaatggtgtagcggtagataatgagcaccgccagcgggatgtagaatacgctgttccagaagatgaagctctgggcattggccataatggcggtctcgctggcatccaggaacaggccgatgagcagcttatccgtcacgcgcaggatgaggaaggaagccacactgtacacgcagccgatgcccagtgcggtgttcacaccccggtccacacggtccaggtcctttgcgcccatattctggctggcataggtggtcatcgctgtgccgatactctccagcggcacgcacaggaactgcgccgccttgccgccggcggtctgcgcggccacgatgtcgctgcccagaccgttcaccgcaccctgcagcaccacgctgccaatggccgtaatgctgcactgcaggcccatgggaatgcccatgctgcacagctttgcgcagtgggtcaggctgaaacagccctcttccctgctccagcgcagctccgggtagtggcgcaggatgtacaaaagactgcccagacccgccacagcctgactgaacacggtggcaaaggctgcaccgaatgcgcccatgttgagcacaatgatgcaggcaaggtccagcccgatgttcaaaaagcttgccaccagcaggaaatacagcgggcgcttgctgtcgcccagtgcacgcatcagggcgctggtcacattataaagcagagtgaaggggatgcctgcaaaaatggtgcggatatagatatccgcaaggtcgatgatgttttccggggtgttcgtccacaccagcaccgagcgggtcagcgccacagtgacaatggtcagcaccaccgcaaagaagatggaaagccacacggtattggcggtgtagcggcgcatctccttgtagtcctttgcgccgaaagtccacgagatggggatggaaaagccgcaggcgatgccgttcacaaagcccagcaccagatagttcaaaccgcccacgctgcccacagcggccagcgcttccacgcccacaaagcggcccacgatgatggtatcggccagattgtagaactgctggaacaggctgcccagcatcagcggcaccgcaaacgcaaggatcagcttgagcggactgccttgggtcatatcctttgtcatagtataaaatcctcctgccacactgggaaccggcttgatgtcgtgatttttgccgtgaaaaacgccctgccggaaaggggcaggacgtcgtgtacattcatgaatgatattatagtggagtgacgcaggatttacaagatttgcattgcatcaacatttacgaatttttgccgcaagaattggtgattttgcttattccgagtaatgcgcaaggaactgtttggtgcgctcctcctgtgggtgctcaatgagctgcttggcagggccttcctccaccaccacgccgccatccatgaacatgatgcggtcggccacgtcacgggcaaagtgcatctcgtgggtgacgatgatcatggtggtcttgcggtcggcaaggtcgcgcaggacgcgcagcacctcgccggtcagctccgggtcgagggccgaggtcggctcgtcgaagcagagaatgtccgggtgcagagccagtgcgcgggcaatggccacgcgctgctgctgaccgccggaaagctggtgcgggtagtggcctgcccgggcagaaaggcccatctgggccagaagttcctgtgcctgctgttccagctcggcatggatggcctttttgttagccttgtagtccgggcgctccttcgccagcagttcacccgccagcattacgttctgcagggcggtgtactgcgggaagaggttgaagttctggaataccagaccaaagtgcagccgttttttgcggatctcgctctcgcgctgggtggcggggtcggcagcgtcccacatggtctcgccgttcaccttgatgatgccggtgtccggccgttccagaaagttcaggcagcgcagcagggtggtcttaccggagccggacgagccgatgatcgccagcgcttcgccctgttccagcgtgagtgagatatccttgagtactttggtatcgccaaagtttttgccgatgccggaggcttcaagcagtgccatgatctaatttcctccctttcatcagcggaaataatccagtttcttttcggcccagccaaacagcagggtaagtgcgcccacgaacaccaggaagaagatggcagtggagaacagcggccagatcaagccctttgcgctgtactccttggccatcatgatgatctccttgttggcaatggtgtttgccagcgaggtatccttgacgagggtgatcacctcattgcccatgggggccagaatgcgcttgaccacctgcagcagcgtcaccttgaaaaagatctgggtcttggtcatgcccagcacctgaccggcctcggtctggcccttgggaacggcttcgatgccgccgcggtagatctcggagaagtagcaggcgtaattgatggcaaacgccaccaccgccgccaccatgcgtccgccggagccggagggccaagggttattcatgcccagcaggccggggccaaggtagatcacgatgatctgcagcatcagcggcgtgccgcggatgacccacacaaaggtctttaccgcgccggaaagcggcttgcaccggctcatggagccgaaagccaccaccagacccagcggcagcgcaaacagcagggtcagagcgaacagctcacagttgagcagaaacgcgccggaaaggcgactcagaatcacagacacaagaacacacccatcaatccgttttttgaactccttccatcaccttcggtgacagctccctcaatgagggagcctcacgcatatcggcaacaaaaagcctccctcaccgagggaggtggcatcgcgcagcgatgacggaaggagtaattacattcttatagaactcagtcggccagagccagatcgtacttgtcggccagagcctgcatggtgccgtcagccttcagctcgtcaaaggcggcatccacagctgcggcggcatcgctgcccttgcggaaggccacgccgtactcttcagcgttcagctcgtccacgatcttcagacttgcatagtcggtgccctcaccgatcatggcgttggccaaagtcagatccagcacagcggcatcagcagtgcctgcggcaacttccatcaggcagtcggtctgcacgctcttggagacgtaatcggcctgtgcaaggttctcgtcgccctcaatggcggcttcaccggcagagccagcctcggcaaccacggtcttgcccaccagatccgcagtggagctgtagtcggtgccgtccttcacgaccacgacctgtgcgttcttggcataggccttggtggtggcggtgttggccatgatgtcatcggtcagggtcataccgttccagatgcagtcgatgctcttggcatccagctccaccaccttggtatcccagttgatctccacgaactccggctcgactcccagcttttcgcacacggcagttgccagctcggtatcaaaaccggtaaagttgccgtcggcatcggtgtagttcatcggctcatagacggtgtagccaatgaccatcttgcccttttccttgatgtagtccagatcgctggctgcggtctcggaggcggctgcgctcccggatgcagaggcagaagatgccacggcggaagtggatgcggcaccgccgcaggcggcaaggctcagtgccatggcaccagccagaaaagcagagacaagacgtttcataaaaggttcctcccttttttgtttcccaaatgtgctccctctcggtttagcattttatcatgctaaagcgttaaactgtgactatagaatagcgcgtttgcagccatttggcaagaggaaatgcaaaagttagtgcagttcgtctttttcaaggcttttctgtgccaattctttggtctggttgcacaaagaaaagaggaaaagctttgcgccttccctcttttctctgctttactcttccgcaaacgccgccagcgcagccttctgcagctccgtcaccgagatggtgcacagtgccgcaaggtcggcatccgaaccatcgtccgggatgcctgcgatctcagtacgggtcttgcccttcaggtaatcgcaccagccctcgctgtgctcgtaccattccttgcccagactggatgccccgcgcatcccgtagctgtcgcccagttccaccttggttttgaccatctccggtgccgacaccgtaccatccgcgcccacggtaagggcaggctctgccacatccgccactgcaccggtcacacggccgtcagcatccagcgtcagggctgccactgtgatgtccacctgcgcggtcacatcgtggtcatcgtcggcggtcagttccttggtgtcattgcgcactgacacgcccagcacagcgcggtcgccgcgggccgagccgactgcctttgcattctcgcaggcgcgcaccacagcatcccgatagccgtccaccgcaatggtgcaggtggagagcaggtcagcatccttcggcttgccgtcatcgtcggtggcaagcttcttcacctcatccggggttttgccggtaagataattgccaaaggcatccgcctgctctgcccagccctttttcagcgaggacaccgccgccagcgggtaatcgtcgcccttctggcgcttggtgcgatcgtcggtgggcatcgtcaccttgccggtgctgtcccccgtgaccgagatctccacctcgtccagcatcacatctgccaccctgccctcggcatccagcagaacggcagctgcgatggtatcgatcttgcccgcgcgttcctgatcagacgcttcggtcaggatgccaaggccggtgcggtatgcagcgttctggcccgcctgccccgtctgcgatgaactgccgcccatgttcgtgctcatgctgccggagggaccggaatcgcttcggctgcaggcggtcagggccagagctgccgccagcgtgcagcccaggatcatgcgaggtatctttttcattataataaaacgctccctttcctgcccccatcgtaaaggggcttttgggctagtttacccggaaagggagtttttatcacatcaaggggctcagcagccgcagcacactgtccagcaccgtgccgggcaggctggtgcggcattccgtcacctgtatctcacggcactgcggcagcgtggcccgtacatcgtcccgcagaactgccacctgactgttcttttgcagcagtacaccgcactcaaagtgtaagaacaggctgcggtagtccatgttgatgctgcccactacggcagttacatcgtcgcttacccagcacttggcatgcagaaagccgggcgtatattcgtaaatgcgtacacctgccctcaaaagcggcagatagtacgaccggctcagccggaacaccagctttttgtccgggatgcccggcagcaccagccggatgtccaccccgcgcttggccgcgtttttcagtgcgtccagcatttcctcgcccacggcaaggtagggcgtgtagatataaatatactgctgtgcctgcgcaaggatgttcaggtacaccgtctcggccatcggttcctcgtccagtgggctgtccgcgtagggctgcacgatgccgtccgataccggcggcaccagcggcatgggacgaaatgcatcataatccgtctcgctggggcggaaggcgttccagaagttgaggaacatcaccgtaaagttccacgcggcatcgccttccacacgcagggctgcatccttccagtagccaaagcgctgctccgcattgatatactcatctgccagattcacgccgccggtgtaggccaccgtaccgtcaatgactacgatcttgcggtggtcgcggtggttcatcaccagcgagagcagcggcatcaccgggttgaacgggatgcagcggatgtgcgcccgctccatgcgcacgatgaaatcggcgggcagacccagcagactgccaaaatcatcgtagatcaggcgcacatccacgccctgcgcagccttgcggcgcaggatcttttcaatgccgttccacatgcagccgtggctcacgatgaaatattccagaaagatgctcttttcagccttttccagatcggccagcagctgcggatacatggcttcgccgcaggcaaaatactgcgtgcgagtgttctgccacgccggataggggccgtactttgccacatatcggctctgcccctgctcgcgggcatccagaccttccagcacacccggctcctgtacaaggtcttttttgtgggcatcctccaccgcctgcattttcaggcgcagacgcttggccgggcgtttgttgccaaaggccagatacagcgcaccgcccagcagcggcagaatgccgatcagcgcgatccagcccaccttgtaggcgctgttctcatccttgcgcacaaggtacaggacgatgagcaggctcagtgcgttgagcaggccgttcacccacacgcggcccgtgccggtggtgatggcaaacgccacccagcacagccacagcagctgcaatgccaccaacaccaccgtaatggtgacgcggttcagaatgcggctgaaaaagcgcacgaccggtgaacgaaaaagcatgggcctgccctcctttcccatttataattatgtgtaagtatagcgcggttttacaactttttcaagttttgcgttgttcaaaaaaaagcaagccagacccgcaggcccggcttgcttgcaatatcaaaaactcttttactctgtttttccgtcctcatagcccaccatcaggccgccctgctcagcgtagtagctgcacaggccgccgcactcggccacatccacctgcgcccctgcaaacaccgcatggatcatcagcttcaggcgcttggcagcttccgggttatcacagtgggcaatgtgcactttgccatcggtaaagccgtgatccttcaattccagcacgatgcgctccagtgcaccgtgctcgccgcgggtcttgcacagcacctccagttcgccgctctcactggcctgaccaatgacccggatgcccagcatccgtgccacagcggcaacagcaggcttcacacggccattgcgggccagattggccagcgattccagcgaaaacagcagatgtgtgtgcttgtggtaagccaggatcgtctcgcagatctcgtcaaactccatcccgatccggacgagatcccgcagacgctctgccagcagacgcagctccggcccggcggacaggctgtccagaacaaaaatacgggcctccgggtgcgtttccttgtattcttccgctgccagcagtgcagcattgtagctgccggacagtgtgcccgtgatggtggcaacaaagatctgctccgcaccctcataagcagccagccaatctgccacattggggcaggaggtgctggtcttgcccttgtaagtacgcagagaccgggccatgtccacagcatccagagtaccgtcatccagatattcctgttcatccgtgacgatcttcaacggcacacaggcaaaatccacgcccggcagggcatacaggctggacgaagaatccacaacgatcttggttttcataaaatgcacgctccaaatctattttgtgatagcaggtcatttttttattttccgtgccttacacgcacttccgcctgcatggtttttcggttcactgcagacatcatagcagtttttcaaaaacctgtcaagggattttatgcattctttcaaaagttttaaaaatccgttgaccagagaaccgatttgcgctataataccgccagaaaaccattttctgtatcccgcgcagccctgctgcaccaaccttagaaaactgcttacgatatgaaaactgaaaccaaatgccgcgttgcggcctgcgccgccgggtttgccctgccccggtacgccgatctcccgcagatggggctttaccttgaccagaccgtgcagtacgtcaacagctatttccgcaccttctgcggcgtggagctcacctcttccatggtaagcaactacgttaaaaagggcattttgtcccacccggtgcgcaagaagtacgcccgcgatcagattgcatccctgatgtacattgcagtctccaaaacggtgctctcaatggaaaacatcgatgccctgtttaaaatgcagcgggcgcactgttccgccggggcagcttacgactacttctgcgacgagatggaaaactgcctgccgtttgtattcggctgcaccagggagatccgcgaccttgccgtggatgccgcagatgaaaagctgcttctccgcagcacgatccttgcagcggcaaacaaaatgtacttggactgctgcttcaacgccctgcggcaggaggaaaatctctgggataccattctgcctgatctggcgtaagaacacaaaaaaggccgtgcctccataaaaggaagcacggcctttgcattttatacgttcaagatcaggtatcctgcagttccccgcggcttgcagccttgaggtatgcgaagatgaaaccgtccagatcgccgtccatcacggcatccacattgccggtctcgtagttggtgcggtgatccttgaccatggtgtagggcatgaacacatagctgcggatctggtgaccccatgcgatctcgttctgcacgcccttgatgtcgtcgatcttatccatgtgctgctgctttgcgatctgatacagctttgccttcagcatttccatggcgtagtcacggttctggaactgactgcgctgggtctggcagctgaccacgacgccggtgggcttgtggatcagacgcacagcggaagaggtcttgttgatgtgctggccgccggcaccggaggaacggtacacctgcatctcaatgtcctcggggcggatatccacctgaatggtgttatccagctcgggcatcacttccagcgaagcaaagctggtctgacggcgggcgttggcgtcaaagggcgacacgcgcaccagacggtgcacaccgttctcactcttgagcaggccgtaggcgttggcacccttcaccatcatggaggcgctcttcatgccggcttcatcaccgtcctgataatccagaacctccacggtcatgccgtggttggaagcccacttgttgtacatgcggtacagcatttcggcccagtcctgtgcctcggtgccgccggtaccggcatggaaggtcaggatggcgttgctgtggtcgtactcaccgttcagcatggtcatcagctgcagctcatccactgccttgcccacagcgttcacagactcctctgcttcggggatcatggcggggtcgtattcttcatccagcatttccagcatggtctcggcatcatcgtacaggccctgcagcttttcaaagcggctcagcttgcccttcaggtcgcccacttcgtcaaagaccttcttgctcaggtctgcatcatcataaaagccggggcggctcatggtgtgctccagttcctgcacgcgcttgcgggaggcatcaatggcaagggcttcttccaagtccttgaccgccttgccgtaatcggcaagctgcaccttcagttcgtcaatcgtgatcattctctaaatccctctcgaaatgataaataaggtaaagtcctttgtacttgccaaaagacacagtttatacacagatacttcattagtataccgagaatctgtgctaaagtaaaggggtaaatggattatcctgctggaattttgaagattttcaccttttcttttctctttcaggggagtataataccagtatgaaccatacaacaggaggaaatcatgccgaaatattatggctgtccctgtgaaggctgcggcagaccgctggcgctgaccgatgatatcgtggtctgcccggactgcggcgcaccctatcaccgcgagtgctacgaaaagcttggccgctgcatccacacccccgcccatggcgcgggctatgaatggacgttcccgtacaaagacgatgctctgcgcacctgccccagctgcggtgagcgcaccctgcgcaccgaagagcgctgccgctgctgcggtgccgttcttccgccggagagccagtgcccggagccgcccacccaaagccaacccggcaccgacgcagacggacgctttgattacaacgacctttaccgccagtatcagcagacggtggaggaacccacccgccgcaacgtgcaggcggcctttggcaaggaagagctgatcgacggcatcccttacagcgactggaacgattatattggcaaggccgcgcccgtctacctgaacgattacagccggatgcagctgcaacacaccaaaatttccatgtgcttctcggcgctggtgttcggcccgttctatttcttctaccgcaaggcgtggaagccggcctttggttttctggccgcagagctggtggtggccctgcccaccctgctgagcatgatgcaggccaccggcagtccgctcactgcgggcatcagcagcactgccatcgtcgtgctttcccgcattatgacggtgtttagctttgcgctggtgatgctgcgcaccctgtacgccaagtggctgtaccgcaaaagcgcagccgagcgcatccgccgcatccgtgctgagttcccggacgctgcccagcgccgtgcggtcctgtctgcgcagggcggcgtgagcatcgccggtgtgatcggtgcctttgtgctgctgatggtgctgggtgcctgcgctaccgtgctgatgggtccgaatctggacgctttggccgggatgctctgatctacaatgccgcctgcaaaggctggcattgcggatttcaaaatagtaataggagaatatggatcatgatgaagaaagtcaccaaagccgtcatccctgccgccggtcttggcacccgcgtgctgcccgctaccaaggccatgcccaagggcatgctgcccatcgtggacaagcccgccatccagtatctggtggaagaagctgtgcgttccggcatcaccgatatcctcatcattctgggccgcaaccagagcatcattgaggatcactttgaccgcagccctgagctggaagaaaagctggcaaagcccggcaaggaaaagactctggaagagtgccttggcatcgccaacatggcaaacatcttctttgtgcgccagaagcagacgctgggtctgggccatgctgtgaacaccgccaaggccttcaccggcgatgatcccttcgtggtgatctatggcgatgacgtgatctggggcgaggacccggtctgtgctcagctgatccgcgcctacgaggagttcggccgcccggcggcaggcgtttccgcagtgccatgggaagatgtgagccggtactgcagcctgaagaccacccccatccacgacaactatttctttgtggacgacatgatcgagaagcccaagaagggacaggagttcagcaactactccattctgggacgcgtgctgctgaccccggagatctacgatatccttgcccacaccaagcccggcgcaggcggcgagatccagctgaccgatgccatggccgagtatgcccgcacccgcggcggcatgacggccgtagagttcaccggcaagcactacgacatgggcaataagctcaaggtggtggaagctcaggtggagctggccctgcagcatccggagatcggcgaagaattccgcgcttacctgaaggagttctgcaagacactgtaacttatcctgaaaataaaagatcctccggcagacctgtcggaggatcttttttattgtttacccatttacctgactggggtgcttctgcggcggcatcttggtaaagagagccttgagcaccagcggcgttgccacgctggacaccacgatcagcaggatcacagcggtaaagtagaccgagtccaccacgccgacatccaggcccttctgggccacgatcagtgccacctcgccgcgggtcatcatgccaacgccgatcttgagggagtcgccccagttgaagcggcagatcttggccgcaaggccgcagccgatgatcttggtgataagtgctacaatgacgaagcagacacagaacaggaagatttccggcgtcaggccgctgatgtcggtcttcaagccgatggatgcaaagaagatgggtgcaaaaatgatataattgctgatatccacgcggcgctccacatagggggcatcgtccatggtgcacagaacgataccggcgatataggcaccggtgatatctgcaatgccgaagtattcctcggcgatgtaggccatggcaaagcagaacgccatgctcacgatggtgatgcgctgggtgtggggattgcgcttgtccagccatgtcatagcaaagtgagccacaacgcccacgcccacggcagtggcaaagaacagcaccgtattaatgagcaccttgcccagacccgtgccggtgccggagcttgcgcccagtacgcaggtgaggactacgatgccgatgacatcatcaatgacggcggcactgacgatggtggtgccgagaaagctcttcaggtggcccagctcctgcagggtcgccaccgtaatggacacgctggtggccgtcatgatggtgccgatgaacagggcacggtagaactcagggctgcccacggcagagaagccgtagaacgcactgtacagcagggtgccgcccaccagcggaacggctacgcccacgcaggcgaccagggtggcgatggggccggctttgatcagttccttcagattggtgccaaggcccgtggtgaacatcagcatgaccacgccgatctccgcaaaggtggagatggcatcactggtctgcaccagattcagcacacaggggccgatgatcaaaccggcaaggatctcacccaccacctgcggggccttgcacttgcgggccaccaggccaaagaactttgcgctgaggatgatgattgccagattacggaaaaccgaatacacaaagaatccttcctttactataaaattcccagaaccatatatacattcctttcgaagacggataacagagagcagagagacggccgatccccggctgccctgccgttcatcctctgaaagccactatattatattcctctttcacaaaaaaatcaaaatattttttattatatcttttttcggaaaaagcttgacagaatccacacagcttgctataataaattgctgtctgaacagacacgccgcacacaaggcgcgatgccgcgttttgtgtgtacccttggtcctgtgattgcaggacccttaagtccaaaaggaggtgctacaaaatggcaaagtacgaaaccatgctgattaccagcgccgctctcgacgaggaggctaccgccgctctggttggtaagttcaagtccctgatcgaggctaacggtacgatcgattccatcgacgagtggggcaagcgccgtctggcctaccccatcaacgacgaggaggaaggcgtttacactgtgatcgacttcaccagcgagcccagcttccctgctgagctggaccgtgtgtacaagatcactgaaggtgttatgcgcagcctgatcattgctcacgaggagtaattcttctgtgacagaaagggagaccgtaaaatgttgaatgttgttgccatcatgggccgtcttgtggcggatcccgaactgcgcaccaccccgcagggtaccaatgtgtgcagcttccgcattgcctgtgaccgcaattttgcgcgtcagggcgagcagcgtcaggccgatttcatcgatatcgttgcatggcgtcagcaggccgagtttgtttgcaagtatttccaaaagggcagtctgattgccattgaaggcagtcttcagacccgccagtatcaggataagaacggcaacaaccgcaccgctgtggaagtggtagccaacaatatcaactttgcaggctccaaaaacagcaatgcaggcggcggagcaaattatcagaataattctgctcccgcctaccagaatgcagcgcctgcccgcccggccgctgtggaggcagctcccagctactctgccggcaatgcagacgacttcgccgtcatcgacgacagcgacgatctgccgttctgacacgaaacggtcaatccgttaaaaatccaataggaggtaataagcaatggcttttgaaagaaccgaaggctctcgccccgcacgccccatgcgtcgcggccgcaagaaggtttgcagcttctgtgtcgatcgtatcgacaccatcgattacaaggacgtgccccgtctgcgtaagtacgtctctgagcgtgcaaagatcattccccgccgtgtgaccggcacctgcgcttatcatcagcgcgcactgaccatcgccatcaagcgtgctcgtcacgttgctctgatgccctacgtcagtgactaatctttaaagaatcaactcaatcaaaataatcagcaatcagcaaagcgctctcaccgatgacaaggtgggagcgcttttttgtcttttccctccggcccggatgtgctatactgacctcaggaggcgttttattcttttttgaggaggtttttgtcatgaaaaaacggtatcttagacttgcggcgctgacggccggtgtgctactggccgcacagaccggtctttccgctgctgcgctttctacctttgatgccgcatactacgctgcacagtatccggatgttgcggccgtatgcggcaatgacgagggtgcactgctgcgtcattatctggatcacggcattgacgaaggccgcaagccttctgcggacggcattgccggtgatgacgagctttctttgaccgaagcgcagttttcttccgtctggtcgccggtggccatcaacaagctggcccactacaagtctctcaagcgcaaatgcaccgatgaggagtttgcgcaggcatatcaggaagcgctgaaagtggtcacaccgctggcgctcatgagccgggaagaccagctttacggcattgcctctgccctgcgtgcggtggtggatgatggctccatggcttactctatggaagccaaccattacaacgacccctacggttattttgtactgcgcacagcatcctgtgccgggtgtgcccgggccaccgctctgtgtctggacattctgggcatcccatatgagcatgtgaacgagaaccagtacagccaccagtggtgccgcgtgcccatggaggacggcagctactggatctgcgatgcgttcggcctgtactgcggcccggaacccgaaccctatcagcacccgtatttttgaaaaagcggataaaccatttcaaaaccacgcaatgcccggcaggctgtgttatctgccgggcattgctttttttctttctccttttataaaaccactgctctatgttgaaaagttacaaatcggtacggttttgccggttgtttctgatttgtaccgggaatttgcggaacttccggcacattttgatttgcacgcaattcaatctgcacaaaagcagctcagaatgctatgcaattttcacgaaaacactttttggttattgattttttatgcaaattatgccatactatagccactgaaaacgttcccgacaacgttcccgaatctattaccgaaagtgaggtactccgacaaaatgccgaatctgaccattaaggacattgcccggatcagcggctgctcggtaagcaccatttctcgtgtcatcaacgaccggcccgatgtccggcctgagaccaaggagcatgtactcaaggtaatgcgggaggccgggttcgtgcccaacaccaatgcacggcagctgaagatccagcagtcccgcagtctggtgttcgtggtcaaaggcacccgcaatctcttcttctcggacttcttagtccagctgcagcgggccgccaccctgtatggctacaatggcatcgtttcctatttggatgaaaacgccaacgagatcgatgccgccgaaaagatcctgcgggagattaagcccaaaggcatgatctttctgggcggcagcgtagccaacttcaaaaaaggctttgccaacatcacagtcccctcggtgctgaccacactggtctccgacgagctggactttcccaatctttccatggtgggcgtggatgaccgcgctgcagcctacactgctgtggactacctcatccagcaagggcatcgtaagatcgcagtgctgggtggtccggtcaccagttatcccagcgtgatgcgccgcgagggtgcacagcaggcgatgcaggacgcaggcatcctgttcagcgacaagctgtacggcctgtccaactacgattttgagtctgcctatcacgccgtgaacagcctgctggcccgccgggccgacttcaccgccctgttcgccatgagcgatgtgatcgccttaggtgccatccgcgcactggtgagcgccgggctgcgggtgccggaggatgtttcggtgatcggctttgacggcatcacgatgtcccgttactgtgtgcctgttctgactaccgttgtgcagcccagtgaacagatctcgctgcagagcattgagttgctggtgcggcagatcgagcacggtgcaccggcccagaccatcaccttgcagccggagctgcagcagggtgagagcgtgagggcgatttaaattttgttttccctccgtcaggggacggagattttgaaatagtttatttttaataagaaggagaacttattatgaagaaaatgatcactcgtcgtaacttcctgaaggccgctggcgtttccgccgctgctctgggtctggctgcctgcggcggctcctccagcagcaccgcttcctctgctgccagttctaccgctgcttccagcaccgctgcaaaggcagacggcaaggtctactacctgaacttcaagcccgagcaggatcaggattggcaggatctggccgctgagtacaccaaggagaccggcgtgcccgtgaccgttgtcaccgccgcttccggccagtacgagaccaccctgatgagcgagatggagaagagcgaggctcccaccctgttccaggtgaacggccctgttggtctggcaaactggaaggattactgctacgatctgtccggcagccagctgtacggtgagctgaccagcgactctttcgcactgaaggatggcgacgctgtggctgccatcgcctacgtcctcgagacctacggcatcatctacaacaaggaactgctgaccgccgctggctatacccaggacgacatcaagggctttgccgatctgaagaaggtcgctgacgatattcaggcacgcaaggctgagctgggcgtggacggtgctttcacttctgccggcatggacagttcttctgactggcgcttcaagacccatctggcaaacctgcccatctactacgagtacaaggcagacggcatcagctccaccgacgccatcaagggcacctatctggacaactacaagcagatctgggatctgtacatcaccgattccacctgtgaccccaccctgctggcttccaagaccggcaacgacgctgtggctgagtttgtgggcaagaaggctgtgttctaccagaacggcacttgggcttacaatgacgtgaaggatctgggcgacgacaacctgggtatgctgcccatctacatcggcgtggatggcgaggagaatcagggcctgtgcaccggttccgagaacttctggtgcgtgaacaacaactcttctgatgccgatattcaggctactctggacttcctgtactggtgcgtcacctctgaggccggcaccagcgcgatggctgacaagatgggcttcgtcattcccttcaagaaggctaaggactccaccaaccccctgatcaccattgcaaaccagtatgtggccgacggcaagaccagtgtggactggtgcttctccaccatgccttccgaggagtggaagaacggcgtgggcagcgctctgactgcttacgcagcaggcaccggcgactgggacggcgttgtgaccgccttcgtcgatggctgggctaaggaatacaagctggcaaacggctaagctcctgatcggtctataaaaaagaactgaacagggaggcgggcgaagaagttcgccccgcctccccttttttgttaaccactccgcatataggaggtacatcatgcaaaaagccatcagcaaatattggccggtgttcgtgctgcccacgctgctcgcgttcatcatcggctttatctggcccttcatctggggcatttacctttcgttccagcggttcactactgttagcaagaccacctttgtgggcatccagaactacatcaacgtatttcaggattccaccttcctgcacgccttcggctttaccgcagcgttcactgtagtatccaccgtgctcatcaacgtctgcgcctttgccattgcgctggtgctcacccgcggcatccgcggcaccaacatcttccgtaccgtctacttcatgcccaacctgatcggcggcatcctgctgggctacatctggcagatcctgctcaacggtgtgctggccaacctgcagaaacctctgctggcgctggatgccaaggccggtttcgtcggtctggtcatcctgatgtgctggcagcagatcggctacatgatgatcatttacgttgccggcctgcagagcgtgcccggcgacctgatcgaagccgccaagatcgacggtgccaacgaccgcgagatcctgttcaagatcaaaattcccatggtcatgcccagcgtgaccatctgcaccttcctgaccctgaccaacagcttcaaactgttcgaccagaacgttgccctgaccgcaggcgaacccgccaacgccagtgaaatgctggccctgaacatctacaacaccttctatggccgttccggtgcccagtggaagggcattggtcaggcgaaggctgtggtgttcttcctgattgtcgtggtcatttctctgatccagctccactttacccgttccaaggaggtgcagcagtaatgcctaaacagaaaaaaatgtgggataacatcctcaccgtcatcatgacgctgctgagtctgctgtggatttaccccatcgtgctgatcctgctgaacagcttgaaggtcgagggcacctttaccacctccaccgtgttcaagctgcccaccgccgagacctttgcgggcctgagcaactacatttacggtgtcaccaagatgggcttcctttccagccttggctacagccttgtcatcaccgttaccagtgtggcgctgatcctgctgtgctgctccatgaccggttggtacctcacccgcgtgaacaataagctgagcaagttcatgaacttgctgatcgtgttctccatggtcgtgcccttccagatggtcatgttcaccctgtccaagaccgctgaccagctcaatctgaacaccccgtggaacatctgcatcatctatctgggcttcggtgccggtctggccgtgttcatgttcaccggcttcatgaagagcgtgcccatggaaattgaggaagcggccatgatcgacggctgcaaccccattcagatcttcttcaaggtcgtattccccatcctcaagcccaccatgatctccaccgccatcctcgagaccatgtgggtgtggaatgactacctgctgcccactctggtgctggacatcaagaaataccgcaccattcccatggccatccagtacttccgcggcggctacggccgtgtggagctggctcccatgatggcctgcatcatcattgccatcatccccatcatcatcctgtacatcacctgccagaagtacatcattgagggcgtggttgcaggtgccgtgaagggctaaggaggtgcgcacactatgcgtgcaagcggcattttgatgcccgttttcagtctgccggggccttttggcatcggtacgctgggaaaagaggcctttgcattcgtggattttctggccgatgcaaagcagacctactggcagatcctgcccatcggccccaccggctacggcgacagcccttatcagagcttttccgcctttgccggtaacccctacttcattgactaccgcctgctggccgacgtcggtctgctgacggccgatgaagtgcccgccgcacggcctgtaggccccatcgactacggcgcactgtacaacgagcggcctgtgatcctgaaaaaggcagccgaccgcctgctggctgccccctccccctcctatgaagccttctgcgaggcgcagagcttctggctggaggattacgccctgtttatggctgtcaaggccgaacaggggcaggccggccttgccgactggccggatgacctgcgctgccgcaaaccggaagccattgctgccgcaaaacagcgtctcgccggtgcggtggattactacaaggcggtgcaattcttcttctacacccagtggaacgccctgaaggcttacgccaacggcaagggcgtccgtctggtgggcgatattcccatctatgtcagcccggattccagcgatctgtggacccacccggaactgttccagaccgatggccagatgcacctgacgcaggttgccggatgcccgccggatgcctttgcagcggatggtcagctatggggcaatccgctgtacgactggcctgttcacaaggccaccggctttgcgtggtggaagcagcgcatgaagcacgccacctccatttacgatgtggtgcgcatcgaccacttccgcggcttcgagagctattactccattcccgccgggaacaaaacggcggcgggcggccactgggaaaaaggccctgaccgcgattttatcaacgccatgcatgaaaaccttggcgagggcggcatcattgccgaggatcttggctacctgaccccggaggtcaaggccatgctttctgccagcggctatccgggcatgaagatcatgcagtttgcctttgacagccgggaatccggcaattacctgccccacacctaccaccgcaacagcgtggtgtacaccggcacccacgacaatgtgaccgccgaaggctggcgtaccaacgccagtgccgaggatgtggcctatgcctgccgctacctgcgctgccagccggaagagctgaccgaggccatgatctgtgcctgccttgccagtgtatcggataccgctgtgatccctctggcggactggctgcatctgggcagtgaggcccgcatcaacactcccagcacccaaggctccaactggcagtggcggctcacctgtcccttgccggaagcactggccgggcacattgcgcagctgaccatgctctacgaacgggcacagtaattccctgatcattttctccccataaaagcgcctgcacccggaatgtgcaggcgcttttgctttttatacagaacattttttcaggaccagattctggacatattgcgcatttttgggctgacatccgtgattttgccgcctttctgtaacagtttgttcacaaatgtatcatgattttgcgcatctctgctcttgttatttggacacagttatgttacaattcagatagtattattgtctgcctttgtgcagattccactacggaaaggagttcttccaccatggatcatcccaatcagaataccatgcttttaccggcttcctatgccgttatctccgaagaggaaatgacctatctggatggcggtcagtccatctaccttggctcagcctttaatcacgatatttatttcaacaccgatcagtttgctacattctgccagaatgcagcaatcaacctgttcgtgctgatgaccaactattccttccggtacatcgcaggccgtgtgcagtccggtctgtcgaatggtctgagcctgtccggcaccttctatcacacctgggataagatgaacacctggagccgtatcgcttctgtgggcgttgccggtctggccggtgtctatgtctattcgcaggtcatgaacgtcattcgtaccgttacaagcatctacgatcagatcgtgaaccccatgccgagctttgatgccgctcaggccgagggaaccgctgcagcctgagtttgattccattcccggaacgatcttgtcagaaaggagctttctccatgaaaaaccttcagatgccgcattcatacatttctgtttccgaagaagagctgcgcagtatttccggcggcgggccgctgggcgatgcgctggatcttttcttcagcaatctgcgtctggacgatcttttctttagcggcggattgatctcactttctttcacctttgtgcccatgctgctgttcaatgtggtaaagacaggcttcaacttcgtggtaagcgcctacgataccatcgcagacctgttccatttttcccacgaggagcgggacatggtgcagtatatctcggatcagcagcgccgggaagaagagaaagagcaggctcagcccgctcccggcccgaaaccggttttctgaactttcccagcagtataaagcatagcaaaaaacgcatctgcaaaatcttgcagatgcgtttttgttttcagatcactttcactgccccctgctcccgcagacgcagaatgtagcagctgcccttgccgaatacccgctcgatctcgctgtgatagcgttccagcaggctctggggaacatacgcctgaatggtgcctgcaaagccgccgccctgcatccgccaggctcccgtgctgccctgcaggatactctggctcagcgccagtgccaccgaaagcccctgatgccgcacatcggtgctgcagtagacattctggcatagcgcaaaggatgcacgtccgctttccagcaccagcgctgcaaaggcatcaaactgtccggcctgcagcgcgtccctctgggcaagggtgcgagcgttctcttcaaaatagtggatggcgcgcagcaccgcgcggtcgccgcaggctttgcgcagcgcaggcagtgctgcccagaatgcgctctccgtcacctgtcccagcacctttttgccaagaaacgctgcgatctgctccatctcctgccggatggctgcaaactcaccggtcaattcgctgtggctgccgcgcgtatcggtaacgcacaggctcatgcccggcggcagcaggccgtcggcgtggatcttttccagaaccggctgctgggggtctgcaaaatccgcaaagataatgccgcccactgcgctggtcagctgatccagcaggccgctgggcttgccaaaataggtattctccgcatactgacagatctttgccagctccgccggggccagaccgcagccatattctccgttccagatggcagccatgcccatttcaaaggcagcagaactggaaaggccgctgccgcgcagcacatcactggccgtgtatgcatcaaagccgcccaccgctttgcctgccgcgcggaagccctcggcaatgccgcggatcaggctggccgagtgggtgctctccccttcctgcggcccctccacggtcaggtcgatcacatccagcttgttgaacccgcgggatttgacccgcacgtagccgtctgtattgtgcgcagccacggccacaagatccagcgtgacagccgccgcaaggccataaccgtgctggtggtcggtgtggttgccgcccagctctgcgcggcccggtgccgaataaacctgcacctgcctgcccggcccaaagtacagctcaaactgttccagcgcagcacagtagcgtgcccgctgccgacagatttcctgcgtcgcatcgccatacagtgcccggagcttatcgtcccatttgcccgccgcgatctcatttcggagctgcgcactgtttgccataacgattcctccctcaatatgctgctttgggatagatgggtatgttacgtctattgtaatgcatccaaccgcttttttcaatttccaacgctgaaaaaacgcgaattttggcacccagttcaaagaataagatgtacttttgttgaatttgcgggcagatgtgtggtatactataccaaagatcgggcacaaagctgcccgcaacgtgacagagcggaggaaacgcggctatggcagatgtatataagcaatccttcaaacaaaattataccaataatattgagctttccatcttcaattgcggcatcgaacgctgtgctccgggccaaacatgggggccgggtatccgcgaccattacctgatccatctggtactttccggcaagggcgtattcgaggtgggcggacgcacctgggaagtgagccagggccagctgttttttgcccggccaagccagctgatccggtatactgccgatgagcagcagccttgggagtacagctgggtaggcttcaacggtgcgtgtgcccacaaactggccgcgcagctccccttcaccgacgactcgccggtgcatcacacccacgaccccgatgggatgcgtgctgctctggccaacatttattcctcccgcgggctgcagccgcaggatgaagccgccatggtgggctacctttatctcttcatcgcttctctgatgaaggagaccagcgctggcaaaccgcacacggcttcctcttccagccagtatgtgctcaacgccatcaagtacatccagttcaattattcacacgatatttccattgatgatgtggcaaaaagcgtaggtgtctcccgcagtcacctgtaccgcgtgttcatgctgaacgtaggcaaaagccccatcgattatcttaccgaataccgcatcaacgaagcctgcaagctgctgcgcgcaggcaacctttccattgccgaggtcgcggtgtcggtaggcttctttgaccagttctatttctcgcgggtattcaagcgcgccaagggcgtgccgcccagcaagtattttgcggcgcaggctgatgctcccgccgacggccccgaccaccagtaaaggagacccttcatgcccttacagaaaaatcaagttctcaccctgcgcgtagagcgtctttccagcgatggcagcggcgtagcacacagtcccgacggtgagaccgtgtttattcccggtgccgcccccggcgacgaagcccgggtgcgcatcgttaaggactgcaagcgctacgccttcggtattctggacgaggtgctcactccttcgccggaccgtatcccggtggattgtgccgtggcaggcccctgcggcggctgcagcctgcggcatctggactatgctgccgagctgcgcgccaagcaggagaatgttgcagatgcctttgcccgcatcggaggattggatgtgcctgtgctgcccattgtgggttcgccggaagtgaaccgctaccgcaataaggtgcagttcccggtgggcgtggacaaaagcggtaagccctgtatcggcttctacgccgggcgcacccatcgtatcgtcccctgcccggactgccgcctgcagcccggtgtgctgaatgagattggcaacgcattgtgcgctttttttgcagaaaagggcatccagccgtacagcgaggagaccggcaggggccttgtgcgtcatatctttctgcggcgcggcgctcacagtggccagatcatggtctgccttgtctgcacccgtgccaagctgccctccgctgaagagctttgcacccggctgaaagctcaatttgcagagatcaccacgatcctgctgaacgtaaatgctaaaaacaccaacgtgatccttggcaccgagacccacaccctgtatgggcaggggtatattgaagacaccctgtgcggcgttccggtgcagcttggcccgctttccttctatcaggtcaatacccttgctgctgagcagctttacggcattgccgcccagtatgctcagcttaccccggacgacctgctgctggatctctactgcggcatgggcaccattggtctttccatggcagcgcactgccgtgagctgattggtgtggagatcgtaccggaagccattgaaagtgccaaggctaacgctgcccgcatgggtgcagatgtggccgcaaagagccgatttttctgcgcagatgccggtcaggccgccacccgccttgccgctgagggccttcacccggacatcgtaatgctggacccgccccgcaagggctgcgacgaagccaccctttccgctgtcgtgcgcatgtctccccgccgggtggtctacgtcagctgcaaccccgccaccgccgcaagagatgctgcatggctggaacaaaatggatatcacgcagagaaggtgcagccggtggatctgtttccaagaacacggcattgcgaagcggttctccttttgaccaaactccatgtcgagcggcatatcgaagtggacgtcagtatggatgagctggatgtgactgccgcagagagcaaggcgacttacaacgagattcgggattatgtgtgggaacaccatcagttgaaggtatccaatctctatatcgcacaggtgaagcagaagtacagcatcatcgagcgagagaattacaataaagcgaaaaatgaaaatgcaaagcagcccaagtgtccgaaggaaaaagaggatgcgattgtggaagcattaaagcattttcagatgatttgatttacagtatgtccgtctgattttcaggcgggcattttcttttgttggaatatggtgtttctatttttatcgtggtacaatatcttaaagactttttgatttcggagggagccgtcatgatcgatcttgcaaaactggagcctgttttgggcggataccagacctatttcccgaagcattggcctcatgttgaagatttcaaatgggaagccgcgcagcatttccacgaccattggaatattgacgcggcagattttggtgaaatgttcaaggaagccactgcaaaggtcttttcgcttctggataccggctatgcctatccccgtgcgatgatcctgaatttcgcagcagcggactgtgaagcaacacgcgcaatgttccgcagcttgtttgatgaatccaccgaactttcccagcgcattattgcatttcaggctgccaccgaagaaatacgcacaaaatacaacgacggcagttggaataaccactaccagaacaccagtgccatcagcgtctatctgtggctccggtatccggatcaatattatatctaccgctattccgttgcccgtgacatctcggatgcgctgaacttcgatgctccgcccaagcgggatggttccgtagaatcgctgctaaacagctaccgcctttatgatgagctgcgggtggcactgagccaaaatgctgccatcacccagatgatccgcagtgccattgaagcagcccctgccggaaaatactggccagacacacactggaatatcgctgccattgatctgggcttttatctgagccgtttctaccttgccgaacaaaagacatcacagatgcaggccggatggtttcctgctgaaagtgagtatgatccgggcattacaaccgcacagtggagtgctttgctgcaagacacctcggtttttacctcggaggctttgcgggtgatgaaatgtatgctggattacggcgggcaggccacctgcaaacagcttgccattaaatacggtgaaaccagcaacttctacatctccaactcctaccatcttgcacagcgggtggcagaaaagactggctgccgctgcatgccccgcgacagcgaaaatatgcgttggtggcccattttatatgtgggcaaaagcacaaaggcggatggcacttacatctggcgcttgcgagatgagcttttacaggctctgaaaaaagccgacctctcgaaagtaccggctgccgctgccacctgtgaagcaccttcacgccactactggtggctgactgccaatcctaagatctggagttattccagtctgcgggtcggcgaagagcagacctatacgctgtacaatgacaacgggaacaagcgcaggattttccagaatttcctcgatgcaaaagccgaggatctagtgatcggctatgaggccaatccggtaaagcgagtggtagctctggccaagatcacacaggaaagcaacggcaaagagatttattttgaaaagaccgagagcctgacttcccccattgactatgctgtactgaaggctttccctgagctggagaaaatggagttcttcgtacagccgaacggaagcctgttcaagctctcggagggtgagtacaactttattctggatctgatccgggatgaaaaccctgctcccgtccggcaggcatctgccgacagctacaccagagttgattttctgcacgatgtttttctgagtgagcaacgctatgaagtgttggtttctttgctacgccacaagaaaaatatcattctgcaaggtgcacccggcgttggaaagacctatgctgccaaacggctggcgtactctataatgggtcaagctgattcctcccgggttgagtttgttcagttccaccagaattactcctacgaggatatcatgctgggctaccggccggacggctccggcttcaagctgacagagggtgtattttaccgcttctgccagaaggcttccaacgaccccgaccgagaatactttttcctgatcgatgagatcaaccggggcaacctgagcaagatcttcggcgagctgatgatgctgattgaaagcgaccatcggggcgaaaagatcacactggcctataacgggatgcccttctatgtcccggaaaatttgtacattatcggtatgatgaatactgccgaccgcagcctggccatgatcgactatgcactgcgcagacgcttcagtttcttcgagattgaaccggcgttcacctccgatggattccagaaatatcaatctgcgcttgacaatgaaaccttcaatgctctggtggaacagatcaaggcattgaaccgggaaattaccacagatgcctccctcggtcccggatttcgtgttggtcacagttacttttgtctggccgaccctgctgcctgcaccactgactggatgcgctctgtggtggagtttgaccttctgcctacgctggcagaatactggttcgacgcgcccgataaactgcaccgttgggaaaagaatctgcgtggtgttttcaatgacgactgacaaagggatctttatccagaacatctactacatgctctcctacgcctatcaggtgctgcagcagcaggattatcagtgcatcgcctcggaaaagtttgagcgtatcgacgatttgtttgctgccatccttgcaaagggtgtttcccggcagctgaagcaggggctctatcgagaatatgtttcccgaagcgagacccggtcagttttgcgtggaaagctggatcttccgcagaccattaagacccgtatccagcacaagccacaggtcgcctgtacctttgacgagctttccgaggataacctgtataaccagattctgaaaaccaccctgcatgtgctgcttcgggataagaatgtttctactgagcgcaaagtggaattgaagaaagcgcttctgtttctggacacggtttctgcactgcttccctctcaaatcccatggaagcagttacattatcagcggagcaaccagaattacgagatgctgttgaatctctgctatttcgtgctgcacgatatgctgcagaccaccgaaaacggcagctataaaatgacagcattttcggatgaacgcatggcaaagctgtacgaacgctttattctggagtattaccgacaaaatcatccctaccttactgaggtcaaggctgcgcaggtcaaatgggatcttgtgggagagcacgatgctgccatgctgcggtttctccctgccatgcaaaccgatatttttctgcgttttcgcgaaaaagttctcattctggatgccaagtattacagccagacattgcagcagcagtttaataaagagaccctgcattctgccaacctctaccagatctacacctacgttaaaaatcaggatgctgcccatactggaaacgtttccgggctgctagtctacgccaaaacgcaggaagccatcacgccgaattgtctcttcaacttaggcggcaatcagatcggtgcacgcaccttggatctcaatcaggattttcggcaaatcaccgcacagctggatggaattgcccagcagtttttcgggaagcatccgctttgatcttttccatgtcgatttacccgctttcacacccgcccgtctgttttttcaaactttctcctcctaagtgtccgaaggaaaaagaggatgcgattgtggaagcattaaagcattttcagatgatttgatacgcaatcaccccagagagaatagcctcttgtgcgttctctctggggtgatttttgcgttatgctacttccgggtagcgcatatatacatactcgtagattttcttctggtaggtctggatatcgcttacatcatagctattgggaagttcttgccaaagggtattgcgaatcaggttatccacaatcgccttagtttcctgcttgtccgtccaatggtcgagtttggcaatctgctgtttgatttttgtcaacaagtccacagacactttcttgatcgtttcaatttcctgcttcgtgaggttctccgaaaacagcaaatcgtacactgaaagctcctcgtcactggaaaagccctcacgcacatagcgctgctgctccgtgtccagtgaacttgcaagctccatcagatccatgaaggttttctcgatggtcgcacggttctgctccgcattgtaggcatcgatgatctcctgatagcggtcataataatcaatgcgctgcgggtttgcaaacaacattttcgccaattgctgattcaccagttcatccagatcgcgcagcaagagattcttccgccgggtgtgggcgaactcccggctcaacaggtcaaaatcaattttgctgatgtcaaactgccgggaaggtacagcctcctgatccggcttttccacatggatgtactcgttgacgatgccgttgatctgcaccatcaggtcggtattgtccgcgtgttttcgcttctgctgcaagccctcgtagatggcgagaattgcgtttttccgggcgcgcacggcatcgtccacatcgtcacggtctgcgtagcggaacagccgcgccagttcagacgcataggtctggaaggttttcttggtttccaacgtctcgcacatcgcgttgactgcatcctgtacaaggctcatcttttcaaagtcctgtgcgtccaccaattcctgcagccggaacccgtgttctgccagaaagccgtccgcttttccgatgaccgtgcaaatacgctggatcagctccgttttatccaccgttggatcaacacccgccgggctgttcttgctgaccgtataatctgccagagccttgcgcagcgcctttacgataccaatatagtccacgatcaggccgttgctcttgccctccgaaacacggtttgcacgagcaatagtc

SEQ ID NO: 1104 - DNA, 21023 bp, Unknown
  gut microbiota DNA sequence
cttgtccaaaagcacaaaggagaacctatgaaaccactgacccatggcggcgactgggcgggctaccgcgccgagtttggccgcgacccgctggatttttcggccaatgtcagcccgctgggcctgccggaaggggtggcaaaggccattacggcagcgcttgccacggccgaccgctaccccgacccgctgtgccgggccctgcgtgaaaaactggcggtggctgagggagtgcccgccgaatggctgctgtgcggcaacggcgcggcagacctcatcttccggctggcgctggctgcaaagccccgcactgcactggtaacggcccccacttttgccgagtatgccaccgcccttgaaacggcaggctgcacggtggaacggcattttttgcgggaagaaaacgattttgcggtgacgaaagatctcctgaacgcggtgcacccgggtacaaatatggtgttcctctgtcagcccaacaaccccaccggccagctggcagagcctgcccttgtggaagcgctgctgcgcagatgcgaagccgtgggtgcggtgctggccgtggacgaatgctttctggattttctgccggagggcgaaggcctttcggcaaggcatctgctgaaaaacagcaaaaaactgattattttaaaagccttcaccaagctttacggcatggcaggcgtgcgtctgggctattgcctgtgctctgatacagagctgcttgcccggatgcgggcagcgggccagccgtgggcggtttccagtctggcacaggcggcgggcatcgctgcgctggacgagacggaatatgtggcgaaggtgcgtgcattgatcgaagcacagcggcctgtgctggcagacggcctgcgggcgctgggcctgcgggtgatcgagggccgggctaactatctgctgttccgcgcgccggaagcgctgggcgaagcgctgcgccgcaagggtgcggtactgcgcagctgcggcaattatccgggccttgatgccagctggtaccgcaccgctgtgcgcacagaaaacgagaaccggcagctgcttgcactgctggccgaaaccctgccggaggtggcacaatgagcaaggcaaaatgcattatggtgcagggcaccatgagcggtgcgggcaaaagcctgctgtgcgcggcgctgtgccgcatctttgcgcaggatggctaccgcgtggcccctttcaaaagccagaacatggccctgaacagcttcgtcacccgcaacggtgcagagatgggccgtgctcaggtggtgcaggcacaggctgcaggcgtggagccggatgtgcgcatgaaccccatcctgctcaagcccagcagcgatgtgggcagtcaggtgatcgtgaacggcaaggcccggggccagatgcctgccgccgcctactttaaaatgaagcgcagccttatcccggacattctggaagcctacaacagccttgccgccgagaacgacattatcgtgatcgaaggcgcgggtagcccggcggagatcaacctgaaagccgacgatatcgtgaacatgggccttgcaaagctggtggatgcgccggtgcttctggcgggcgatatcgaccggggcggcgtattcgcccagctgtacggcactgtggagctgctggaagccgacgagcgtgcccgcatcagggggctcatcatcaacaagttccggggcgatgtggagatcctgcggcccggccttgccatgctggaagaaaaaatgcagctgcccgtgctgggcgtagtgccgtacctgcgggtggagatcgaggacgaggactccctctccgaccggctggatacaaaagctgcggtcaagccgctggatatcgccatcctgcgcctgccgcatgtatccaacttcaccgactttatcccgctggaacagcacccgctgctgggcgtgcggtatgtgcagcgcacccgccagctgggtgcaccggatctcgtcatcctgcccggcaccaagaacaccatggacgacctgcgctggctgcgggaaagcggactggaagcggcggtgctcaggctttcggcagccggtacgccggtgctgggcgtgtgcggcggctatcagatgctgggcgaacagctctgcgacccggcaggggaggagagcggcaccccctgcaccctgcggggccttggtctgctgcccaccacgacggtgttcggcaccgaaaagcacctgacccagaccgcagcctgtgtgaccacagaaccctttgcaggcgcaaagctgacgggctacgagatccacgcaggccgcaccgaggtgcggggcagtgcgttctgcatccttgcagacggcacgccggagggctgtgtgcaggacggtgtattcggtacctacctgcacggcctgttcgacaccggcgaactgaccgaaaaactgaccgcatttttgtgcaaacggaagggcatcgatccggccggggccgagcttatccccatggagcagtaccgtcagcagcagtttgatctgcttgccgatggtgtgcgcgcggcactggatatgcccgccatctatgccgccatgggaatgcaaaaaggagacaacacatgacaccgcagcatcatctgcccgccgacattgaacggacgagcatctccattatcacaagggaactggacgagctgggcctgaccccgccgccggagacggctgcggtggtcaagcgggtcatccacaccaccgcggatttcgactatgccaaaaatctgcgctttacacccggcgcggtggaagccgcagtcaaggccctgcacgcgggtgctttcatcgttaccgacaccaatatggcgctggcgggcatcacaaagccgggcctgaaaaaactgaacggtgaagccatctgctacatggcagaccccgctgtggccgaagccgcaaagcaggcgggcaccacccgtgccgttgccgccatgcaccgcgctgcccgggagcacccgggggccattctggccattggcaatgcgcccacggcccttttgaccattgcggaggaaatggaagccggtctgcggcctgcactggtcattggcgtgccggtggggtttgtgaatgtggtggaaagcaaggaagtactgtttgccgcctgcgagcgatacggcgtgcctgccatcgccgccatgggccgcaagggcggcagcaatgtggctgcagccatctgcaacgccctcatttactctgccgccgaaatgctggacccctctgccagagggtggaacggataaggcggaaacagcataacatcaaaaacccggaaccctttttgagccgttttggccgagaaaaggttccgggttttgttcatgattttttcagagagctattttgcaacagccccattttcacggaaaaggtccgaaccgagcacggcatccacactgccggcatcaggctgcggggaacgccttgttccacacttcgatcaccttgaacttcggggtccagccttcgggctcaaagcggtcgcccttggcagccatggtgccctgctcggtgcaccactgtgcggccttggccatatcagggtcggtcacatccgcaaaggcgggtgcgcctgcgggttcgggcctgcctgcggtgttccacaccagcatcgagccttttgcattgcttcccgtgattgtaacattgcgcatacccgtaatggtaaggcccaggccaccgtccattcgtgtatcattggtgcagaccagaacaatatccgtgctgtgtccaccttgaaaataccatatttcaccttctttttcaataaaacctgcgtgaaacgccccaaaacctgcgtgaaaaacgttttgcaccgctgtgcgcgcctttgccccctcttgcaatttgtgcgcaaagggtgtagaatacagtcacaatcaaatacaggggagcttgtgaagcaggctgagaggaagtatccaaacttcgacccttttacctgatgcggataatgccgccgtaggaagtcagaatggatgattttttgcaggaggcaccgcggaaggtgtctcctgttttttgttgtgcacctattaccattaaggaggatgccttgtacttttctgcggaagtgccgcagcgggctgagggggagcgccctgagctttgtaaccgtcagcgatgggaagccgtgttccggcgtgagaggagaccagcaagtctcgaccgcttcttatagttcctgcgccgggtctggcaccgggtgcgggctgtttgcggaggcgctgtatggtttttgctgcttccgcaggtttggaaaggagccttgccttatgaaaaaactctctgtgaaaaagctggcgttggccggcatgctgtgcgctctgtgcgtggtgggcagcgtattcagcttccccatgttcggcagcaaatgtgcacccatccagcacatggtcaatgtgacctgcgcggtgctgcttggcccgtggtggggcgtgggcgtagcctttgtggcctcgctgctgcgcaatctgctgggtctgggcagcctgatggccttccccggcagcatgttcggcgcactgctgtgcggccttgtgtaccataagaccaaaaacatccttgccaccatggtgggcgaggtgttcggcaccagcattctgggcggcctgtgcgcttacccggtggccatcttcctcatgggcaagagcgccggcgacatcgcgttctatgcctacatcgtgccgttcctcatctccactgcagtgggttccatcattgcgggcgtgctggtgtacagcctgcagcgctccggcgcactgcgctccatgcagaacagcctttcttaataaaggtgcgtgcaaatgtttaaaacagagtttgaaaatgtccgccgcacctgcccgctcatccataacattaccaactacgtcaccgtgaacgactgcgccaacatggtgctggcctgcggtgcttcgcccatcatggccgacgatgccgccgaggtggaggacatcaccaccatctgcggcggtctgaacatcaacatcggcaccctgaacagccgcaccatcaccagcatgctgctggcgggcaaaaaggcaaaccagctgggccatcctgtggtgctggacccggtgggtgcgggtgcatcccgcctgcgcaccgacacggctttccgcctgctccgggacgtaaagttcaccgtgatccgcggcaacatctcggagatcaaaacgctggcctccggcgcgggaaccaccaagggcgtggatgccgatgtggccgataaagttactgaggccaatctggacagtgccgtggcctttgccaaggcctttgcagcccagacgggtgccgttattgccattaccggtgccatcgacatcgtggccgatgccgaaaaagcctactgcatccgcaacggcaatgctatgatgagcagcatcaccggcacgggctgccagctttcggccctgacggcggcgttcgtcaccgccaaccccggccatccgctggaagccgctgcagccgcagtgtgcgccatgggccttgcgggcgagaccgcccacaagcgcctgaccccgctggacggcaacgccacctaccgcaattatatcatcgatgccatttacaatatgaccccggatcagctggaagaaggagcaaactatgaagtgcgataagcagaacatgcttctgtatgccgtcaccgaccgcgcatgggtgggaaagcagaccctctatgaacaggtggagagcgccttgaaaggcggtgtcacctgtgtgcagctgcgtgaaaaagagctggacgacgaagcctttctgaaagaggctgtggagatccatgctctgtgccagcgctacggcgtgccgttctttgtgaacgacaatgtggacattgccatccgctgccacgccgagggtgtgcacgtggggcaggaggatatggccgcagcgcaggtgcgcgcccgtgtgggcgagggaatgatgatcggcgtttccgtccacagtgtggaggaagcacgggaagccgtcaagcacggcgcagactgccttggcgtgggcgcagcctttgccacccacaccaagaccgatgtggacgttctgccccacgagaccctgaaggccatctgtgatgccgtggacatcccggtggtggccattggcggcatccacaaggagaatatcctgcagctcaagggcaccggtgtggatggcgtggcccttgtgagcgccatctttgcagcagacgacatcgagaccgagtgcaaagagttgaaagccctgtcggagcagatcatctgaccgatcccgcggcaaaccggggacaccaccttgggccgcgttataaaattcatggagaaaaccaacatgaaaagcgtattttgcgcaggtgccggcatccagaacgttctgttttttctgaatgacggctgcctttccctacccttgtatgaccagcaccctgctgttcagagataaactgtcatttggaggaacagagcgtatgcagacttataccactcagatggatgctgcccgcaagggcatcatcacgccgcagatggagatcgtggctaaaaaagagtatcgcaccaccgaggagatccgccagtgggtggccgagggcaaggttgccatccccgccaacaagcaccacgagtgtttgaaccccgagggtgtcggctccatgctgcgcaccaagatcaacgtgaaccttggtgtctcccgcgactgcaaggactacaacgtggagatgcagaaggtgatgagcgccgtcaacatgggtgccgaagccattatggatctttccagccacggcaacacccagcccttccgccagaagctgacccacgagtgcccggtgatgatcggcaccgtgccggtgtacgattcggtcatccactaccagcgcgatctggctgagctgaccgcacaggacttcatcgatgtggtgcgcctgcatgcagaggacggtgtggactttgtcaccctgcactgcggcatcacccgcaagaccatcgagcagatccgcaagcacaagcgcaagatgaacattgtcagccgcggcggctctctggtgtttgcatggatgagcatgaccggcaacgagaaccccttctacgagcactttgacgagatctgcgagatctgcgccgagcacgatgtgaccatctcgctgggcgatgcctgccgtcccggctgtctggctgatgccaccgatgtgtgccagatcgaggagctggtgcgtctgggcgagttgaccaagcgcgcatgggcacacaacgtgcaggtgatggtggaaggccccggccatgtgcccctgaatcaggtggctgccaacatggaggtgcagaagagcatctgcatgggcgcacccttctatgtgctgggacccctcgtcaccgatatcgcccccggttacgaccacatcaccgctgccatcggcggcgctgtggctgcagccagcggtgcagctttcctgtgctatgtgacccccgccgagcatctggctctgcccaatgtggacgatgtgaagcagggcatcgtggcctccaagatcgctgcccacgccgccgatatcgccaagggcatcccccacgcccgggacatcgacgataagatgggcgatgcccgccgtgtgctggactgggatgcacagttcgcctgcgcactggacccggagaccgcaaaggccatccgcgatgcccgcctgccggaggacgaccacagcgacacctgcagcatgtgcggcaagttctgtgctgtgcgcagcatgaacaaggcgctggccggtgagtacatcgacattctgtaaaaatcttctgttttgcgcgcagcagcgtgcatcttcctccgccgcccggtatgaccgccgggcggcttttgttgtaatacggcgaaaaatatgttacaataaatcaatacggacgagcgcattgcacacatcaaagagcgccatccggaggatcttcttctgtttgagcaatatggacgggaggctgtgctttctcctgatttgatcattcgggacagcaagcatattggaacagtttttgccgtgaaaaaactgccggatacgaacctgaatgttgttgtaaggcttgtgctggaaaccgatgaagcgggatttaagaattctgtcatgacattttacaggctccgcgaacgtaacttgaaaaaacttctggagaagaaccagctgctttacacgcgggaataaatttgctatacctatgggtaggataaggtagcgtttgaagtagagaatgtgctgctacacgccccttgggccaaaagaaatgcgggaaagggcacacccgccaaatgctactcgatggggaacggttcaaatgccgttccccgttcctgttttaaggggtcccttacggatctcttttttattatcgattatttctatcaatttttttgaatttacaattcttctgtactgtactataatgaagttatcgtcttcattccattgatctacaggaggaatctgccttgctggtaaatcttatcgaatccgtctatcgcctgctgtggggcgacctgttcaccatcccgctgggcggcggcatcggcatttccttcatggtggtgctgctgttcacggcgggcatctggttcacctgccgcacccgtcttttgccggtgcggctgttccgggatatgatcgccgccgtgtgcgagaaaaagcagggcaggaacggcctttcctccttccagacgctggtcatttccaccgccacccgcgtgggcatgggcaatctggtgggcgtggtggctgctgtttctgcaggcggtgccggtgcggtgttctggatgtgggtcactgccattctgggtgcgtccacctcctttatcgaatccacccttgcccagaaataccgccagcccgacccgctgtacggcggctggcgcggcggaccggcttactatctgcatgtgctggcggagcgcaggcgcggcaaaaagctcaaacgctctgtggtagcggcgctgtttgcggtgtctggcctcatctgctggtgcggcatcagtcaggtgatctccaactcggtcagttctgcgtttgaaaatgcgttccatattccgccgcttactaccacactggtgctcacggccgttgcggcggtgatcgtgctgcgcaagaatgccaccgtgaaaagtctggacgtgatggtgcccatcatggcggtgtgctattttgtcatcaccgtgggcatcgtgctgttcaacctgcccaagctcccggcggtgttcgggcgcatctttgcggaagcgttcggtctgcggcaggccgtggctggcggctttggtgctgtgctgatgaacggtgtcaagcgcggcctgttctccaacgaagcgggcagcggttcggcaccctgtgcagctgccgccgcagagtgcgacgacccggtcaagatgggctttgtgcaggcactgggcgtgctgatcgatacggtggtgatctgcagctgcacggcttttttgatgctgctggtgccgcaggagatcacagaaggacttgcgggcatggaccttttgcagactgccctgcagtaccatctgggcggctttggtgtcgtgttcattgcggccacgctggcgctgttcagcttttccacctttctgggcgttttgtactatgcccgcggcaatgtggcctatctgtgcggcgacaactggtggagccagaccgtgtataagctgatcgcgctggccatgctggtgatcggcggtatgcaggcctacacggtggtgtgggatctgggcgacgtgggcatcggcctgatgactattttcaacatgatagctttggtgcccatggcaaaggaagcgcttgccgccctgaacgactacgaaaaacgcaaaaaactgcagtaaatagcaaaggcccggctccctgtaacatgggaaccgggcctttcaggttattttattgcagatcagatttgtttaaaagcagcccgccagcaagcccggccagcgcaggcagtacccagccaaagcccatgctgcccagcggcagagcgttggcggcggcagatactgcccccagcggcagcgcagcggcgatgctctgcagggcggtcaggcccatgcacagcggatacaccgcccggtgcttttcaaggcccggcataaaggaaagcaggatcagcacgatggctgcgggataaatggcgttcagcactggagtggacagccggatgatggcagcaaggccgaggttcgataccagcatactggccacagcaaaaaaagcggcaagggcagggtaggggatgcggggcagaagctgatgaaaatactgacccacgcaggcgatcaggcccacgcaggtgttgaagcatgcgatcacaaaaatggccgcaatgagcacaaggcccgcccggccgaacagctgctgtgccagagcggtgagcacctcggcaccggtggcaaggcccggatacaccgtgccggtctcggccccggcgtggcccagcatggcgtagaccaccagcatcagcccgcctgcaataaaaccggcccggatggtgccgccctccacggcacggctttctgtgacaccccgggcgcggatgttcagggcaatgaccgcgccaaaattcagcccggccagcgtgtccatggtctggtagccgtacaggatgccctgcacagcgggcagggctgcgtactctgcactgggtgtgccgtagtgtgccgccagcggatggatgagacacccggcaaacagcaccacgatgagcacgatcaggcaggggcagaggatgcggcccagccagtcggtaagcttttccggccgcagcgccaccagaaaggccgctgcaaaaaacagcaccgagtaggccagctgcagcccggtaccgccgcctatcagcggcaccagcatctggaaggaggtactggcggtgcgggggatggcaaggcacgggccgatggaaagatacactaaaattgtgaacaccatggcgaacaccggatgcacccggccggcaagcctgtccagaccgcctgcccgtgccacagccaccacgcccgcaatgggcaggccgacggcgctgacggcaaggcccgcaaaggcaggccagaggctggtaccggcctgtgcgcccagatgcggcgggaagatcagattgcctgcaccaaaaaacatggaaaacagtgtaaagccgaccagaagcagatttttgccggaaagcttctgcataggacagacacctcatttctttcttgcatcaaagatgacagagattcatacagttcagtttatcgttttattgatttcatgtcaagaaagaaaaacatgaagaaaagtaatgacaggcatgataagctcttatgcatcatgatgcacgggtcattggcgtttggaaagagatatggtattataatgtataatgtagaactgggcaggccatcagggcgctttctccgcgaaattcggggcttccagctcccgccctgttgccttatggcaacagggtcctatcctcggactattcgctgaagaaacatcctgccgtcctgcatttatttgtaatcaggagcagataagtttatgaagcaacataaacaattttttcagcggctgggcgctgcggccttctggctggcggtgtggcagtgcgccgccatggcggtgggacaggaggtgttccttgtttcgccggtgcaggcggtgcgcactcttttgcagcttttgccgcaggcagagttctggcagcgggtgggtttcagctccgggcgcattctgctgggttttgggctgggcgtggccgtaagcatcgtgctggctgtggccgcacaggcgtggcacacggcagatgtgctgcttgctccggtgctgcagctggtcaaagccacgccggtggcaagctttatcattctggcgctggtgtgggtgcggggggcatcgctttcggtgctcatcagctttttaatggtgctgcccgtgctgtacggtgcggtgcgcaccggcatccagagcgcagacccacagctgttggagatgacgaaggtgtttcgccttccgctgggccgacggctgcgggcggcgtggctgcctgcggtgctgccggccttccggcagggatgcagcgtggcccttggtatctgctggaagagcggcgttgccgctgaggtgatcggcctgcccaatggcagcatcggcgatgcactctaccgggccaagatcaccctttccaccggggagctgttcgcatggacgtttgtgatcatcctgctcagcgccgggtttgaaaagctgttcctgttgcttctggactgcgtgacccgcgccgtgaccggggaggtgccgcaatgctgaccatcaagcatctgacaaaacagttcggggagaaaacgctgttccggaacctctgcctcacggtggaaggcccggcggtgctgtgggcacccagcggctggggcaagaccacattgctgcgcatcctcatggggctggaagaacccacttctggcatagtacagggcgttggccgggtggcagcagtgtttcaggaagaccggctctgcccgcagctgacagctgtgcagaacgtgacgctggtattgcccggcagtgcagaacaatacaaagagcaaatcataaaagattttcaacagcttggcatggatgctgctgcactggccctgcctgcagcacggctttccggcggacagaagcgccgcacggctctgctgcgggctttgtgggccgccagcgatacgctgctgttagacgaaccctttaccggaatggacccggacacccttgccgctgctgcggcgctgctgcgggagcgctgcggagaaaagcctgtcttgctggctacccacgaccgcgaagccatccgccttctgggctggccggtggttgagctggaaaatgcctgagcctgcatcgatcctatagaatgaaaaatcggaaagaccagaacggcctttccgattttttgctgcttggaatattttactgaaaaatacgcaggggatacggcgaactgcatcagttcagcagctttgccgggtcaaggtactgctcaccctgcagtacttccagatggatatgcgtctcctcggcgcattcgttgggaatgctgcctgcacggccaagtatctggcccacactcacttcatcgccggtctgcaccgtggggtcggctgtgccacacacccgccacaggtgcccggcgctgtcctcgatgcacaccacactgccccagcggccatcggtgtccacggcggtcaccttaccggcggcgggagcacacacctgtgcatcctgcgcacaggcgtagtccacaccgttgtgggtgcgccagtcgccaagggtgctgctgtacaccagctcatcgccgctgtaggcgttcaagaccctgcccgagacgggctgcgtggaggcaggcgcagctgaactgctggcaggcgaggatgcgccctgcagtgcggagggttcgtgcaccaaaccagagccagactgcgccccagaagaggacgcagaggatgcgggcttgggtacatttgccgaagattctgcggcgtcggtcacgggctgctgccatacatcgtcctcctgtgggtcaagggtgagctgcggctccggtgcaggttcctcctgcggggtcgttaggtcgtcgtagctctttttcagttcatcccgcacggtgcgcactgcccacacgcccgccgctgcggctgcgacgagacaggccagcagtgccagtgtaaagcccctgctgcgcaaaaactttttgatctgctccattgtcgttactcccatctgctgcattgtgtacgcattgcttctgggcttagtgtgggacagcagggcaggttttatgcattcttttatttaaatgccctccgtgttgctctgggcatatttagaggaaatgatattttgtaatagagcagcccagccagacctgcgggtctggctgggctgcactttcaagggaagggctgcagccggaaaatgcatcttccctctgtggccttctgtgttgatacccagagcgaagcggagggtattctaaatgatattaccaaacaaaaaggccctcccttttcgggagagcccttgcagatcaaaaatcagttgcggcggcggctgttcatgcccagcaggcgcacaacatacaggaagatgttgatgaagtccagatacaacgtcagtgcaccgtaaatggaagccttctcggccagctcaccgtcataggcgtagtaggagaacatctggctcagcttctgggtgtcgtaggcggtcagcagcatgaacactaccagaccgacagcgctgtacagcaccgtggtaaggaagctcatgccgaacagcatgcccacaaagccggtgatgatgagcgcgaacaggcccatcatcagcttggggccccagccggacagatccttgtgggtagtagtgccgtagaccgccatcaggccgaagtacagcgaagtggcaaggaaggccagcaccagagtgcccagatcaaatatcaggaagtagtagctcagcaccatgccgttgagcagtgcataggcaaagaaggtggctcttgcaccgcccaccgacatgttctgcacgcgggagctgagcacatacaccagcaccagctctgcgatggtgaacaccagatacagcgagttgacaacgtacagcagcggggtagcggctgtaacgaacgccgcggcaaaggtgatgagcaggcctaccgccatccagcgataggtgcggttcatatagtcagccgaggtcatggcaggctccgtgtagcctcgatcgtaaccattgtaattgtaatccatatgggactcctccagtctctttctgccggaacacttttttcttgctccggtctacggaatatagtatactgcatagaaatgaacgtttcatgaaaaaggctgtgatattgtatgtctcttgggctttatttacacataccctactgtttttccaaatgcagatactgcgatttctattcccatcccggtgagcgcggcgtaccggaagcttatgtggatgctcttttgcgggagctttcccgctttgcaccggagaggcccctgcagccggacaccctttattttggcggcggcacgcccagcctgctgcgcccggagcaggcaaaacggctgatcgatgcggcctgtccgatgccgggagcagagatcacactggaagcaaacccggagacggtgacggaagaaagccttgcaggcttccgggaggcgggcgtgaaccgcatctctttcggggtgcagtctgcccgggatacccagctgcgcacactgggcaggccgcacacggcaaagcaggcgcgggctgcctttgccgccgctcggcgggcagggtttgcgaacatcagcggcgacatcatgctggcactgccgcactacaccgaagccgagtttgacgaaacgctggaactgatcgagggtggtggggctacccatatttcggcatatctgctgaagatcgagccggattcggcctttggtaaacatccgcccgaaggcctgcccaccggcgatgaagccgccgatttttacctttatgcagtggaacagctggaacaccacggctacaaacagtacgagatctccaactttgcaaagcccggctatgagggcagacacaacctcatttactgggactgtggcgactatctgggccttggcccggcggcgcactcctgcatgggcggcagacggttctactacccgccggacaccgccgctttcctgaacgatgccgccgccccggtgatggacggcagctgcggcgcagaggactaccttattttacagctgcgtctgcgcaaaggcctttcgctggatgcatacaaaaaactttacgggaaagaattttccaccgcacagctggcctttgtgcaaaactgcgtccgggcgggctatgcaagctttgacggccgtacccttgccctgaccccggcgggtctcatcgtgcagaacagcatccttgcccagctgttgtaattggtagaaatacggcagaacattgcttttgtgtgtcgattctggtatgatatactcgtattattaggcgatgggagagaaaacggatggcgaaagtattgatcgtcggcgcaggcgcggcaggactgatggcggcgggtgccgccgtgcggcaggggcatcaggtgacggtgctggaacacatggataagcccggccagaagatccttgtcaccggcaagggccgctgcaatgtgaccaacgactgcccggcagaggagtttctgcgccatgtgcgcacgaacccgcgctttctgtattcgtcgctgggggcctttccgcccgcaaagaccatggaactgttcgagggccttggcgtggagctgaaggtggagcgcggacgccgggtgtttccggtgtcggacaaggccgaagagatccggcaggctcttttgcgctatgcgcaggatgctgaactcgtccatgacggcgcaaaaaagctgctgctggaagaggtaacaccggagccggaagcagctcccgccgcaccggaaaacccgcgccaccccaaaaagaaaaaggcaggcccggctctgcggtgcatcggtgtgcggggcacctccggccgggagtaccgggcggatgccgtgctggtggccaccggcggcgtgagctaccccaccaccggctctaccggcgacggctacaaactggcccagcaggccgggcacaccctcatcgagccggtgcccagtctggtcagtcttgtgagccatgacgcggactgcaaaaagatgatgggcttggcgctgaaaaacgtcaccctgaccctgttcgaggacagcaaggccatttttgacgagcagggcgaaatgctgttcactcattttggcatcagcggcccgctgactttgagcgcatccagccatctgggcgacatgaaaaaacacaagtatcatgcggagatcgacctcaagcccgctctcagcgaggagcagctttatgaccgcatcacgcgggattttgccctgctggcaaaccatgcggcgcagggcgcgctggtaaagcttttgccgtccagtatgcagccggtgatggtggcgcgctggggcatcgacccggctaccaaggcaaaccagatcacccgggagcagaagagggagctggtgcagctgatgaagcactggcgggtgtccattgatgcccggggcgatctggcccacgcggtgatcaccagcggcggcgtgtccgtgcgggaggtggaccccaaaaccatgcagagcaaaaaggcgatgggcctttactttgcaggcgaagtgctggatgtggatgcctataccggcggctacaacctgcagatcgccttctgcactgcacaggcatttgcaaataatctgtaattacagataaaacaattttaaatgccctccgcgctgctctgggcatatttataggaatagatttttttgatttgtattttgaaaacgactgcggtcgttttcaaaatacgttttcacaaaaagggttgttgccgggatagtctcacagaccactgcgcaactgttcccaaagggaacgagcagcagattcagttggccgttgcggccccgcttgtgaaaaatcaaatctggaaaatccgcagattttccagatttgtaaatatttaaaatgattttccgctgaagatggccagagcgtgagcagaggccattttaaatcgttcagttcaaaaaaggagaagatataaaatggtatctgttgcgatcgacgggcctgcaggtgcaggcaaatctacgctggcacgccgtttggcggctgaaatgggctatatttatgtggataccggtgccatgtaccgcgccatcggcctgtatgccctgcgcgcaggcaaggaccctaaggacaacgacgcagtgaacgcgctgcttccccagatcgagctgcggctggcctccattgagggcgagcagcacatttatttaaaggaagaggatgtgagcaccgccatccgcaccgaggccgcaggtatggctgcctctgccgtgggcgcaaacccgactgtgcgcgcctttctgctggagctgcagcgggatatggcaaagaaacaggatgtgctgatggatggacgcgatatcggcacggtggtgctgccggatgccacggtgaagatcttcctcaccgccacgccggaagcccgcgccacacgcaggtggaaagagtatcaggccaagggcatcgatactccctatgaagaggtgctggccgacgtgaagcagcgggactatcaggacacccaccgtgccgctgcgcccctgaagcaggcggacgatgccgtgctgctggatacttcggagctggattttgaacagagccttgctgcaatgaagaagatcattgcggagaaagtgaataaaacgataaaatgatattatattacatcttagtgccctttgcgtggcttttgtggcatatcggcttccgcatccatgtagagggccgcgaaaacctgaaaaaggtgcagacaaagggctgcatccttgcgcccacccatgtctccgccatcgacccggtgttcatcgtggtcacccggtggagcaggcggatgatcgtgttcgccaagaaggaactgttcgagatcaacgccctgctcacatggtttttccgctgctgcggcgcggtgtgcgtgcgcggcacaaaggatgaaatggctgccattgagcagaccgtagaaaagtgcagaaacggcgaaacactgctcatcttcccggagggcacccgcgaaaaggacgggaagcttctgccgcccaagagcggactgttcgtcattgcggcgggggccggggtggacgtagtgccctgccgcatcctgtacgatacgccggatggaaaaatgcacctgttctgcaaagtacgggtgatctacggcgagccgatgcctgcagagcagtttgccatggagagccgccgcgacaccaaaaagctgcgtgccaacaagcaggccctgctggatgcgtgggaaaagatgggggcgtaaaagatggagatccgagttgccaaaacggcggggttctgctttggtgtcaagcgggcggtggacctgacctatggcctgctgaacgaaggctgcaaggtggccaccctcggcccgctgatccataacccgcaggctgtggaggatatgcagaaaaagggtgcccttgtggcggatgccatcgccgatgtgcccgccgggtacgaggtggtcatccgcagccacggcgtgccgcgcaccgtgtacgacgagctggatgcgtgcggcatcacctaccatgatgccacctgtcccttcgtgcagaagatccagcgcattgccgccgaggccgaaaaggcgggggcagtgctgctggtggcaggcgacaagacccatccggaggtgcaggggatcgtgggccacacccgcggagaggtgttcgtttttgccgatctggccgagttgaaggcatggaaaggcccctctgacccgcaaaaacccctgtttgcagttgcacagaccacatttcaggttacaaaatggcaagaaagttcggagtttctcaaaaaagcctatacaaacgcccgaatttttgatacaatatgtaatgcgacgtgggcgaggcaacaggaagcggaagacctcagccaaaaatgcgacatcattgttgtcattggcggtcatcattcttccaatacccaaaagctggtacaggtcgccgcaaaacacacgcgtgccgtaacggtcgagacagcgagcgaacttcggccggaatggtttgcagatgttaaagtggcgggcgtgacagccggggcttcaacgccatcgtctattattgaggaggtacttaacagtatgagcgcagaaatcaatgacagcatgagctttgaggagatgctgaatgcatccgaggaaaagcgtgttcatgcaggcagtattgtgaaaggaatcgtgaccagcatctctgccaacgagatccaggtggatatcggagcgaagcagaccggctttgtcaagctgagcgagctgaccgatgattcctccgccaaggtcgaagacctggtgaaggttggcgatgagctggacctcatcgtcgagaaggttatggatcaggatggcgtcatccagctctcccgcaagaagctcgcatctcgcaagggcatggaagagatcgctaaggccgctgagtccggcgaggtcgtcgaaggcgatgtcaccgagttcaacaagggcggcgttgtggtcaacgtcaagggcgtcaaggtgttcgttcctcgttctcaggctactatgcgccgtgatgaggactacaccgctctggttggccagcacgttcagctggttgtcaccgagtgctccggccgcaagatcgtcggcagcatcaacaaggtgaccgctgagcagaacaaggcaaagcgtgaagagttctgggcaaacgttgaggtgggcaagacctacaccggcgttgtcaagagcctgacttcttacggtgcattcgtcgatatcggcggtgtggacggtctgtgccacatcagcgagctgagctggaaccgcatcaagcatccctccgaggtcgtctccgttggtgacaccatcgaagtgtatgtgaaggacatcgacaccgagaaccacaaggtctctctgggctacaagaaggccgaggacaacccctgggagcagctgaagaacaactaccccatcggcagcaccttccatgctccggtcgtctccctgaccaagttcggtgcattcgtccgcatcctgccgggtgttgatggtctggtccacatcagcgagatcagcaatgaccgcgttgagaaggtctctgacgtactgaaggtcggcgatatggtcgatgtgaagctgctggatgtcgacttcgacaagaagcgcatcagcctgtctatgaaggccctgctgaacgacgacgctgagtaatcagcctttcgttcggaagaaaagcttctgacacaatgcgatcaacagccccgttgccgggaaaacggcggcggggctgtttttataactgaaattccaattttctcttttagaga

SEQ ID NO: 1105 - DNA, 61171 bp, Unknown
  gut microbiota DNA sequence
aaaaacattttttgcgccgggaactagatatcgccagatatcactggatggcaccagatggaagatgagtataaaaactcaaaatcccttgtgctaataacacgtgtgggttcgacccccaccaccggcataaaaaggaagccctccagcttgtctggggggctttctttttatctgcggcgtgtgagcgggtcgaacagcacgaccctgcacagcaggggagcaatcagccctgcgggctgttgctcagtgcgcgggagacccccaccaccggcataaaagcccatcaggcattcgcccaatgccgttaagttaagaggctaaagaaaaatagacttcatcgaaaagatgaggtctatttttttttgaaaaagatcagaaacagattttacgcaccctttgccggatatgccaaggcccccacagaacacgggatctgcaggggccttgcgggcaatattttacagcattttgaccgccagtgcttcactggtgcgatcctgtgcggcgttggcattttcggggtcgtccatggtgtagcgcagcaccagcacttcagccacatacagcagcgccaccttgaccgggatgttgccggagtccagcgggctttcctgcgcaccacacagcagcacgatatccgccagctttgcgccgggcgaatcctcataatgggtgagcagaatgatctttgcgcccgccgccttggccgcgcgcagcgtttccagcatatcgcgggtagcgccggaataggaaacgaacagcaccacatcctccggggtcatcaggctggccgtaatcagctgcatatggctgtcgcctgccgtgcggaacttggtggagatgcaggcaaagcgggcgcagatatcatttgcaatatacatgctgccgccctgaccaaggcagtacacctgccgggccttgtgcatcagctccgaagccttgtccaccgcctccggcgaaagattgttctgggtgccgttgatagtagtcatcagcagggcgctggcgtgctcgcacaaagttgccgtgtcggcatccggctccggcacatgctggttgaccagtgcaccggtggcgttggcctgcgccagcgcaatgcgcatttcatgatagccctcaaaccccagcgcccggcagaagcggaacaccgttgcctctgccacacagcactcctttgcaagcgaggagatggacagatactgtgcctctgccgcatgctgcacaagatagtccgccacggtgcggcccgattttgtcaggtcgccctgatgctgctgcagcagctcccaaaaattcgttgccatttttctttttcctcttttccggcgcagcagtccaccgacccggatcagctgccgaccgtttcattcacctttataaaaagtataaaagaatcgtccccgcttcgcaagagacgcattgcccacattttggctcgcagttctgtgcagagcacacagttttggcggaaaagccggccattttgtgaaaatatctttcaattttgcatttttgtttagaaaaacattttcactattgttttggtgggtttgtaccattttgtaatagtttcagaagagtaaagcgaggttttctttgcatttcaacatatatcccacacttttgtgcacaatgcacactgtcattctgaaaatttatgaaaaccatgaatggacaaaatgaaaatatttttctataatggagccatcaagagcggccgctggcacggcaggccgccaacaacgtgaagcatcttgaatgcgaaggagaaactactatgaaaaactgcatttcccgccgttcgttcctgaaggccgctggcattctgggcgcagccggcgctctggccgcatgcggcggctcttctgcaagcaccagcactgctgcttccaccgcaggttctaccgctgcaagcgcagctgcttcttccaccagcatcaagctgtggacataccccatcggcggctggggcaatgacgagaccgttcagggtctgatttccagcttcaacgcaaagtatcctgacatcaaggtcactgtggagtatctggactacaccaacggcgacgatcaggtgaacaccgccatcgagggcggcagcgcacccgacctgatcatggaaggtcccgagcgtctggttgcaaactggggcgcaaagggcgtcatggctccgctgaacgacctgtggaccgacgatgccaagaaggacatttacgagtccgttgagtccgcctgcaaggacactgccggcaactactacgagtatcccctgtgcatgaccgcacactgcatggccgtgaacatgaccaaggtcaaggaagtgggcgctgaccagtacattgataccgacaagcatacctggagcaccgacggcttcctgaagaccgttgatgccctgtacaacggcggttatgagaacgttgcagccatctactgcgcaggtcagggcggcgaccagggcacccgcgccatcatcaacaacatgtacggcggcacctttaccgatgcagcccacaccaagtacactgccgactccgccgagaacatcaaggcgatccagaccctgcacgacaccaagggcatcaactttgacgcttccatcgcaggcggcgacgagatcaccctgttccgcaacggcaccctgcagatggctttctgctggaacattgcacagcaggccaacagcgacaacaacgccgccggtctgaccaacgatggcgacgagatcttccccatggccttccccaccgacagcggcgacccgaagctgtgtggcggcatctggggcttcggcatctttgataacggcgacgaggccaagatcgaagcagccaggaccttcatcgacttcatcgctgccgaccccgatcaggtcaaggacagtgtgctggcttccacctacttcccggtccgcaccagcgtgggcgatatttacgccgacaacgagatcatgagcgagtacagcaagttcatggcttatctgggcgactactaccagatcactccgggctgggcaaccgcacgtaccgagtggtggaacatgctgcagcgcgtcggctccggtgaagatgtcgagactgccgtcaagacctttgtggacaacgcaaacgctgccgcacaggcataagcccatccactctgccgggggcagataattattgacgcttcgccccttcctcgaagatcccgacgagggaggggctttatatgtaaaaaaaaaatcataaccgaaaggaacggtgattctcttggctgcaaaaacggcgatcaaagagcctaagcgcagcagtgcgctggtacggcgcgagaccttcgcttcctattgcttcctgctgcccagcctgatcttctttctgggcttcgttatttaccccatggtgctgtgcgtggtgaccagcttcttcgattccaccatgaaccgtgccgatatctttgtgggccttgcaaactataaggaactgttcacagaccccatctttctgggtgccttaaagaacaccttcatcatcgtggtggtgtccgtgcccgtgacctgcgccttctcgctgtgggtctcctctgccatcgtagacctgcccgagtgggctaccagccttttccgttgcgtgttctacctgcccgtggtcaccggctctgtggctgttaccgtggtgtggaagtggatgtacaacaactactatggcatcttcaactatctgggcaagactctgggcctcattgacaagaacatcaactggctgggcgatgagcgctttgctctgggctgcatcatcctgatcctgctcaccacctctgtgggccagcccatcgtgctgtacgtttccgctctgggcaatgtggaccagtccatcgtggaagccgcagaagtggatggtgccaccgatttccagtgcttctggaagatcaagtggcccgccatcatgcccaccaccctgtacattctggtcattaccaccatcaactccttccagtgctttgcgctgatccagctgctgacttccggcggccccaaccacagcaccgataccatcatgtactacatctactacaccgccttcaagctgtaccgctacggctacggcaacgcaatgggtgttgtgctggcagtcatcatcgccattctgtcggctgttcagttcaagctgggcaaccaggataattaaaggaggtgccggacaatgagtgcaaatgccgctgcaaaaaagcaaaaaccgttgaagcgtcaccccagcaagctcaagagaatgagcgcctacatgatcctgacgctgatcctcatcagcatcgttgcggtgctgttcgccttcccgctgtactggatcatcaccggttccttcaagaccggtgccgccatcaacgccaccaccccggaatggtggcccagccagtgggtgctgaccaactatcagaagctgttctccggcaagagcgccccgctgtggcagctggctgtgccctttggctccaagttcagcgctaacggcgagcccatctacttctcggtaggccccaccgctcccgctgccatccgctggatgctcaacaccgtgttcatggccgtcatgtctatgatcctcacctgcatcaccgccgccatggccggctatgcactggcaaaaaagcgctttgtaggccgcaagctgctgttcaccctcatcgtgtgtgcaatggctctgcccaagcaggtcattctgatccccctgctgcgcgaaatgagcagcctgaacctgtacaacaccatctgggccgtcatcttccccatcgtgggctggccctttggtgtgttcctgatgaagcagttcagtgagggcatccccactgagatgctggaagcagcccgcatcgacggtgcaagcgaggccaagacctttatcgacatcgtgctgcccatggtcaagccgggcatcggtgcactggccatttttaccttcatcaacagctggaacgactacttcatgcagttgatcatgctgtccagcaccagcaacctgaccatctcgctgggcattgcaaagctgcaggctgagaacagcaccgactttggcctgatcatggcaggtgccgcactggctgctgtacctatcatcatcatcttcctcattttccagaagtactttaccaagggcatcgcaatgggtgctgttaagggctaaaatcccgactgccgcctgcggcggaaacagggagggatttttggcgcagcggtctgcaagacgcaaggcccgcccaagggccgaagcggatgcagggcaccgcaagagggcattgaacccgttacccgaaacagaaagcgtacgagcttgatgcaaaaccatttcatctgtatttattactatttttaaagaagggtttggaacatgaaagatatcaaaaaatatcagggtgtcatccccgccttttacgcctgctacgacgcagagggcaatatttctaccgagggtgtcaaggcccttacccgccatctgatcgccaaaggcgtcaagggcgtgtatgtaggcggttcctccggcgagtgcatctaccagcacgtggatgagcgcaaggccgttctggaagccgtgatgagcgaagccaagggcaagctgaccgtcattgcgcatgtcggctgcaacaacaccgccgacagcgtggagctggcccgccatgccgagagcgtgggtgtggacgccattgcatccattccccccatctacttccacctgccggagtacgccattgcaaaatactggaacgatatgtccgctgctgctcccaacaccgagttcgtcatctacaacatcccgcagctggcaggcaccggcctgaccatgagcctgctgaaggaaatgctcaagaaccccaatgtagtggctgtgaagaacagctccatgcccacccaggacatccagatgttcaaggatgccggtatcgccgcccgcggcgaggggaactttgtggtgttcaacggccccgatgagcagtttgtttccggccgcgtcatcggcgcagacggcggcatcggcggcacctacgccgtcatgccggagctgtatctggccatgaacgatcacatcaacaagggcgagatcgaagccgcccgcgccatccagtacgatgccgaccgcatcatctacaagatgtgcgaagcccacggcaacctgtacgccgtgcagaaggagatcctgcgccggatgtacggtctggagctgggcggcgtgcgtgagccgatgcccggcctgatcccggaagatgaagccatcgtggccgaagcacaggccatgatcgaagctgccatcgcaaaactgtaaaattgaagcagcgcccctctccgtctcttttcagaggggagagcgggcgcttgtttttggagggacgttttatgatctgtgataccctgcagcacctgacgcgctacaagggcctttgcaaaaatctcgacacggccattgattacctgctgacccacgaccctgccagcctgcctctgggccgcaccgaggtggatggcgaggaagtttttatcaacacgatggatgccacgctccattccgaccacggctaccacccggaatatcacaaaaagtacgccgacctgcagctcgacatcaccggcagcgagggctggggctttaccacaaatcccggcagggagatcggcgattttaccggcgactgcggttttcaggacagcgccagtgtcgtgaccggtgcactgggtgagggacgctttgtgctgttcttccccacggagctgcacaaacccggccttgtacagcacggctgtgtgggcgtgcgcaaggctgttgtaaagattcggatggaggattgaacgatggataaggaaaagctgtttgctcagatcaaaggcggtctgattgtctcctgtcaggcactggagacggagcccctgtacacgaaagaaggcggcgtgatgccgctgatggcaaaagccgccgccatgagcggcgctgtgggcatccgtgccaacaccgtgcgcgacattacccagatcaagcaggtggtggacctgccggtcatcggcatcatcaaaaaggactaccccggcacgcccatgtacatcaccgttaccatgaaggaagtggacgagctggtggagtgcggcgtggacatccttgccgtgcagggcaccggtgccctgcgcccggacggctccacctccgcccagttcatccgcaccatcaaggcaaagtatcccgaccagctggtcatggccgactgcgacaactttgagaatgccatggcctgcgccgaagccggtgccgactttgtgggcaccaccatgcgcggctacaccccggagaccaagggcattgacgatatcgactttgattttgtccataagctggccgcagagtgcccggcaaaggtcattgccgagggccacatccactacccggagcaggcggtcaaggcgctggaagctggtgcattcgcactggtggtgggcggtgccatcacccgcccggcagagatcacggcccgctttaccggtgccatcaacgccgcaaaaaagtaaaatggagtgtgccggatgaaacagtattttggcattgatatcggcggcactgccgtcaagctaggcatcgtggatgagaccggcagggtgctgctcaaaggcgaagagagtgtcagttttgacggctaccagacgcctgttctcaccaccgtgcgcagagccgcaaaggagtttttgactgcaaattccatcccggtggaaagtcttgcgggcatcggcgtttcggccaccggtcagatcgacagccgcaagggcatcgtagccggtacctgcggcaacttccccaattacatcggcagccctatcaagtctgcgctggaagaggacttcggcctgcccgtcacagtggccaacgatgccaactgcatgacactgggtgaagtgtgggtcggcgctgcacagggctatacggacgtgatcggtgtgacccttggcaccggcgtgggcggcggcatcctgaccggaggccatttgttagagggtgcacggggccttggcggtgagctgggtcactaccgcacccacgcgctggacggtgtggactgtacctgcggcgcaaagggctgctgggaacgctacgctgccaccaccgcgctggtgcgcgccgcacaggaaaagaaccccgattggaaggatggccgcgccatctttgccgcagccgaagcaggcaacgagacagttcttgccctgctggaccactggacggacgagatcgcacagggccttgcaggcatggtgcacatcttcaacccgcagctcattctgatcggcggcggcgtgagcgcgcagcagaaactgctgatcgaacccattgccgcaaaggtgaaagcatcggtcatgcccgcctttgcagaggggctggaagtgcgcgccgctcagctgcacaacgatgccggtatggtgggcgcagtgtactacttccggcagaccatggaaaaggagtaatcatatatgaaaacacatatcctctgtctgggcgattccaacacccacggctactgtgccgatccgaacgactgcgccgaccacggcatccgcttcaatgaagaggagcgctggacctgccgcctgcagaaggcgctgggcgacgaataccttgtgaccgaagagggtctttccggccgcaccaccgtatttgtggaccccatccacgaatccatggatgccctcagcgtcatctatgccctgctcaagagtcacgaggtcatcgacctgctcatcatcatgctgggcacgaacgatgtgaaggagcgctttggtgccaatgccgcctgcatcgctgcgggcatggagcggctcatcctcaaagcaaagagcgtagactgctggggcaccaagcagcccaacattctggtggtggcacctcctcccatcggcgcaggcttccacgacgctgtgatgggcgatggctgtgtggaaaaatctgccggtgtagccgggcagctccgcatcatctgcgagcggcagggcgtgcacttcctggacgcaaaggactgcgagttcaacaaggtggacttcatgcacctgacccgcaagggccacgcacagctggcggagctgctggctgcaaagcttcctgagctggtttaatttcatttttgtcccctcaaaagaggggacttttattttaatattttttgtatagcacagtcacgtacttaaagtttcgcgccttttgcaaagaacatctccgccgagtatgtactcttttgcgcgcacaaaagagtaccagaaaagcgcccgctactttcgaggcgcgggaggcacgaactaggggctactcgcccctagtaaccccaaagcagttgggctccatacaaaaaatccaagtcgctacgctagaggattttttgtgttccgccgatttaaatattccccgcttgtaaacagccataaaatcggctatactttccgcagaaagaaccattgaaaggaactgtgccatgcctgaacttttaaaagcgcctgtcacccctgctcagcaggcaagagatgcccttctcggtgccctcgtggggcttgcccgggccaccaccagtgagcccaaaacggacgataccgacgaggtgctgaacgccggtctgcgccttgccgcgcagccggatgcaccggaggaaaggctgcagcggatgcttgccatcgtccagactgaaaagcaccgcgttgccccgggctgcgccacctgtgccatgccctgcggcaacacgaacgattacgattttgtccgcctgtgggctgcgcccgagagtatccgcaccctcaagctgcaaatgctttctgccgcgtttgcgctggcccaaaagcgcccgcagggtcaggcgcaggccgccgtttatcagctgctgttcacccttgccgaggactgggacgaggagcttcttacccctgttgtgcaacacgccgaggagctttgccgggagtaaatcggcacccggaaaccgcgtttttaacccgaaaggtttgtacttttcggcttcctcgaaagtactgtgaaaagtctgccttttttctgtgttttggcggcatttgcacggcactgcgtccgcaaaaagcattccggacagtttgtttcccgatttcctgcctttttccgaaagttttttgcaaaaaagactttacaaaccatttctaaaaacttattatataaataatatatttcatggagccaatgctgtgcagccccctgtgcagcatccaaatacgatcaaggaggggttcatctatgcccgaaaagaaaaagaccgcagcggctgctcctgctgtggaagctcctgccgctgaggccaaggagacgaaggagaccaagacccgcaaatctgccaaggcctctacacgccgcggccgtcccccgcttgcaccggagctgtacgtggagttcagcggcaagcagtataacgtgaccgatatcatcgaccgtgccaaggccgattaccgcgctacccacaaggttggcgtgcagtcctgcaaggtatacgtcaagcccgaggaagacgctgcctattacgtgatcaacaaagtctccggcaagctggagctgtaacttttcctgtattcttttctcctgctgcaaagcactccgcacctgttttgcggcaggttgtccgttcccacacaaggctccattttaaaccgtaaaaaagctgccctgcatccaaaaatgcaaggcagcttttcattttacatcaaaccatcttttccagaacggatactgctggatcactgggtccgggtccgggatctcgaacacatagcgctcggtagcgttgatcacggtggtcttgccgcgggtgcacacgcgcggcagctttgcatcatagttcaggtgcacatggccgtgcacgaaccactgcggctcgtattcatccatcagatcattgaagcacgcaaagcccttgtgagcatgatccgtgctgtcgttcaggccagccgccggggagtgggtgagcagcaggtcgatgccgcccacatgatgggccttgcgccagagtttgcgcacacggcggcgcatttccctttccgtatactggaagctgtcctcccggttattgtagcggatgctgccgcccagtcccataatgcgcaggcccttccacacatacacgctgtcgtccacacaaatacatccgccaggttcattttccctgtaactgccgtcgtggttgccgtggacatacaagatgggcgcagccgtaaagttcgtaagatattccagatacttctgcggcagatccccgcaggaaaggatcaggtcgatgccttccagatgttcgcgggtatcgtagtcccacagtgctttagagggcacatccgaaattgcaagaattttcacatcggtttgctccgttctctctcggcctgagggccgcttatttcacaaaccctttcagggtgttgaggccgttaatggacatcagcgtatgcgtttttacatccagttcatcgtagtgcggcagcgcaccttccacgcattcgtccagccagtccatctccatcaattccttgggactgtagaccacggcctccggcgagtgcagtacatgcccctgcgcgtacaggtcttccgggaagatgcgcaggtcatcctcgtgcagcatcttttccatcaggtccagcagctgtaaagtgcctgcgggcaggtctttgctgtaatcgatctcctctgcgccgctgcgcatgccccaccagtaattcaccgcccgggcaccggcagcatcgctgtcccatgcaccgtcaaaaatggagcggatgatctcgatataaaacgtatcccaccgccacacgggcaggcccagcggctgcaaactgccgtccggcatgcggcgcacaaggccgtaatcccggtgggtgccttccggctcccggttatcccgggcatagaagatctccacatccggcctgtcagagaaatccagcgggtgtgccgggtccggcaggcaggcccagcgcagcaccacctttgcgtccgggcgcacggtcttcaggccctgcgcataggcgtttactgccgccgggatgccatacaccgggtttgccgccacatagcccacacggtcggtccttgccatcacgccggccagcattcccagcagataggtcacttcatacgtgcggggatagtaggtgcgcaccagcgggtgcggcgcgttgagcgaacagttcaggatgcgggtcttggggtgctgggccgccaccttcaggcaggcggtatgcatccgggcacttgaggtgaacaccacgtcggcattgtcgtgagccacatcctccagcacctgctccgcgtccacctcaggctcgatgttctctttgcgggtgatgaatacccggtccggaaacgcctgctgcagcgcttcgatgcctttgtcgtgggcacgcacccacgcgctgctctcggcattgtactcgtgcaggaacaccaccttcagctcgctgggctttgtaaagatgttcagctttgccagcagcggttcgccggggccctgcttcggctccagcgaaagggccacggcctgcggctcggtgagcaccttcacctcatcccacagcttttccagattctgcttcatctggctgggcgtgctctcgcaggcatccgcgtaacggtagaccgacagatacaccagcatggcatcgccggcagtcagattcagtccgccgccgcccagagccagaaactgctggcggaacatggtatagaaggcggaaaagctcagccggtcatcatccgtccagctttcaccgctggccttgcacaccagcgtctgcaattttgcgtaaccccccagacgggagaaatgcacatcgttgaccttggagagcttataaaaatccagaaattcgtagtagatacggttttccagactgtcgttccgttccgggacgagccgcgtgaccgtgcccgcgatcctgaccgcatcaaaatacttgagcaccgatacccgcttgttgccttcctgcacatagaatttgttcaggaactcgtaggcgatgatgggggtgtggatgccctcttccagatgtgcatcgcagaggtttgaccacttgcctgcaaactcggtgtccggctccagcaggggcataaagttcggtgcaaaggcggtgtgacggccgctggtctttgtgccgacgatgctttccgccgggatctccacaaggcccagcggctcctgcgccacgatgttcacattgaccagaatatcgtccagcaccgcaagatacggcgactggccgcgcgccacacaggcacggtaagcacgctggccgctcttcagtgcgttcttgtaatcttccagcatagttgctcctttttctcagctgcaatgcgctgcagccagctgccgcagcgtccttctttagtataccatgaaatttgattttatgggaggattttccgcacaaaagagttgatttatcctgcagtttcaggtacgataatagaaagcaaacaatgataggagcattctttccatgcagaccgaacagatccccgtactcaaggccgacgaatatcccggcggcatctggtattacgagccgcatacatatcagccttaccgttacgtactgggccgcgttggcacccacccgctggtatgcattggcatcaaccccagcaccgcccagcccggtgcgctggaccccaccctgaaaagtgtggagcgtcttgccgccgccaacggctttgacagctggatcatgttcaacgtgtatccccagcgcgccaccgaccctaacgatatggaccgtgtgccggaccgcgccctgtgtgacgaaaacctgcgctggctcaaagccgttctggcccagaccgaacccaccatgtgggcagcgtggggcacgctgatcgaaaagcgggactatctgcccggcctgatgcgggagatggtggccctgacgcgggagcgggagatcccgtgggtcacctttggcaggcgcagcaaaaagggccacccccaccacccgctgtacctgcgcaaggattccaccccggaaccctttgatgtggaaaattatctggacacctgcttttaatttttcaggtgcccgatgcggagggatcttttttgaccgcagaacattatcacgccctgcacagctggatggatgcccaccccacagccaagcgctgtgtggtggcactggaccgctggctgccgctcatcccttttgtatgttatccggtgctgctctgcctgctgaacgtccggctgtttcggctgctgggcagtcagcgtcaggccgcgctggatctcaccgccgtcattgcgcggacggtgttcgtgccggggcttaccttctggggcggcaccatcctgcgggacaggctgaacctgccgcgcccctatgaacagcccggctttgaaccgctgcggcacaaggagacccggggacactccttcccatcccgccacgcgctgagcgcttccgtgctggccatggtatggatgtatttctacccgaaggcgggctgggcgatggtgggcatcacgttgctcatctgtgttggccgtgtgctgaccggcgtgcaccatatccgcgatgtcgtgggcggagccgcgcttggctttgctttgggctttgcgggcatgtggctgctgtaaagcagtgctttgcgggctttgaaaaaagaaaaaagatttttgcattttttgcttgacagaatggggcctgtatggtattatacttctcgcagcgtgtgccgacacacagctgccgccataatggaacccatgggattacaacgtgcgcccgtagctcaggtggatagagcaactgccttctaagcagtgggccgggggttcgagtcccttcgggcgcatctatgtggtgcccatagcgtagtcggttaacgcgccagattgtggatctggagaccgtgggttcgagtcccactgggcaccccaccaaaaatccgctgatgctttgcatcggcggatttttttatttggtggggtgcccagtgggactcgaacagcacggcactgccgaaggcagggcaatcaacagcccagtgggctgttgattagtgcgcgggttccatcccttaggaatgtctaccggggaaccttctgccgctgttcaaaacagcggatttttttatttggtgggcgtgctcagtgggactcgaacagcacaccattattttctgctaaaaaagcatgtgcagaacacctctggccggaacggctcctgtgtgctctgcacatgctttttattgtttggtatccacccgaacggtcagcgcctcatctgctgcaggatctgtgcgatctctgcgctggaatagccatcctgccgcagtgcggtgctgatgctggtatcgctcttgccctggctgcgcatcagcatggccatgtagggcaccgtcacattccgggaggtgtcactgcccagacgggtggcagtgcccgtgctgcggttggctgtaccggaggacgtactgcccgtgccagtgccgccagtcttactgcctgccgccgtgctgccagcgcggcttgctttctgcgctgcattggactttttcaggttccactcgcccagtgcgatgttcagcttctggcttgtgacatcgttgttgaatttctgctggttgagtttgtcctgatactcccgctcgctcgtctcgttctcgtagcgctgctggttcaggctgtcctgatactgacgctcctgcagctgctggttccactgagtgtccgcacggtttgcctcgtactgacggttgccggagtagatgttgtagccggtattcagcaggccgctcagcatggagccaacgcccgtggtgccgctgagaacgatctgcaccgcatcgcccagcacacccagcacggtcatcacattgctgaacacctgctggcggcgtgctgcctgctgctgttcctgcgcggagtaataatcgtgcagggtgcccagctggctcagataatcctgatacgcgccgtagtcctgcgcataggcgttgttgtatgcttcgcccttctgctgcagctgggtgtagtagtccgagagcttgttgttgtactgctgctgggcatcctgttcgctgttgttcagctgatccagctggctcaccagctcgttgccgccgctggtatacgtatccagtgccagactgtacagcgtggggatggcgctgctcagcgcgccgatctgctgctgatacgcctgctgggcggcgctcgtggcatagctggagccataaccgccggtcagggctgcagcctgcgccgcagcatctgcgctggcattgcgggcgttctgcaaatagttctgctcgtactggcggtagagcggatccttggtgtagctgtactggaagctctcacgctgcagcagctggttcaaaagctggtcgatccgctcctgatagctgctctgataatcgcccgggcggtttgcctgccactccttcagcgcatctgcggcatccgtcacggtctggctgggcttgtagctggaatttgccagcgcgttttccacctccgagcggctgtccagtcccgctgccgaatagccgctctgcacggcaggctggccgctgccctccgtctgcgcctgcacagcggcaagcgcttcgtcctttttctttctgtttgccatatatgatcctctccttataaattctgcagtttcgtgcgcatctcgtcggacatgttctcaacgtccagattgctcagcacatactgcagctgttcctgcatctggtacaggtagctgcgcagggcacgggcatcctccgggtccatgttctcgctgagcttgggcaggccgatcttgttaatgcccatcacgcttgccattcgtcacacctccccgcctgcaatgccgcccttggcagcggccattgtttttgcaatgctgcgcagggtgatctgtcccctgcccttcaggcgcagccgcagggtgccgtgcctccggggcacgaacggcagatcaaagctgcgccgcttgtcctgtgccgtcaggcttgccactgtctcccatgggccgccgtcatagctggcggccacctccaccgtactgctgcactcggcatccagccgcagcgtcagtcgggaaagataccggtcctcggccccgtccagcccaatgtcaccagtggtcagctcaaagttcagcttttcctccacaccgtcggtggcctgccagtccgcttcgcggctgggatctgcggcccacagtgcctgcccgtcccacagataaagctgtccgccggtgctggtcatctcgtaggagcacacgttttcttcgctccagagcgcgcgctcggtatcgtacaccagcagccttgccgtattttcgcctgccgccgtgcgggccacatgcaggtaatagcggccatccagcgcactgcccactgcgctctgcacattggccagccggcccgaatccaacgcgccggacacttttgttggaatgctgccgtcccatgccatcactccgtccggcgaaagataatagagcgtctcgttcagcacacacaggctgcgcgccgcgtttttggcaacgccccggcagcgcagcgaggtgagctgaaaatccgaaggcttggagccatagagcttgtgcagtgtgttctccttaaagaacagcgcatagcccatgcatgtggccgcgccggtaaacgcaccatcactgcccaccgtcactgcgtagctgtctgccgcaatgccccggtaggaaaaccagttggtggggtcgcctaagcggcaggcatagatcacgttttccttgctgctgcagccccatacccggttgtcgcactcggtaacgtagtccagatccggcacgcggcgttccatccgcaccggcgtgctcaccgcaaagctgcgtgtctccttgccgtccaagctggtccactgggcgctctcggcgctctgcaccagcgtgccgtaaacatgatctccctccgggcttacccgcacgcgcagcccgttttccagcacatcgtaaactaccagatccccgtccagctttgtccacatgccagcctgctgtgctgccgtgccctgcacggtcacggtgtcccactgggcaaatagcctctgcgcgcccgccgctgtgatgcggcagtattccagcggcactgccgtccagttgccggaggatgcgctgtactcttccagtgtgctggtgctggcccatgggtgctcctcgtcctccaccttcaaaaagagctgtccgtctgcaggcttctccggttcctccttgccgtaaccgctcacctcgtaggccttgcccgcagcatcgcagggtgcaaactgcacgctctgtccctctgcctgccatacagctcccagtgccgaaacacttccgtccgctgtatcaaaggctaccttgtccgggaagatcaggatttttgtaccaatgcccaccagtgcctttttgccgtcggtcactgcctcggtgcaggtcaccgggttcgcgccgtcggcatccggcgtgtagatcagatccttcccgcagacggtcagcagcccgttcaggtgatacatgccgttcagcccggtcaactccctcagcttgcggcgcggcttgcgggtgctcagcgccgggaaatcccgggcagaaaaattcacgcccgcgctatactctgcttccgagcaggcataggtctcgttcagcccgccgaatacccgcacaagactgcggctgttctgcagcttcgctctgtttgccagaaccatgctctcacctccttaccagcgccactgggcacccgtcagggtcgggtagctgcgccgcagccacgccgccagatctgccagcagactgttgtactgggcctgctccccgacgtagcggtcggtctccccaagggccgcatcggtcatggcacacagataatgcggatacagcgcatcaaaaggtgccggtgccagcagcacatcgtcgtcctgcaggctgtcgtcccatgcaaggtctgcgcccacatcgtcgtatgcatctgtgatgctgtttttaaaaaagcgttcccgcagcatcgcgtctgcttccttcagccacgcctgccgggtggccagcgcaatgcggctgcccgggcgcagctcttcggcgcgttccagcgcctgtcctacggtcatatgctcactctcctttttataaaggcccggccgggcaggctccccagccgggctttttgtctgtttcgggtttactgggcggcgttctctgccgccgcaatgcgggcggcggtcagctcatcctgcatctggctgtgctccagcacctcggccacttcgggcggcacttccacctccacgccgcggcggatcttatagttcacaccgttcacgctgacgaacagatcgcccttgtagcggctgttatccttgaacagccggatgcgcacatttttcttttcagccatggctcacgcctcctcagtttgcagcagcggtggcggaatagctggacgcactttcaatgcgcaccatgtactgctccaccagacgctctgccgcacgcatgcccttccagcccacggaagcgcgctggttcagcgggtcgtcgccgtagcccagctgcttgacgatgtgctccagaccgccgccttccagctcggtcacaccgtaggcgtgggcacccagcaccagcgtgccgaacacagccagaccgtccgggcaggtggaatccttccagatcttggcctcgctggtctcgatgaagcggatgttgcccagcttgccgatctcgccgcggaacatggtgtccgggtcggcgtacttgtgcacctcaatgaactccttgctggtcttcaggtcgtaggcagcgtaggggtggatgatggcaatgtagctgtcgccaatggggtcggcgttcatcgcgcccagctgtgccgccgcctgaaagaacagcttcggggtcagggtgcaggtcttgtccagtgccttgcggctggcaacggcagtctcggtgccgcctgcggccagcttgggcgcatagatcacattggtgccgcccgccagcacatcgcggataatgctgtccatggtgcggcctgcctgacttgccagcacacgggtggcctgcaccacattgttgtcaatggcggtcatctgcagcacgtcggtcagcggagtccagccgccgtactggtgcagatcgctggtgatggtggtcacattcagtgcctgaccgttcggggtcacgccctcggtcagcggagtggatgccttgggcaggctgtcgtacttgcggaactcaatggtcttgccgccgttctggggcacagggtagtagtccgcaaactggtcgtgcaccagacgcggctctgcctgatcgatgaggcgcttctcgtagaaggtcttcatctctttcgacatggtagcggtggtgttcaggttttccgcaaacagctggatgttgaaattcttgttcatgctcatattcctttctcttgtaaaatagtcacaattcgatctgtgctccgtggagcacacggcgttccagtgcttctcgctgggcgcgggtcatgctggctacatccgggcggacggtagccgcgccgccgggccggatgccgttttcggtgggccgtgcggcccgctgctgaatgcgttccaccacgccctgctccacagcctgcgctgcagtgcgcaggttttcgtcgtagtgggccagacggtacgcatcccgcaccctcatgccgggcagctgcatcagacggcgcatctccgggctgcgcagctcgttctgcaggtcaaaatccggctggctgcggcgcatggccgcttcctctgccgcccagcgggcatgcaggctgtgcacagcagcctgtgtgctgcgggcaaagctggacagcggcggcagttccgggcgctgcacaggcagttcctgccggggcttttccggctgcagctctacggttttctctgccgaagcctgcggcacagcgggcgcttttgcctcgtccggcttcatggtgccggaggccaccgcctgccgggtctgcgcttcgctcagggcagggggagcggcttctccctctgcaaagagctgtagcataaaggctccccacgggttgcggctcccagcgtccacctcgtgccttgagcggcactcgtgttctgctggccgctgccccagcctcggctccctgtttccgccgcaggcggcggtcgcctccgctgcaaacagctgcagatccatcatgctctcctttcctctgcggctcacatctgcaaagcggacattctccgggtagcgttcggccagcagcacaaagcaggctttggccagctcaaaggcaccgcgcacccattcttcacagggcgcatccacgctcactgccagacgcgggccgtccggctcatcaaaggcttcgctgtgggcgttctcttccccggccagcaggtacacaaggccctgcatcacggtgctggctcctgcacaaacgatgtcctgcccggcaggcgcatagcctgcatgaccgtcagcttccagccggcagctcagcccggcgggggtatccatctcgctgtaacaaactttcatcataaaattcacctcctttttaatggatgtccatggcacgtgcagcggcggccaccggcagggcattgccaaggcccgccagctttaccgcctgcccgtccttctgcgcagacgcaccgcctgcactgcgggccggttcgtcaggcccggtgccctgctgggcgatcaccgccgccatctgtgccatctgctgctgcatcctagccagctgctgggcaagggtgccgttctgccgcaccctctggcgcaccttctcaatgccttcaaaatccatcatttccagtgccgcaagggcggcatcggcattttccggcttgaaaaagcccagctgatagcattccttggccgtctcgttctgggaaagacggctgaaggtgctcttcttggcggcgctcaccacgatgtcaaaaatcggctcccggctgcccagttccacgccgcccacgctgccgccgggcaccgcccgcagcgcctgcgccgagaagggcacgaaccggctctcgccgctttcgcccacgatgcggaacacccgctgctcgtcgtagaactggcgcatcagctcgatgatgagatagcactgctttgcaaaagcacggtaggcgctcttgagcatatcgcggctgagtttgctgcctgcctcctgcaaggccgcaatggcgctggctgcagtcacacctccggcagtgccgccctgcgtcatgtcccggttgccgctgatctccttcagctcttcaatgcggctctggcggtaactcaggctgttgccctgcaggcccgccgtctgcagcggacggaaactgtcgtcgttgagccgtcccaccacatgcacgatgtcccggctgaaatcggccagctcttcctcgttgacccctgccgtgtcgctgagcacataccgctgctttgcactcagcagcacgttctcgtccatggcatggttcatcttatcaatggccgtctggcagtccttcatcacatcgatgtagccaaagcccgccgggctgtcctcctccacgaacagcgggtcaaatacaaaggggtactgcccgtggtcatacaggccgctttctgccagcgccgggtcgttctggctggcgtacagcaccacgccgttgcagaacttgcagtagtgcagcaccatgcgccccgtttcatccgggcgcttgtagtaccagtccaccaccacgctcttggagctggtgtcctgcccttcatcgtggatgtaccggggcacgtccagcacgctggcggtgtgtcctgccagctgcgggtactgcgcgcacagccgggccgtgtcctcaaggctcaggctgaaaaagtccggcgatgcctgaatatccgccacgcccggctcccagtagagcatcagcaggttcacgctgcgcaccgcaatgtcgccaatgccgccgcgcattgcagggtcccagaagataccggtcacgccggtgccctgtttgagcttgcgccaccagcagtcgctgtacacctgctcgtagtcggcctgttccaacaccaccggcaaaacgctggaaagtgcccgtgcggtgtcctcgtcatccgcctctcggggcagcacgttcggttccgggtagttgtccatggcatcggcgtgcttgttggcaatgctgttgaacagccacccgctggaaggctgggccttgccgggcatcatggggttctggtagttcttccagtggcccatgcggaaccacagctcgttatccacaatacgcttgtccagcgcggccttgcccgccttgtaccgctgcaaggtctgcatggcctcggccacctgtgcttcacccacgggcaaagcttcgttctcgtaatcgtccattgcgtttctcctttaaattctgtaaaatcttgcccgcttgtgcaggttcagcgggtcgtcgggcatgggcggcgcagcacagcgcaccggcgggctgatagggttctccatcagtacatagcggcactcgtcgtaaatgtgatcctcctgccgggtgtcgatatcctccacgttgctttcgtcgtacacaaggttcgggatcgtgcggataaagtgcttgcaggtattgaacacctgaaacatcggcctgccgtccgcatcaaaattcagccggtagtggaactgcatcttgcccgcaagccgggtgttgtcgccgggggaccagcgcaggaagttcgggctgcgctccatcatagcggcaatgctctcgccgcggctctcatcaaagatggccggatcggcaatgccgtggatcaccctgccgcgcaaaagcgggtcgttctgctctgcctcgcggatgcgccgggcctgttccaccgggtcgatgcgcaggccctcgttcggcctgccggtgcagccgtacagctccttgatgcggtacagccgcccctcctcgtccgctgcgtaccaccccaccgagaacggcttggaaaagccaaagtcgaacccgcggtagatctgccagtgcttcgggatggtgaacggtgcgatcacatgggtccagcgctggtcttcgtagcgggccgggtcgttgcgccattcggtaaacacctgcccggaaaagctgtcccagctgccgtagagcagcgcctgcttttccgcttccggcatactggcaaggcttgcaaggtagccggggtcgtttgccagcagggcggggttatcaaaaatgctggaagggatgaacacccgcgcccgctgcagcttctgttcggtgccgtccggcagctttaccgtgtattcttcggtgataggcgtgccgggcggtgcgggcgtgatgaaccgtgccttcacccacccgtggccgatgccgccgggattggtggtggcccgcatgtacacccgggtgcccgggccggtgggacggttgcggctcatcatgtagctgtactcttcccattcaaagtgggtcagttcgtcaaagccgataaaatcgaaggccttgccctgataattggtacggtccttagtgtactgcatggagccaaagtaaatttttgccccgctggggaagttccacacatgggccgtggcgttgtactgtgcctgcgggaacgccctgtggtagtacacctggctcttgtccaccaaatcggaaagctgcgggtaggtcttgcgcaggatcagcgcccggtagtgcggaatgtgcacctgccgcagcgcttcgatcaccagcgcgtcgctcttgccgccgcctgctgcaccgccgtacagcgcttccggttccgggcggctcataaattcggcctgccgcggctggggccgccagaccaccggcactcttgcttgtacaatgctcatggttcttcctccaccgtcggcagcagcaccacgccgcactccgctccttctgcctgtgccccctgatcgttcagggtcttggctacaccggccagatccttgagcaccgccgtggcctccttgaggtctttcatggtgcctgctcccgatgcgccttccttttttgccgccttctgccgggcattcagttcccgcacctgctgtgccagcagggtgctcagggtgtccgtggctcggctcaggctggccagccctctgtcctgttttgtctgccccatggtgttgggtatcagctcctttccgccctggtgtgctgggctatggcaaaaggataccactggtgctgctttcccaacagtgtgcacttttacagggccatagcgtatattttaaattcaagaatccgattcgtatacttttatcccttgtaattcatcgttgtttcgtatcttttcaaaagcagtgttttttctccatcaaaatttgtggcagacccgcagaaaaccttcaaagtcatactcatttgcgatttttggacagaaaatgaaaaaagtgtgtttattctgtggacaaatgcttttgtaaaatgttacaataggttctgttctttctcgtcccacgcacggacgggatgttttatctgaatcaggaggttcctcatgttagaaaacatctttcatctgaaggagaaccacaccgatgtcaagaccgagatcatggcaggtatcaccaccttcatgaccatggcttacatccttgcggtcaatcccaacatcctttctgcttccggcatggattcggaagccgttctgatcgccaccgcgctggcatcctttgttggcactgcgcttatggctctgcttgccaactatccgtttgcactggcacccggcatgggcctgaacgcctacttctcctacacggtcgttctcaccatgggctacagctggcagttggccctgatggccgtctttgtagagggcatcatcttcatcgtgctgtccctcaccaatgtccgtgagggcatcttcaatgccatccccatgaccctgaagagcgccgtcagcgtgggcatcggcctgttcgttgctttcgttggtctgcagaacgcaaagctgatcgtcaacagcgattccaccctcgtcacctaccagcacttcaagggcgacaccttctccagcgtgggcatgggcgcgatccttgccctgttgggtatcgtgatcaccgccatcctgctggtaaagaaggtcaagggcggcatcctgtacggcatccttatcacatgggtgctgggcattctctgcgagatcgccggcatctatgtacccaaccccgatgcaggcatgtactccgttatccccaccgcttttgtcagcttcgacttctccgcgctgggcaagaccttcggtcaggtattcaagaccgatttctccggcgttggcatcctgaacttcttcgccgtcatgttctccttcctgttcgttgacctgttcgatactctgggcaccctgatcggtgttgcctccaaggccgacatgctggacgaggacggcaagctgccccacatcaagggcgcactgatggccgactccatcgccacctgcgcaggcgctgtgctgggcacttccaccaccaccaccttcgtcgagagtgcttccggcgtcaccgagggcggccgcaccggtctgaccgctatgaccaccggcatcctgttcctgctggccaccatcttcagccctctgttcctcaccatcccgtcctttgcaacggctccggccctgatcatcgtgggcttctacatgatgggttccgccgtcaagatcgacttcaatgaccccagcgagggcatccccgccttcctgaccattctggccatgcccactgcctacagcatctctgagggcatcgccatcggcgtcatttcctggaccatcatcaatgtcgtctccggcaaggccaaggaaaagaagatcagccccctgatgtatgtgctgaccgtgctgttcatcctcaagtacgtgttcctctaagccgctgatcttaccgcaagcaaaaaagctcccgtcctgatgatggacgggagcttttctgcttcctgtgatccggaacagcctgtgcattcgctccgggctgtccgacgtggaactattcttttttagcaatcggggttatttgcgccgcgggtggatatgcacttccgggatagccacgttatcgtagtgaatcggcttatctgccgccggagtgccgtccgcatccgtatgatgtgccaccttgccggtatggatttccggcaaggccacggtttcttcctcatggggatgctcccgcttttttccgagccacgttttcagatggtgataaagcgacattgcacgtctcctttcccggtgcggaagcccgcccggactgtaaaggtcagcttcagataaaattgatgaacaccgtaatgaccagactgttcagaaagtccgcaaacagactgcccaccagcgggatcagcagatacgccttgaccgagggcgaatatttatcgcagatggcctgcatgttggccatagcattgggcgttgcgcccatgccaaagccgcaggtgccggatacgatcaccgccgcgtcgtaatcgcggcccatgatgttgaacaccaccagcaccacatacaggatcatgaacagggtctgcccagccagcagcacgatcagcggcagggccagctctgccagctgccacagcttcagggtgatcatggccatacccaggaacaacgaaaggcagatgccgccaatgtcattgatctcgcccatatacacggtgtagccgccgccatactcacccacattgcggatgatggccgccgcgatcatggcaccgatatagatggggaaggtcatgcccgtcaagctcagaagtctggacagcaccgtgccgatgcccatggcgacgatcaactggaagcttgccgccgggtacatggtggtgtggcgctcgtgcttcatttcttcttccaccagtaggctgtcatcctccggtaccaccgtggccagcaggttgtgccgctcaatgagcatcttaccgatggggccgcccatcatgctgcccgcgatcaggccataggtggccgctgccgtacacagggtggtggccccctgaatgccaaagtcctccagcaccgggccaaaggcaccggcggtgccgtgaccgcccaccatggggatggagccggtgcaaaggcccaccagcgcatccacgcccagcagctttgccagccccacggctacaaagttctggctgacgatcagcacgatgaccacgcccagaaacacgatcatcgctcttccaccgcttttcagcaccttgaggtttgcctggaagcccaccgaggtgaaaaacatcaccatgcagacttcctttagaatatcatcaaatgcaaactcggcaacgccggtcacatagcacacacaggtaaaaatggcgaacagcacgccgccaatgaccggagccggaatgcagaaacgttccagcacctgcacccttgcccgcaaaaatttgcccagcatcagcaccagcacagcaacggccagtgtctgatacatatccaattcgatcttcattgctctactttccctcagttcccagccgcttcatcgaccgtaattcctgccgccttataatatgcggccgcacccgcatgaaacgggatgccaacgccctctactgcgttttcctccgggtccagcgggatgcccagctgctcttccagcccttcccggctggagaacagaagctgtgtcagctgctgcacctgctttgcaggcagcgcgttgctggccagcagaacggctttcacgcccaccgtctgcaccttctccgtctgtccgggataggtgcctgccggcagcgtaacgctgctgtaggcgctgtaagcgctctgcaggcgctgtgctgccgcaccgtccacgttcagcagccggatgccgcactcgcctgccagagcggtcagcaccgggctgggcgcgcccactgtcataaagatggcatccaccctgcccgccttcagctgggcagcggcatcctcatagttcaggtttaccatgctcaccatcttgtcgttcagaccataggcagataagatctgccgcgcgttctgctccgaaccggattcctccgcgccaatgctcaccgtcctgccatgcaggtcctcaatggactggatgtcggaatccgcccgcaccaccacctgacaggtctcggtgtacagcgccgccacggcaccaaaaccccggctttcctcctcgtcggcaaagatgccggtctggtcataggcatcctgcacaaggtctgcctgtgcaatggccagctgcaggtattcgccggccagcagacgcaggttcgctgcggaaccggcggtagccttcagctccacctgcccgttgtccgtctcattttccaatgctgcgaaccgctcaccgaactctcggtagatgccgccctcgccagccacgccgaagcgtagccgtttaacggtctccaccgacgagcatccgctcagcagtgctgctgccagcaaagctccggccagcaccgccgcgagccatttctttttcaagatcaccactcctcttcctgccgccgcagtgcggcagagcttttatcctaaattatacgcacattgcggatgaaatgcaatcacctgctgcagaaaaggaatgcacttaccctccgaacagcccgaagaagctggtgtgggtcacgcccagcacaaggaacagtgcgatcagtgcaaacagtaccccaatgataatatccatctggtgcacggtcagcggaaaatggtcgtacattttttctttcgcattcacaaagtttttgtcaccgttgttgagcaggctcttttttcctttctcaaagtctgccttcttgcctgccagctccgcctgttcctgcgccagctgtgcttcccgggccgcaagggcagcttcccgccgggcaagctcagcctcgcgctcttcgggcgtctgtttttcctgtgccataacgtacctcctgatggtgtttttctttatgataccacacaaatgcaaataaaaaaagcgggccgcctgcccaaaagcagacgacccacagaaaaagctcttacttctttgccagatacttgcggatatcgatagccacagccacgataatgaccaggccctgaacgatgtaggtgtaggaggagttcacgttcatgaactgcagagccaccttcatcagctcaaagaccagaacgccgaccagaacgccgggcacagtgccgacaccgccggtggtggaaacaccgccgatggtgcaggctgcgatggcgtccagctcatagcccattgcagtgttgacggatgcgccgccggactttgcagccagcaggcagcctgccagaccgaacatgcaggaggccagaatgtagatgcggatcttggtagcgtgcacgttgacaccggccacctcagcagcagcttcgttgccgccgatggcgtacatgtacttgccgtggcgggtcttgttgtacaggaaccagaagcatgcagccaccaccaaagcgatccagatcagcacgggcacaccgatgatggtgttggaggccagagaggtgaagtttttgttcaaagagccgatgggggtaccgccggtgtacacaaggcagataccgtagaccacctgctgcatacccaaggtagcaatgaagggctgcaccttcaggtagctgaccaccagtccgttgcacagacccacgatggcgcagatggcaatgaccagaatgaacaccacgggggtggacagggtgggcatattggggtagaacttgccggaagcgccttcggtctgcgcaaaaatgcaggccagacatgcggcaaaaccagccagacggccagcggacaggtcgttaccggtggtgatcaaacagccggaaatgcccagagcgatgatgtagcggatggacacgttcttgaacaggttgatcatgttggtgccggagaagaagttggggtgcatgatgccaacgatcagagtgatggccagcatcatcataataatggcgttgttgctgagccacttgcccacagccttgccattcaattttttggtagcttccacgatagacagcctccttatttactgatttgccgcagcggtgggtgcggtctcgaactgggtagccagcgccatgatgttctcctgcgtagcgtccttgccgtcgataaagccggtgatgcggccatcgcacatgaccatgacacggttggacataccgatgatctcgctcatttcggaggagatcatgataatgctcttgccctgcttggccagatcggcgatgatgcagtaaatttcatactttgcaccgacgtcgatgccgcgggtaggctcgtccagaatgagcacatcggggttgttggccagccagcgggcgatcagcaccttctgctggttgccgccggaaaggctcttgatctgggtcttggggctgggcaccttgatggccattttttccttgttggtagccaccagatccaggatcttcttgttgtccagcatgatggggcccttgcgcagggcatccagcgatgcaatggagatgttatccgcaacactcagcacacccatgatgccggtggcacggcggtcctcggtcagcagagccacgctcttctggatggcgtcgcggggctgcttgatgttcacctcttcgcccttgatccacaccttaccggaggtatgggcacgcaggccgaagatgccttccatcagctcggtgcgctgtgcgcccaccagaccggccacgcccaggatctcgccttttttgatctcgaagctgcagtggcggaaggagcgcggatggatggatgtaaagtcctccaccttcatcatcacctcgtccgagggatggttctccagcgggggatacaggttcgacagctcacggccgaccatctttgcaatgatctgctccttggtcatgttggcaacgtcccacttaccgatgtactggccatcgcgcatgatggtgacttcgtccgcgatcaccttgatctcgtccatcttgtggctgatatagaccagtgccacgcccaaagccttcagctcgcgcatgatgcggaacagcgactcaacttcgtttgcggtcagtgaggaagtgggttcgtccaggatcagcaccttgcagtttgcggaaacagcctttgcaatttccaccatctgcatctgtgcgatgctcagagagccaagctttgcacggggattgatctccagcttcagctttttcagcagctcctccgtatccttgtacattttggcgtgatccaccaccgtaacaggaccgtactttttggtggggtagcggcccagccagatgttctcagccacagtacgtgccggaatcggctgcagttcctgatgcaccatggcaatgccgcggttcagtgcatccagaggggtggtgatggtaactttttcgccctcgtattcaatttcgccctcgtccatcttgtaaatgccaaacatgcatttcatcagtgtggacttaccggcgccgttttcacccatcagcgccatgaccttaccggggcgaagctccaactgggcgtgatccagcgctttgacgccggggaaggtcttgaccacgcctttcattaccagacggtattctgacattccgcagagcctccttgtcgtttattataaggccgcagaaaaacctttttttcaaaacaaggcgcgtgcgcggagaatatttctcgcacgcacgcgctttatagctttgttcaagccgtcaaggtccactgcgcaccttgcattgtttcaggaaaactttggtcttacttcacgtactcggaagcgttgtccttggtcaccttgacataatcgacccagtagtactgctcgaccttggagccctcgacgtacagcttggtagcctcagcagctgcggtagcctgacccacgtcgtcgttcagcacggtaccggtcatgttgccatccagaacgtcctgaacagcctctgccagagcatcgacgccgaccagatagatgtccttgccgacggtgcggcttgcctgctggatggactgcagagcgcccagtgccattgcgtcgttgttgcagaagacaacttcgatcttgtcgccgtactgagacagagcgtttgcaacgtcctgctgagcggtggtctgatcccagttgtccaggtactcgtacaggcactcaacttccttgcctgcatcggtcagggccttgatggagtactcggtgcggtactgagcatcgatgttctcggggtcgcccttgcacataatgtaggtgatcttgccgtcgccgttgatatcgccctgagtctcggtctccaggatcagctcgccctgataagtaccggactgacgtgcgtcagcaccaacgtagcagcacttgtctgcgtaggagtccagaacgctcttgtcgggctcacggttgatgaagacgataggagtctcagagggcttgacggtatcaacgatggtctgtgcggaagtggtctgcacggggttgatgaccagcacgtccacgccctgctgcaggaaggtgttgatctgctcggtctgggtgttctggtcgttcttgccgtccatgatggtgacggagtagcccatgtccttcaggtactcttccagatcggagcggtacagggtcatgaagttatcagcaaactgatagatgcacacgccgatgtttgcggaaccgttggttgcagcagcgctggaagcagcagcagaagatgcagcaacagaagaagcagcagtagaggtgctggaagagccgccgcaggcggtcatagcagcagttgcaccaacaacagcagatgccttcaggaagtcacgacgcgaaatcattttcataataatgttctccttcaattcgtatctcagcattttcacaggagcaatcttgcatgcacctgtaattcctgttcgtattatacccttgcagcaccccactgttcaagagaacaagttcacaagattgaaggagttcttttgtgctatttcaacaaatgctttttgggctcgccaatttcttttctcgaaacatcacaatttttcatacatttgcaacctccctacaaaagcaaaaaaattatgtcatttttctctcaaaaagattacaaaatgttgcatcgtccggtttttgcagcttttttatttcttgtatatcttgaaaaatattttcaggaatagttcatccctgttcttccgcattttttcgcttcatttctgaaattttctgaaaatcgcctgtcattcccggttcctgccgcccgccttttgcaaagaaaatgcccggaagctttcctgagcctccgggcattccgatccgagtatcttttacagatgcagcagcatctttgcaatgttgaagtagatcagcagcgtggtggtatccacaatggtggtgatcaggggtgaagccatcacggccggatccacatgcagcttttctgccgccaccggcagaatgccgccgatgatctgcgagagcaggatggtgcagatcaaagtcaggcacaccaccagcgccaccggagccgcgatgcggtcaaacaccagcagctttacaaagttgcatacggccagcgtgccgccgcacagcaaggccacgcggctctcgcgccacaggatgcggggcagatcgtggggctggatatcgcccactgccatgccgcggatgatggtggaagtgctctggctgcccgcgttgccgcctgcgtcggtcagcatggggatgtaggcggtcagcacggtcacagcggccagtgcatcctcgtatccgcggatgaccatgctggagaaggtggcgctgatcattaaaaacagcagccacggtgcgcggctcttgtacaggtcccacatgctctgcttgaagtagggcttgtcggaggggccgattgcgttcatctttgcaatatcttcgctggcctcgtcctgcaggatgctgatggcatcgtcaatggtcacgatgcccaccagccggttctcggcgtccaccaccggaatagccagaaagccgtatttctcgaacaggttggaaacatcctcctgatcggtggtggtgctcacgctgaccacattggaatccatcaggtccttgataggctcttctgtgttctttgccagcaccagcgcccgcagggacaccacgccgatcagcctgcggctgtcatcggtcacatagcagttgttgatggtctccttgtcaaagccattcctgcggatggcctccatagcttgtgccacggtcatgtccggccgcagctccatcagctcggtggtcatcacgccgccggccgagtcctccgggtacttgagcagttcgttgatcatgcggcgggtggtggggtcggcctgacccagaatgcgcttgaccacgttggcaggcatttcctccacaaggtcggtggcatcgtccacgaacagttcgtccacaacagccttcagctcggtatcggtcaggccgtcgatcagcttctgctgggtctcaggggtcagttcggtgaacacatctgcggccagatccttcgggcacagacggaacagcaccgggagcttttctgcaggcagatcctcaaataccgccgcaaggtcgggcgcgggcagagtttccatcacatcccgcaggctctggtatttcttggcatcgtccagatttgccagcatggtcttgagggtatcgatcgagatttcagacataaaaaaagctgcctccttttcagtggcagctctcgtttcttcttttcagggaacgcaaacacgcaccgtgtgcattcacacacagcagggtctgcgcaaagcagaaacggcggctgccaccatataaaataatcggggagaaagactgctgctactgccagcaggttccatgacaaccacctcgttttcctgttgtaaaaagacactttttgccttttccgcccattactttaccactgcttttttgctgcgtcaaccctgctttttaaatttttccgtttctttacaaaaagtaaaagtgcccgatgacatttttcgtatcatcaggcactttttaaaattcatttacaatgtttccaccgtatcaaacaggtcttttgcggcttccacagcatccttgctgccaaacaccacccgcacgccgtttgccatggcggcacccagctctgcagcctgctccttcagcagtgcggcatccaccgcacacagggccttgcggtctgccgccatcatttcatcagtgatgccgcagaaataccgacggtccgtctcgcgggcctcagcacgcggcttgcgaggggtgtccagcttggccacagtacccacaataaaatcgttcaggtctttttcggtgtactcccgtgctgccagttctgccggaccttttgcaaaggtgtcatagctttcctttacatgggggtcgcggtaggtgtacaggtattccacgccgtccgaggagagcattccggtgccgtaagcgccgcccacctcgcggatgttgtgccacaggtattcgtagctcatcacgcgggccagcgccttgcggtcgctgcggcgctccatgggccatgcctgtacatcgtagttcacaccgccgtcaatgataaacgcttcgttcaccggcggtgtcagcggctccacatagggctttgccgcagcgcggccctcggcagcaaagcggctgtccggcagcagagtgcgcagctttgcaagggcatcctcgctgccgtacaggctgaccgtcagctccgcgtgctgcagcacctctgtgcgcagggcatccagcttttcacccagtgctgcccaattgccgcgctcctgcacgccgcacaagaacttgtaatagctcacaccgctgcagcgttcactcaccgcaccgtccaccgtgtagtgggcactggcgcgggtggctgcgtatacgttgccctgctggatgaactgctgttccatgttcaacttctgctggctcagcacccgtgcaaaagcagcttctgccgccgggccggtaaggatggtatcatacagccattcgccgcccagctccacagccttttccagactgcgttccagcaggctcaggcacaggctcagcttggcatggcagggtgcaccctcctgccgcccagtccagatgtccagctgggtgcggctgtcgcccagccatgtgctgcgcagagtgttcagttgctgagcggtgtgttcggtgctgtccagctcgtccagcacatcggtcagcaggtccagatacggcatgtcctcaggcttcacattgccaaggtcatagtagaagttcaggtacaggctgcctgccgaagggtgatgcagcagctgtgccccagccagaagttcccgctcgcctggggccgtccttgctccgtcgccaaggtcggcaacggtcagcgggtgctccagcacaagcttgccgtcggtgcggatgggttcgccctcctcttttttaggcagggtgggcacctgcaccacctgcaccggagccggtgcaaacagctcacgcagcagctcatcgaaccagccatcggccatcttttcccgcagggaagcaaacagcctgtccgtgtgcagcagcagagtggggtcgccggtgtgcagccagccggtggaagcgttgatggcatccagcacgccgtctggcagggtgcccgggcgctccagcgatgcaaactctgctgcgttcagcgaagccaacagcagttcctgcgggatgccctcggccagaatgccgtccaccgccttgcgcacagcggcagcaaacttgcgggcgctctcctcggtggcaccgcgcagcaccagttccagcaccggctgcagggtgctgtcgtcaaagccaatgtcaatatctgcgcccagcttttcggccagcagcgccgccttcagcggagagttattggtgccaagcagggcatccagcaggatctccacgcccagctgccgctcccggtctgcaaaggcaccggtgtaccatgccagagcacactgcacctcgtccggctccgggttttcggtatagtagggcagttccacgcaggcacccgcctgctcgtgctgcacggtcagctgcggacggctggtgcccttgggcattttggagagataatccctgtccagcagttccagcttttcagccatatccattttgccatagagggtaatgcagcagttgtcggcgctgtagtggcggtgatatacccgcttatacttttcataggtcagcgccgggatgctggccgggtcgccgccggaaacaaagccgtaggccgtatccgggaacatggcccgttccagtgcattttccaactgagcatccggtgcagccagagcgccctgcatctcgttgtacaccactccgctcacggtgccgtcggcactgcggtgccagccctcctgctcaaacacgctcttgtccaccatagccagcgggcagaacaccgcgttcaggtagacatccatcaggtttttgaagtcggtctcattgggcgtagcgaacgggtagaccgtcttatccgggaaggtcatcgcattcaggaaagatgccatgctgcttttgagcagctgcaagaacggcgaggtcaccgggtatttttcgctgcctgccagcaccgagtgctccagaatgtggaacacgccggtgtcatcggatgggaaggtgccaaagccgatgccaaacgccttgttggtatcctcattttccaccagcagcaccgtggcaccgctcacatcgtgggtaagcacggtcagggttccgtgctgttcagggcagtcctcggtacgcacgagggtataaccgggaaatcgttccatttcgttttctcctttgcggttttgaaatcattgcctctattgtatcattcgccgctcaaaaagacaattaccggtttgttaataataaccagaagggcgattttcaaccatttgcttcccgtgcagagcgttttcgcgtagattgagtttaatgccttttgcaaaaggcattgccgccgagtacgttctcttttggttgcaaaagagaaccagaaaggacggcggtgcccgcagggcatgaaagccccagtggggcttttaagccgcagaccggtttgcgcagcaaatgctgtgtgttcagcacagcaaggtcacagcgatttcaacgcgctggatccatgaaaaaggggctgctcgccccttttagaccccaaagctgttaggctccatacaaaaaatccaaatcgctgcgctaaaggattttttgtgttccgccgatttcgagtcgcttacgcgacgagctgtacgggtaagtttgtgctttatctgctgcgcggctgacagcggcaatatgccgtttgccattgcgcccttcccgtgaaaaaggaaacaagccggccccgcagggctggcttgtttgcaaaattataaaataatatttcctctgatattgccaaagcgaaagcatcggcaattttaaatcgtattttttacacctgttttgcgccctcagtccggcaggacacccggaacagcacaaagcccactgcaaacagcagcgccagcatcccaatgcccacattggcgctgccggtcagctggctgcccacgctcacgatcatggtgccaaggaaggacgcgcccttgccgcagatgtcgaacaggccaaagtattcgccggatttttccgccgggatgatcttggcaaagtggctgcggctcagtgcctgcacgccgccctggaacatgcccaccagcacggccagtacccagaactgccactggctggtcaggaagaaggcaaacaccgcaatgccggtgtaggccgcgatgcagaccgggataagctggctggacgggtattttgcactcagccgaccaaaaatcagcgccgaagggaaggccacgatctgcgttaccagcagggccagcaaaaggccggtggtctccagccccagtgccgtgccgtaggcggtggccatatcgatgatggtatacacgccgtcgatgtagcagaagaaggccagcaggaaccagaacacctgcttatcctcgcgcagatgcttgagggtgtggccgatgcgcacaaagctctgccggatggcgtgctgctctacctccacatagttgatctgcttatagctccgcagcagcggcagggtggtgcccagccaccacacagcggtgatgagcagcgccacggaaagggcggtcatctggctcaggccgatggccccgctgcccagcaccagcgccagacacaccacaaagggcacgcagctgccaatgtagccccatgcatagccctgcgaagacacaacatccatgcgttccggggtggtcacatcgcccagcatggaatcgtagaacaccagactgcccgaaaagccgatctttgcaaggatgaagataatcaggaacggcagccatgtagtggcaaggcccatagcacagcagcctgccacgcccacgaacaggcagagcatgaagatgggctttttaaagcctctggtatcagccagcgtgcccaaaatcggccccagcactgccgtgatcaccgtgaccaccgagcttgcatagccccagtaggccagatagttcaccggactcaatcccccagcctcggccagcgcattaaagaaaatgggcaccagtgtggcgatcatcagcacaaaggccgagttgcccacatcgtacaggatccatgaccgctccagcggggtcaccttgaatttttcatgtttcatcttgtttcctctcgcaccgccgggcggtgccccctctttttagatttcaccatttaaaatggccgccgcattcgctttggccatctacagcggaaattttgtttttattttcgtgtttgtcgcgctctgcggagcgctccaaacacattttcaccaaaagggtcgtagcgggaaacagcatctttccctgctggcctgcatcgacttgctcagaactccccgaaggtgtggtcaaaggccttgctcaggggctggtccgtgtccaactttgccacaaattccaggatcagcgtttctgccagtggaagcgcctgcgcatacagttcttccagccgcttgccgctctccacgcacttcaggttcggctgcgggtttgccacaagtccgtgcagcatgtcgtatttgcccaccaccttcatgcctgtcagcaccacccagcgcttgaccggattggacgcctgcagcagcctgtgcactgagatcatgcccttgagcgagtccagcgccacctgctccgagatgccctcgtaaaagggcgcgatcgcctttgcattctgttccgacgggtggatatggctggctgtgaaaaacttcagcgggtcgtatccgtcccggcgcagcagcatgttgtcaaactcggtctcgatctcgcagtgggtcacgccgctttcccgggtgaactgctccacatacgggtggcaggtgctgtccagcgcaaagtggcagacaaaacccagtgcataggccagcgcagcatcccggtctgcctcgcagtgcaccaccctgcgcgcccggtcaaaaaagacccgccccggctcctcgtgcatggcattgcccagcgcacccaccgggttggacttagcagcatggtaataaaacagcaggtccggcccatgcaggccgatatcgtaaagctcacggttctgttccagctgagcacgcagttcatccggcagatgttccagcacattggtgccaaagcggcggtgcgcataagttgacggcatggcagattcctctctttctctccgacagggtgcacaaaacgtcccccggtttttgcgttctgtttcagtatagcagaaagtttcccgaccttctacccttttacgtctgattttggtaaaaaatttgaattattttgtgttttcggccagtgggcaggccgcgcagcaaaaaaggcacagccatctgcagacagctgtgccttctcccttaaaattcagactttttcgtagccctgcggcatctcgttcttccggttgcggtccatcagggtgcgcagcgcgtcgctggcgctcatgccctccttcacgatggcgttcaccgtctgcacaatgggcatttccacattgtactttgcggccagctccatggcagcgggcagggcattgatgccctccaccaccatgccgacttctttgactgcctgctccgggcttttgcccttgccgatcagaatgcccgcacgattgttgcggctgtgcatactggtcgccgtcacgatcaggtcgccgataccggccagacccgcaaaggtgtggatgttgcagcccatggccacgcccagccgggcgatctcggcaatgccgcgggtgatgagggctgcgcgggcgttgtcgccgtagccaaggccggtggagatgccaacacccagcgcaatcacattcttcagcgcgccgctcagctccacgcccttgatgtcggcgttggtgtacacacgcatacaggtgttgctgaacacatcctgcacatactcggcagcggcttcatccgggcaggccgaaacgatggtggtgggcatgtccagcgccacctcttcggcgtgggtggggccggagagcgctaccagctttacccctttgggaccaccctctttgttcagctcgtcggcaatgacctcagtcatggtatataaggtgtccggctccatgccctttgcaacgtccacaaggatctggccgtccgggatgtaaggccgggccttggccgtggtggagcgcacaaataccgacggcactgcaaacagcagcacatccttgccggtgcacacttcctcaatgctcttggtaaactgcagctcttccgggatcttcatgcccggcagattggggtgcacccgcgtagcggaaaggttttccacctcagccggaagcgccgaccacacctgcacatcattgccgctgacacacagcatccgtgccagagccatgccccaggtacctgcacccagaacgccaatttttttcttcgtcacgttcgtgtcctccgtgtctgcaccgcgcaaagggcactgcgccctctgcggtgaatttgcgcctgtgccgggccaagcccggtgcgcgttgttatgttcattgtacacgaaagccggtgcgccgtcaaccgcttgccgcattgcacaaagttttccagatgggtcgtccgtttttgtacacatcacgcgttttgagcaaaccgtttgcactccatccggattcatgctatagtattctggtaggttttgtaggaattttagaaaaagcccttgacttcaagcgcactccaagccttataatacctttgttcttacgatttacaaagtatttgaataccgttctgagggaacatttttcatgtttgaagcatttctttccaaccgtacggtcagcgtgctggcggaggccctgccccgtatccttacggcaggccttaccatgaccatcccgctcacgctggtctccttcttttttgccatgatcattgccgtggccgttgcgctggtgcagtacgccaatgtgccggtgctgcggcagatcgcgcggttctacatctgggtcatccgcggcacgccgctgctggtgcagctgttcatcatcttttatggtctgcccagcgtgggcatcatgctggacgctttccctgctgcggtcatcgcctttgccttcaacgagggtgcctactgtgccgagaccatgcgcggcgcactggaaagcgtgccgcagggccagctggaagccggttactgcgtgggcatgagctggtggcagatcatgcgccgcatcgtgctgccgcaggccctgcgcaccgcagtgcccgccctctccaactcgctcatcggcatgatcaaggacacctcgctggcgtccaacatcacggtggccgagctgttcatggccggtcagcgcgtggccgcccgcacctacatcttcctgcccatctactgtgaggtggccgtggtgtatctgctgttctgcacggtcattaccaagctgcaggcactgctggagcgtcggctcaacgcccacggcttccagtaagaaaggagtgtggcaaccatgtccatgttagagatcaaaaacgtccacaaatcctttttcacctacacaaagccccgcctgcaggcaggcatcttccaccggcccggtgcacgcaaagtgaccagcgagctgctggtgctgcgcggcgtggacctgaccgtggaaaagggcgatgtagtggccatcctcggcccctccggctccggcaagaccaccctgctgcgctgtctgaactttctggagactgccgacgcaggccagctcacctttgacggcgagacgttcgaccttgcccaggccagccgtgccgacattgcccggctgcgcaaaaagacggcctttgtgttccagagctacaatctgttccgcaacaagactgccctgcagaacgtgaccgagggcctcatcattgcccgcaaaatgcccaaagagcaggcggatgccgttggcatgaagatgctggaaaaggtgggccttgccgaccgagccgactactatccgcgccagctttccggcggccagcagcagcgcgtggccattgcccgggcactggcctccgacccggaaatcatctattttgacgagccgacttcggcccttgacccggagctgactggcgaagtgctggccgtgatgcggcagctggccgaagagggcatgaccatgctggtggtcacccacgagatgggctttgcccgcaatgtttcctccaagaccgttttcatggagaacggcgtggtagtggagcaggctccctcgcatgagtttttcgccaacccaaaagaggagcgcacccgcgaatttttgcgcaagatcgctcacaccgagtgaggtttaaccaactcccccagtctgcttcgcagacagccccctccgggatggggcctttggcaaaaccagaaagtctccctctttgcctgaaggagtttatttcacaaatatttttatagaggaaagggaatccaactatgaaacgcagaacttttatttctcttatgagcgtcatggccgctgccggcgtgctgactctggctggctgctccaattcttccggcagcaccgctgcttccggcacggccgcctctgtggctcctgctgccggcgaccagctgtccaacatccagtccagcggcaagctgatcgttgcactggaaggcgcatggcagccctggagctaccacgacgaatccgatactctggtgggctacgatgtggaagtctcccgcgccattgccgaaaagctgggcgtggagccggagtacgtggaaagcgactgggacagcctgtttgccggtctggacgcaggccgctacgacatcgtgtgcaacggcgtggaagtgaccgacgagcgcgccaagacctatgatttcaccgagccctacggctacatccacactgcccttgccgtccgcaaggataatgacgagatcaccagctttgaagacctgaagggcaagaccaccgccaacagccttgcttccacctacatggaactggccgagagctatggtgccaccgtacagggcatcgacacgctggaagagaccatccagctgctcaccgcaggccgcatcgacgccaccctgaacgctgatgtctccttctacgattacctgaacgtccacccggacgcagatttcaagctggtggcccagaccgaggatgcatcccacgttgccattcctctgcgcaagggcgatgccagcgccaccctgctggaagccatcaacaccgccatcgacgagctgcgtgccgacggcaccctgaaggagctgagcgagaagtatttcggtcaggatatttctgcggagaactgaatcatttgaatgccctccgctttgctctgggcattttcagcggaatatttattttaatattgcaaaccccggcagactacggtctgccggggtttgccttttcacgggaagggccgtaaccggcaaatgcatcaatcgcgttttcttcagctctgcacattcattgcatctgaatgcaaaaagctctccctttcgggagagctggcatcgcgcagcgatgaccgagagggttttattcgtgaaaatatgcgtagatgatctgtgccgtctgtttccccacgccgggggtgttttccagctggtcaggcgtggcttccttcaccgcgcccacgcttttgaactgggccatcagcgccttggccgttttggggccgatgccggggatctcggtcagggtggaggaataactcttctgcttcatctgctgcttgcggtaggcattggcaaagcgatgggtctcgtcctgaatggccgtgataaaggtaaaggtgccccggttcatattgatggcaatttcccggccgtcgctgtccacaatggcgcgggtgcggtggtggtcatccttcaccatgccgtagagcggcacatccgcaagggcagtcccggccagtgcttcttttgccgcgctcacctgccccctgccaccgtccatcaaaagcagatccggcttctgcccgaaccagttgctgcagggctctcccttttttgcaagctctgcgtacttttcgtactctgccgcccgccgggagacagtctctgccagtgatgcatagtcgtcagtgcccgcaacggtcttcatcttgaacttgcggtaacccgccttatagggcttgccatccctgaaggtgaccatgccgcacacgctggagccatcgccccagttggagatatcgtagctctcaatggcccggggcggctttgcaaggcccagcacctgcgccagctcgtccagcagcttttcctcccgggcatagcggccgctctcccgggcaagacgctccaccgcgttggtgtgggccatctccaccagatgggccttatcgccccgctggggcacatacagctgcacctcattgccgcgcttttcgttcagcgcccgctgcaaggcatcgctgtccggcggcagctcgtccaccgcaatgatcttggggatctgttcgtcatccagataataccggggcagaaattcctcccgcacggcggcaatgtccgaggtatcgtggaacaaaaactcccgcttatcggtcagccgtccgtcccggaagcgcagcaccgccgcacacacgctgtccggcgtgcctgccagcgccaccacatccatctccacatccgggtccacaatgaccttctgcccggcgctcaccttggtgatggctgcgatctggtcccgcagcagcgctgccgtctcaaattccagccggtccgaggcctcctgcatccgctcgttgaggatcttcaggatgtcctttttgccatagcgaatcaggtgcacggcgctcttgacggcctgattgtagttttcgcagctgatcctgccgctgcacactgccatgcacttgccgatgtgcgcattcaggcaggggcgtcctttgccgatctcctgcgggaagcgcttattgcaccttggcagcagaaaggcatccatggcggtttctgccatctgccgcgccgcaaagctggaggtataggggccgatatactcggcatcgtcctcctccttttgcagcacgaaggagagccggggccatggctcctttgtcaccttgatatagctgtagcctttatcatccttgagcaggatgttatacttcggcgtgtgagccttgatctggctggcttccagcaccagcgcttcaaactcgctctggcagacgatcacgtcaaaggcataggcatgggcgatcatctggctgaccttgttgtcatggggcacgccctcgcggaagtactggctcacccggatgcgcagccgctttgccttgccgatataaatgatggtgtccgtcttatcccggatgatataaacgccgggcagcagcggcagcatacaggctttctgatacagttcagctttggtcatggattctccttgaaaaacaaaaagcggcaggttcccccgccgctccatttatagacacaaattactcagcaaaaccggactccaccagcttgatcaggccgtcaacagcagcctgctcatcagcgccgtcagcgatgatgcggatggtggtaccgcccacgatgcccagagacagaacgcccagcaggctctttgcgttcacgcggcgttcttccttctcgacccagatggaagacttgaactcgttagccttctggatgaagaaggtagccggacgagcgtgcagaccaacctgattttcaacggtaacttctttcacgtacatagtaaagcgctcctatctaatatcgttttgggtatagaatctgtatcctgtgcctgttgcgttacgattattttagcgcaagtcgaaacggttgtacagccccccggcgcatttttggcggtttctccaatgaaaagcggcccatttttcattatttatacaaagataataaaattattccccgaaggttagagggtagatacaaaagttttcaacattttttcgaccatcgggcaatatctcggctgtttttgtgcgtttccagcaccataccctctggaccgagcatccattttcgtgcctttttcgctgtccgatgcacctgcagctgccgcccggagttacttctgtgcgctgccctcgtaccgcatccagaccagagcacactttttcaccacagccggatattgctccggcgtgaactccagctcggtgccgctggtcagcttccagcccatgcgggtgtaaagcgctatggcgcgggtgttggtgttcagcacgctcagcaccgggtgctcgtgctcgctgagctttttgcgggcaaagtccagcatcttcatgccaatgcccctgccgcgggctttttcagtgacgaacagatgttcgatgtgccccaccttgtggttgatgctcacgatgccgtccggcacatccttggtggtgtgcagatagcacacccagcctgcggccttttcctgccgcagctgcaaaagatattcttcctcgttgaggctggcacagtattccggggtccagttctcggcacaggtggtgcggcggccctccacaaagatgcgggcggcagcagcaaactgctcgtcggtcttgacaaggcgcatgttctcgccgcgcttccacttgggcagctcggtcacagggtgggtctcacaccacttctcgtacagctccgggcggcgcaggcgggtgcgctcccggctctgttccccgcgccatgcatcgattttctggtggtcgccgcccagcagcacctgcggcacggcgcggccttcccacacctcggggcgggtgtactggggatactccagcaggccgtcccagtagctttcttcctcgtagcccttctgctcagccagcacgccgggcttcaggcgcagcacactgtccgccaccacaaggctggccagctcgccgccggtgaggatgtaatcaccgatggagatctcttcatccgcaaaagcatcgatcacacgctcgtcgatgccctcatagtggccgcataccagtgtcagattatcgtactgggccagccgctttgcgtgttcctcggtgtagcgctggccgcctgccgtcaggaacacgatatgcggggccggacggccctgtgaagccacttcctgctgcacagcacgcaggcagtctgcgatgggctgagcatacagcaccatgccgcagccgccgccgtaggggtaatcgtcggtctgcttctgtttgttcagggtgtagtcccggatctggtggcagtgggtctcaataaagcccttctttgccgcgcgcccgatgatgctggcatccagcacctgctggcacatttccgggaacagggtcacgatgtccacacgcattcccatagctcactcttcctcccgttcgctgtcaaagtcatcgtccagcaggcccggaatgggggtgacgaggagatagccctccggcgggttgcgctctttcagaaaagcatccacgcccgggaacatgtattccttgccgttcggtgctttgacggtgtagatatcctgtgcaccggggtgatccacgctggtcacaacgccgtacaccctgccggtgtcggcatcccgcacttcgcacccgatcaggtcggccacataccagcggcctgcgggcagggtggcatcattgcggtcaaagtagaacacctgcccccgcagcgcacgggcagcatccatatcgtccacgccttccagctgcagcagagccatctggccctgtgcgcggatggacacgatcttataggccctgccgccctgtgccgaggggtacagcctgcccacctttttgagaaaattcacgccgtcgcaccaaagctccagcttcatttcgccgcgcacgccgtgggtggtcacgaccttgcccgcttccagatattgctgcataatcttgctcctataatcaaaaaggccccttgccgcaagggcaaagggcctgtagggtgctcagtcgatctcaacaaggaccttttcatcgacccgcacagcagccgcgcgcatcaccacacgaatggcttttgcgatccggccctgcttgccgatgacacggcccatatctccctctgccacgctcaggtggtagacgatggtgccgtcctcgcgaggctcgtccaccgtgaccttaacggcttccttatcctccacgagaccgcgggcaactgccagcaacagctcctgcatgagtcagccctccctacttacagaacgttggacttcttcagcaggacgcgaacggtatcagtgggctgtgcgccgttggcgatccactgctttgccttctcagcgtcgatcttgatctcggaaggctccttgttgggatcgtaggtgccgatctcttcgatgaaacggccgtcacgggggaagcggctgtcagcaacaacaacacgatagaagggagccttcttggcgccaacgcggcgcagacgaatcttaactgccatggtaaatatcctccaaaaattgttttgtgcggcccttgcgggcgcatgttgattatattgtacaaacccgcaagggggttgtatcacaaaaattatttcagtccgcggaaggcattggggttgcccatcatgccgcccagacggcgggcaaagcccttggggcttttcttgaactgcttcatcatcttctgcatcatttcaaactgcttgagcagcttgttcacgtcggccacggtggtaccgctgccggccgcgatgcggcgcttgcgctttgggttgatgatggagggcttctcgcgctcttctttggtcatggaatagatcatggcctcgatgcggtcgaacgccttttcatcgacctgactgggatcgatgccgctgccgccgggcagcatgctcagcatcgcgcctgcaccgcccatcttgcggatctgtgcgaactggtccagcatgtcgttcatgtcgaacttgttctccatcatccgcttggcggtctcttcggcagccttttcgtcggccgtctcctgcgcgcgctcgatcaggctcagcacatcgcccatgccaaggatgcggcttgccatgcggtccgggtggaacacatccagatcgtccagcttttcgccggtgccctggaacttgatgggcttgccggtaacggccagcaccgaaagtgccgcaccgccgcgggtatcgccatcggtcttggtgaggatgatgccgtcgatgcctaccttctcgttgaaggtcttggcaacgttcacggcatcctgaccggccatggcatccaccaccagcagggtctcgtccacaggaacggcttccttgatgtccaccagctcctgcatgagcacatcgtcgatctgcagacgaccggcggtatccaggatcacgatgtcattgccgtaatccttggcgtgtgccagcgccttctttgcaatttccggcggctttgcgcccggcagggtgaacaccggtgcgcccgcctgtttgcccaccacctgcagctgatcgatggccgcagggcggtaaatatcgcaggccaccagcatggggcggcggccctgtttgataaagtactttgccagctttgcggcgtgggtggttttaccgttgccctgcaggccgcagagcatgatgatcgtctggcccttgttcttgatgttcaggcgggccgcttcgctgccgcccatcagggcaaccagctcttcgttgacgatcttgaccacctgctgggccggggtcaggctttccatgacctcctgacccatggcgcgctcggacacctttgcacagaagtccttggcaaccttgtagttgacatcggcttccagcagggccatgcgcacctcacgcatcgcggccttgatatctgcctcggtcagcttgccgtgaccgcgcagctttttgaacacaccggcaaggcggtcggtaagggattcaaatgccattgtacggtgctcctttcacaggtttcagctctcgtttgcttcgtcgatggagcggatgagctttaacattttggtcagctggtgttcgtactcggtggtggtcaggccctgcgggccggtgcactcgaaccgtgcatcgatcaccatttgctccagctcttccagcttctgctgcacgcggcggtaacgcgccgcaaagccgaccttctcctccagctccttcagcgcgttctcgccatgcttgatggcatcccgcgcaccctgacgggtgatgccgaagttctcgccgatctcgctcagcgaaaggtcatcgttgtaatactggcgcagcatttcgcgctgtttctcggtgagcacctcaccgtaaaagtccagcagatagcccatttccagatcttttgccatcctctgatcccccggttttgtgcctgtcctttcgagaagtgatgtaaagttcatttgctttacggatgaagtatagcagatgcaccgcatcctgtcaagagcctttcggagatttttccagaaaatccgccaaaaattcgccgtttttgctaaaaggcatcttgacgcgcgcagtccttttgcgttaggataatattgttgtatcccatgaaaggagggtcttcgtgccgatctaccccaatttttaccagacgctcagcgcctgccccatcgtggagctgcgcggctatgctgccgcctgcgggctgaagggacggctgtatgcctatctggactttgcaggccccaccggcacggcccgggacggccttgccgaagggatgctggcccttgccattgaaaaaaagaagctgatctccggtcagcccatcattgaagcggcctccggcccgtttgccgctgcgctcacgctggcgggcctgaccgccggtcacccggtggttctggtgatgccggaggatgcccccgccctgcggcaggagaccctgctgcggctgggtgcgcagatccgccacagcccggcccgcagcggtgtgaacggtgcccgccgtctggcggcacagaccgccgctgccaacggctggtactacatggactggcttgccaatgatgataacccggagtaccaccgccgcgttaccggccctgccattgtgcagagcatcgcgcgggagggcaaaagcgctgtggacgctatcgtgatcggcgtgggcagcggcggcaccgtgaccggcgtgggcgagaccatcaaggcatggacgaacgatgtgcgcatcgccgccgtggagccttacgaatcgcaggcgctgggcggcggcctgaccggcccccacggcatcagtgatctgggctacggctttgtgccagaaaacttcaacgcctatgtggtggacaacgtggttgcggtgaacaccaccgacgcgcagcgggccgcgcaaaaggtgctgcgcaccgatgccatcccggcttcggtggcatccggtgccgttttgcaggcggccgcacagctcatccatgtaggagccagccgctctgcccttgccatcctgcccggacggcagatcgtaaatacgttataaggagaaatcatagagttcccatgacaaacgacatgacaaagggagccattactccgctcctgatccgttttaccattccgctggtacttggcaacctgttccagctcacctacaacgccgccgacagcatcatcgtgggcaagttcgtgggcgaggaagcccttgccgccgtcggcacctccaacccgctcatgactctggccatcctgtttatcaacggcatgtgtctgggtgccggcattctggtcagtaccgcattcggtgccggtaatacccagctgatggagcgtcaggtgtccaccaccgccattgcaggcaccgtgttctcgctggcattctcggcgctgtgcgtcattctggccacgcccctgctgcagctgatgcaggtgcccgccgatatcctgcccattgcggccagctacctgcgcatcgtgtttgcaggcctgatcttcaccttcttctataacttccttgccgccaccatgcgtgcactgggcgacagcaagagtgccctgtatttcctgatgatcagctctgtgctgaacatcggcggcgacctgttctttgtgcaggtgctgaactggggcagcaacggctgcgccctttccaccgtggtcagcgaagcactgtgctgcgtgctgtgcgtactgtacatccgctggaaggtgcccatcctgcagctgggcaggcgttggctggtgtttgacggcaagctgctgcgcaaaacggtcagctacggctgggccagcgccatgcagcaagccaccgtgcagcttggcaagatcgcggtgcaggccatcgtgaacaccatgggtgtcaacgccatggccgcctttaccgctgcttcccgcattgacgactttgcctataccccgcagcagaacatcggccacgccatgaccaccctcatggcgcagaaccggggtgccggcaagcacgaccgtgtgaagcagggcttccactgcggtatgcgcatcgaagccgcttacggcgtgctgatcgccgttgtatgcttttccggtgcgccctttatcatgaagctgttcgtcaccgacccggaggtcgtccatctgggcgtgcgcttcctgcgcacggtttccctgttctacctgatgcctgcagccaccaatggcattcagggcttcttccgtggcattggcgatctgaaggtcacgctggtgtccagcaccttcaacatggtgttccgtgtggcggcagctgcggtgttcgtactggtgtggaaaatggagatcgaagctctgccttacagctatgcggtgggctgggtcgtcatgctgctctacgagctgcccatgctggttcggtatctgcgcagccatggagacgaattataatcgttttatttgatttgtgatacgaaaaaggctctgcgtcgcaaggatgcagagcctttttcgtattaaacttacttgcggcttgccagcagattctcgatcttcttcagcggatcgatgatgctggaaacggacatatcgtggttcagagccaccacaaagtatgcagcgtacttggaaacatccacatccacataccagtcgcgggtgagcagctcaggcatccggtaggtcaggttggtgcccacaacataggtcagcttgccctcggccacagccttgtcgaacttgtccagaccgctggtgaacagggggaaggtggcgttggcgatgatgttggcagcgccgcgctccttcaggttgctggcgacctccagcatgctctcgccggaagcaatgatgtcgtctgcgataaagacggtcttgccttccacgctctcgcccagatactcgtgggcaacgatggggttgcggccattcaccacgcgggtgtaatcgcggcgcttgtagaacatgcccagattgcagcccagcacgctggagaagtacatgttgcggttcatggcgccctcgtccgggctgaccacggtaaacttgctcttatcaaaggagaggtccgggtccttcttcagcaggctcttcagcacctgataggtgggcattgcgttatcaaagctcatcagcggcacagcgttctgcacgcgggggtcatgagcatcaaaggtgatgatgttgcgcacacccatggtctgcagctcctgcagggccacagcgcagtccagactttcgcgcaccacacggcgatgctgacggccgccgtacaggctgggcataatgaccgacacacggtgtgccttgccggccactgcctggatcaggcgcttcaggttggcgaagtgatcgtccggagacatgtggttctcgtagttgaacagcttgtaggtcacactgtagttgccgggatcgaccacgatgaagatatcgtcgccgcgcaccgactccttcaccagacccttggcatcgccactctggaagcgggggcagtcgcaaggaataatgaaggtctctttgtcaattccggcagccttggcccagcggaccagatgcttgtcgatcaggccggtcagttcctctgcaccggggcaggagatcagccgcatatctgccacgctgggctgctcaaagaacgacttcggggaaatttcaatagacatagtcataactccttattgctgtttacgatccgtatcatgcacacaagagcgcatatctggttttattttatcacatttcgtcgattctgccatatcaatttgtttcatgtcaggattttctgcgccttgcacagctgtttttcttttttctcaaagagaatgtgtgttttcgacaaaaagacagccgattctttgccatttcgcaaatttcggctgattttcgcggaaaagtaagacttttctttgtctgagcagtctgccgggatcgctcttccgggagataaaaatgcagtgtgccgggcagcggagatgctgctgttttcgctcgttcgccctccccggcagagccgcaaaaacaaaggcatctgcagcaaatttgctgagcttcagaagctcagaagcgatcgttgcagatgccttcttattttatatgattgcgataggtgctttgtgttccgcttacagggcagcgaccgcagccttcagggcatccacgcggtcggtgttctcccacttcacgcccagatcctcgcggcccatgtggccgtatgcggccagcttgcggtagatgggcttacgcaggtcgagttcgcggatgatggcggcgggggtcaggtcaaagaccttttccacagcctgctcgatcttctcatccgagacggtgccggtgccgaaggtgtccaccatgatggacacaggctttgccacgccgatggcgtaggccacctgcacttcgcactgcttggcaagacctgcagccacaatgttctttgccacccagcgggtcgcataggctgcgctgcggtccaccttgctggggtccttgccggagaaggcaccgccgccgtgacgggcatagccgccgtaggtgtccacgatgatcttgcggccggtcaggccggtgtcaccctgcgggccgcccacaacgaagcggccggtggggttgatgtagtacttggtgttctcgtccagcagctcggcggggatggtggccttgatgaccttttccatcacgtctgcacgcagctgttccatgctgacgctgtcgctgtgctggctggagatgaccacagcatccacacgcacgggcttgttgttctcatcgtactccacagtgacctggctcttgccatccggacgcagatagtccatctcgccgttcttgcgcacctcggtcaggcgctttgccagcttgtgagccagactgatgggcataggcatcagctccggggtctcatcgcaggcatagccgaacatcatgccctgatcgcctgcaccgcccacctgatcgttggtgcccagtgcgatgtcggggctctggccgtcgatgttggagatgacggcacaggtgtcggcatcaaagccgaactttgcgcgggtgtagccgatatctgccaccacctcgcggacgaccttctggaaatccacatagcagttggtggtgatctcgcccatgatgtgcacaaggccggtggatgcacaggtctcgcaggccacacgggcatcggggtcgtgggtcagaatttcgtccagaatggcatccgagatctggtcgcagatcttgtcgggatgtccttcggtgacggactcagaagtaaacaggtgtcttgccatttgttttgcctcctaaagtttttacagcagagtgtgtatttcttgctccaacattccgttcaagcttttttgcgcgaaaaataaaagcgcccagagcccgaaagctctgagcgttgcactcttatctctcggtttcccgcaggatttggcaccttgcgctcacgcgcaggttgtcgggcttcacagggcctgtcccctcagccgctcttgataagtcggtattcagttggtacgttcagtattctatcattgcttcgtcagattgtcaagaagagtatcactctttttagacattattctgaaattgatggagcgttcccctgctccggtacggcatggccgttccgggcggcgtggaaggcgcgcttttccgcatacatccgctcgtccagttccaccagaaatttctccacgctgccgccctcatactttgccacaccggtggagaaagacagctgaaagctgcccgccggggcggcggcgttatagcgctgcacccgctgctcgatggcggcacagatcttattcaggatctcctccgagccgtgccggatcagcaccatgaactcatcgccgcttatgcggatagccaccgagtttgccaccagcgccccggacaggatgtgaccgatctcctgaatggcgcggtcgcccgcaccatgaccgtaggtgtcgttgatctccttgaagcagttcacgtccatcatgatgccgtaaacatccttttcctgcgtggcgtggatgcgctccagacagtagttcatgtacttgcggccaaacagaccggacagctcgtcgagatagctgcgcagactgcggagctgactgtccacaaacacaaaggcgatggccaccgacagccagccgaaggccataccgtagaacgcaccctgcagcaccgtgcccaccgcacaggtgatcacaaagtagtacaccgagaaaaactccaccgtaacgccatcgcgcttggccttatgcacctgccacacgctctcggcataatagccgaacagcagcaggtaaagcaaactgttcagcggaccgcgatggtaaacgttgtccgcggagatggtaaagatccatcctgtgccgaaaaggttcgccgccagcagcgccagaacagccagcagcggcgcgcccagaaacagatgccttctgcgcaggcgtccggtgctgtggtagacccggaagtccacatacaaacaccacgcaaagcccacgctcacggtagcgccggtgcagacggtgttcatgaggtacagccagaaccggcttgccgcaccgggcacgccgtccagcagaaagctgatcgtctctgtcgcctgtgccagcagagtcaccaccagcatctggcagaacagctcacttccaacactgtttttactctcgccgcgcacccgcagcagaaacagaaagcataccagcaccgcccctgtgccattggccacaaggatctcgggtatattcattgcatttcctcccctgcccgccttatcccacaaggcagacagcccctgttttatacagtatctgtttgtattatataccctgccgcgccccgcttgcaaggcttggcatcaaaaagggccgctgcacagcaatttgtgcagcggcccttgggaaaaccagacgatccagaacagccttcgcgtgcgctctggttctgttctgcggaaatattatttataattgcttttttcgcagaaagatcaatagccctttgcctgctcgccgttcagaattttgacagcgcgggaggtgcccagacggtcagcacccagcgcaaggaaggtctccatgtcctccacggtagaaatgccgccggcagccttgaccttgcagcggccatgcacgcccttgaccatcagctccacatcgtggaagtttgcgcctgcggtggagaagccggtgctggtcttgatgtagtccgcgcctgcctcgcagacgatatcgcacatcttttccttttcctcgtcggtcagcaggcaggtctcgatgatgaccttcaggatcttgtcgcccaccgcctgcttcacggcgcggatgtcctcgcgcacggcatcgtactccttgttcttcaggcgaccgatgttgatgaccatatccacctcggcggcaccattctcaatggcagtcttggcttcaaacgccttgctggcggtatccatggcacccagagggaagcctaccacgcagcataccgggatgcggcccgccatatactccaccgcctgcttgacgtagcaggtgttgatgcagacggatgcggtgtggtttgcaatggcttcgtcgcacagggtctggatctggggccaggtggcctccggcttcagcagggtgtgatcgacatgggagagaatttcttcacgagtcatgtttgtttctcctttttacttgctggcacggcgcacctttgccatgccgacagcactcagggcaattgcagttgctgagaccgttgcaccaataatgcccagcaccagaccggagaccagaaatgcaaaacctttcagaccacgcttcataaaaccgtacctcctaaattatattggatattttctccgcctgcggcggagaaaatatctcacttacgatttttaaagatgatcagcttgctgaacacatagttcagcacgatcaccagtacattagaaaagatcttcacggcaaggccccacagtgcctgcgcattgtagcggctggtaacgaagatcgccgtggggccgtctgcaccgccgatgacggcaatagcggcagagccatccgcgacccccgccggtgtgcctgcataggaggctgccatctggatggccgtatccgggccaagccagtgggccaccacgctcagcaccccctgcatcagctcgtccatcagcgctgcaccctgcgcagccagcagattgcccagcaccagcataattgcagtgtccagcagcattgtacccagacgacaggtgacgaatgcaccaaattcccttgccatggccttgccctgcgttttgctgcggaacacaaaggcgcggttggtgcagtaggcaaacaggatgcagatgatgttatccagcacattgccccagctgttggcggctgtatagccaaacagcttgttgaacagcgcatacagcacaatgttcagcagggtgcacagcacgccgaaaaccagatagctcagtacttcccagtgtttcttgatccagtttatcataaagttatgtctttattttg

SEQ ID NO: 1106 - DNA, 4189 bp, Unknown
  gut microbiota DNA sequence
aaaaggcaggtacaccatgtttccacagtgtacctgcctttgtcgtatttgggttcagtgtacctactacaccaaccgcttattcgattcttacaccacaccgctttgtaaggctccttttcgggaaaacgtcccaaaattggtgtagttgtggtgtattaccgcagatgccgtttgaaatccattcaaaattccatcgtatctgcgttttaattttgcattttactgctcaatcggcttcatcgtggggaacagcagcacatcgcggatggaggcgctgtcggtgagcagcatcaccagacggtccacgccgaagcccagaccgcccgtggggggcaggccgtactccagtgcgttcacgtagtcgtagtccacctgtgccttgcagtcgggctcgatggccttgcgctcggccacctgacgctcgaagcggcccttctggtcgatggggtcgttcagctcgctgaaggcgttgccgtactcggtgcagtcgatgaaatactcaaagcgctcggtgaaggcggggtcgtccggcttgcgctttgccagcgggctgatctccacggggtagtcgtagatgaaggtgggctggatgagcttgtcctccacgaaggcatcgaagaactcagccagaatggaacccttggtgggcacctcgggcagctccacgtggtgctccttggcggcggcgatggcatcctcgtcggacttccagtcgttgaagtctacgccggaatacttcttcacggcttccaccatggtcaggcgctcccagtgacccatgtcgatctgcttgccctgataggggatgaccatgctgccgcagatcttctgggcaaggcgcttgtacagctcctccaccagatccatcatgccgtggaagtcggtgaaggcctgatacagctcgatgctggtgaactccgggttgtgcttggggtccatgccctcgttgcggaagatgcggcccacctcgtacacgcggtccatgccgcccacgatcaggcgcttgaggtacagctcggtctcgatgcgcagcaccatgtccatgttcaggctgttgtgatgggtgtagaaggggcgtgcggatgcgccaatctcgaagggggtcaggatgggggtgtccacctccaaaaagcccttttcgtccagataggcgcggatctccttcaggatctggctgcgcttcacgaaggtgtccttcacctcggggtttgcaatcaggtccacgtagcgctgacggtaacgcatctcggtgtcggtcaggccgtggaacttctcgggcaggggacgcaggctcttggccaacagggtcagctcggtggcgcgcacgctcagttcgccggtcttggtgcggaacacctcgcccttcacgccgatgatatcgcccacgtccagcttcttgaaggcggcgtaaggctcttcgcccagctcatcgcggcggacgtacagctgaatgtcgcccttatcgtcccgcaggtgggcaaagcttgccttgcccattacgcgcttggacatcatacggccagccagcgccacggtcttgccgctgtcggtctcgttgggcaggtcggcaaactcggccttcaggtcggcagagtaggcatcctgcgggtacttggtcagggtgaaagggtcgtggcctgcagcctgcaggtcggccagcttctggcggcgcacctgcacctgctcgctctcggacaggccctgcgccgggttcttcttttgttcttccatggtttctcctattcgtttggcctgctcagcctgcagcgtgggtaatgttcagcacggtgtactccacggtgtggccggtgggcagcagcacttcggccttgtcgcccacagccttgcccagcagagcgtggcccacggggctttcgtcgctgatcttgccgttcagggggtcggcttcggtgcggcccacaatgtcgtactcctcgttctcgtcctcgccggtcatgaggatggtgacgtgggtgcccacagagacattgtccacgctcagctcgctctcatcaatgatgacggcgttcttgatcatctgctccagttcggtgatgcggttctccaccagaccctgcgtattcttggcctcgtcgtactcgctgttctcggaaaggtcgccgtggctgcgtgcttccttgatctcttcggccagctccttgcggcgcaccgttttgaggtattccagttcctcctgcattgccttcagaccggcagcggacatcttgatctcttgtgccatttgagaatctctccttgtctctatttgtgctgtgcagccgcaaagccgcacaagaatgccattttgactacattattataatagcaggcggctgctttgtcaacaaaaaaggcggcggtagggcagaaaaatgtgtcggctggagcaaataacggaacagcccgctcttcaaaaaaggagaacgggctgttttgattccattgggtgttacttggtagacggtttcatctgctgtgcctttttccacgcgcgaatggcttttacggtggagaccggcacatgggggtcgaatttgtccggatgctcactgctgcgcagcgtcatcagctcgttttcaattgcccactgtgcagcctgctgcgcatcggtgtcgtcggtgtcgatatcggtataagcggcttcggcagcaggaacaggctgtccggcatccttccagagcacttcggccagttcgatgcgagtttccgggatggcggtacccttgggcagatgatggatcagccacagctcggtgcccagctgatgcagcccgcccaccagcagtgcaccgccaatgatcgttaccgcagtgctgatggcaggatcaacagaggcgtcggcagaggcgtcgtcgatcgcgggagcgctgggaatatccattgttgaagctgtgactgctacgcgattcttaggcatagtaaaggtgaagctttctttatttttgtagtattctgaattgcttaaaccatcaatctcccaactaccaaaagagagaccactgtcagcgaaagactgctgatcaaaagtgatttcaactgtagcaccgacgggcacaatagctgtatcgccaactacaggatcgccatctactgtgaaaatgccgccgctgacgaccaaaggctgtacccagtaattcacggtgaagccgtccgcttgaattttttccaaaactgtgttatctacgctgccgctttttagtagagcgttccaagagtatttggtaccgtcataattgatagtgttgaactttgcgcaatcaataaaagcatcttttttgatttcagtaacatcatccgagatgtttaatgtggtgagatttccgcatttataaaaagcattttcgccgatggaagtgaatccattgggaagggtaaaagactccagactttcacagttggcaaaggttgcatcaggaagcgcgcttagctgcgaattcttttcaaaggtaactttttttagtccgatacagcggttgaacacatgtgaactcatagtagttacactgcttggaatggtgatttctgttaaactataacagttctgaaaagcttgatatccgattttagtaagcccatcgggaagattgatgtcttcgagtttgaggcaagaaaagaaagcgaaatcaccgatttccttcaaactatcgggaagtgtaatggatgtgatttcgccgttaaatcttgtgttgcgaaaagctttatccgcaatggctgttacagtgtaggattctccattcaaggaatttgttgctttttctggaatagttacttgggtcaataaggtggttgcttcgggtcctttgactttggcggttgtgtcacttgttatctcgtatgtaagaccgttaaagttaaatgtatcgcccgtctccgccgcaaatgcagagactgccccgacaggcagaaatgtcagtgccatgctgaatgccagcagcaggctgataagtcgcgttttcatataaattcctccttgatacgacttttgcgggtggatcttgtctgcgcggatcgtggacaaaaaagattcacaattccttattctacccccccaacagaaatcaaggattttagacaagattggaaggatgcctaaaaatggcagagatttttagaggatctgagaaaaataacaacaaaaatccccgccgacagagggaaagcggagcagggcatcatggaggccaag

SEQ ID NO: 1107 - DNA, 36242 bp, Unknown
  gut microbiota DNA sequence
cccattctggaaaagctgctgctgttcaaggagcagcaccctgccattccgctgcacttccatcttggggattttcccaccctgaaaaaacgcctgcagcagaaaaagctggactttgccctgcagctggagctggtcccgctggaggataccccctccctgctgcgtgctcaagtaggccagctgcgccagtacgtagtgctcaaccgccagagccatctgtccagctatgcgtccctgcaccgcagccagcttgccagcgaacaatattatgtacccgccatggaccgggagctgtggaaccagtttgcgcaggtcctcacccgccacggcagcgacccgcagaacatcaaatttgcgtattccatggaggagttgatgctgcagctggctttctacggcggctataccatccttgccgagccggtgctggctcagctgcccgccaacaaaaacctcacttttatcccgctggaaaacgataccgttcccgcttgggccgtgtggaaccgcgagaacatctcgcccgccctccaactgcttctgcgtgagctggatattgacccgtgacctgctgcagaacgcattgacgatcttgcgtaaaagcactgctcttttttcagaaattcagcaagaaaggtctctccggcgctgcgtggagaaatgcaaaggtcgatcacatgaatcaaaacgatcctgtcccggacgatttcactctttcgccggcccttgtggatgcactgcccgcgctgtttttttgcctgcaacatggtactggtggcaggaattttgcttttatcatgaatatgcagtgagccggaagcctctgatctacagaaggctcccggctcatttgctatggactttttacgtggatgccattcgagtccttgatcgaaacaaaaaattccacgtcatacgacttgggatttcctggtagcctattctgttgctcaaacaccccactggggtgtttgttgctgtcgcaaacgcaaacttccgataaacaaaaacgtacccgaaccctttttcataaagaatcgggttcgagtacgaactgtttggtggagaattagggactcgaaccccagaccccctgcgtgtgatgcaggtgctctaaccagctgagctaatcctccatattttgttttgtgcgttccgaactggaacgtgattattatagcacggcctttgccaaaatgcaagccctaattttaaaaaaatcacactttttgtatccgctttccggttgccctttgatgccaaatcgtgtatactgaacacagaaactttcccaccgggaaaagaggtacaaaaaatgctgacacttcgtggaatcattacgctgatcgttctgatcgttctgtttgcactggccgttgtgtggatctccaagcagggcggctggaagggcgagggctgcggcggcaactgtgcatcctgccacagccactgcgaaaaacaggacccgaacaaaaaagcctgagttcaaaaatgcccccggacattgcctgctggcagcgtccgggggcattctgctttcagctttccgtctcgcggtaaaacaccccgcgctctgccgcgtacacggcaatggtgctcagcaggtcctgatgggctttctggtaagtagtgcggccgatgtgcagctgatcgatcacatcgtcctccgtgcggtgctgcacatagcgcagctcgaacagatccgcacgcagcgggtcgttttgccggtaataggcaaggccctcctcaatggcggcgcaccagctgcgctccaccgggcttcgtgcacgctgccgcatcccataccggtacagtgccagccgcgtctgatttctctgctcgcttgtcatgttctgccctcctcttttcatccgcgcggcgtgccagcacttcgcggcggttctgctcttcaaaaaagcagagatcccgctcgtacatgctcagaccaagcaccgcgctcagccgttctgcttcgctcagcttgaactgtgtgcgcccctgcagtttcaggttcagtgcattggggctgatcttcaaggctcgtgccacatactgcatcttgtacccactggcgcgaatataatcccggatcatttcagtatttgccatattccgctctccttttttcgtatcggcaatgccgttccacaatctttagttgtagtatattcctgcattgattcagtgtcaacccatttttgcaaattcgcagaaaaaagttgattttaatgcaattttttggtatacttctggtaacagcattctttttacggaacaaccatacgtttttttagagaggtttcgcatgtctgagctttctacccgtctgcatctgcgccgcaaagaactgggcctttcgcaggaagagcttgcccagcgcatgggctatcggtccaaatcctccattaccaagctggaaaaaggcatcaacgacctgccgcagtccaaggtggaagagctggcagccgcgttggagaccacccctgcctatctgctggggctggacacaccctgtccgccgccgggctttgagccgctgcctgccatgacgcaggtcccgctgatcggttccattgcctgcggcactcctatcacggcagagcagaacattgaacgctatatcggcgttcccgccgcgtggcgcgccgactttgcgctgacctgccacggtgacagcatgtcccccaccatctgcgacggcgacatcgtatgcattcgctgccagccggaggtggagcagggcgagatcgccgcagtgcgcattggcggcgaggccaccctcaagcacttccaccggcagggtgatgctgtgatgctgcttgcggacaatgccgccgtctgcccacccatgatctttaccggcctgcagctggaagagctgcacattgagggccgcgctgtcggcttctgccgggggctgtgagccgcctgcagtctttcaggcacgtttcataaaagaaggaggcttctcatgtttttctcccgcaaaaagcctgcccattcttacgaccccgccacccagcagcccgcactgcggtgcagcatctgcaccggggagcaggtggccggtttcatctccccggatggccattttgaggacgttcagctcattcgcacgcctcaggaactggacgcattccgggcacggtacagcatcccgccggaatgccccctgaaaaagatctattaaaaggagttcaccatgcccactgcacctgaagagatgaccctgaaggtcattgcccatatccatactgcctttcccaccaagttcggcatcccgcgccagagcggccttgtggacgagctgcgcggcgaggtgatctttacgcccgaataccgcaatgccgatgccgtgcgcggtctggaagatttcagtcacatctggctggtgtggcagttctccggcgcggtgcgggacagctggtcccccactgtacgcccgccgcgcttgggcggcaacacccgcatgggcgtgttcgccacccggtcgccgttccgccccaatcctctgggcctttccagcgtgcgtctggaaggcatcgagcaccggccggacgttggcccggtgctcatcgtgcgcggtgccgacctgatggatggcacccccatctacgacatcaagccttacatcccctatgccgactgccacccggatgccgccgagggctttaccggccagacccagttccaccgtctgcaggtacagttcccgcccgaactgctggcacaggtgccgcaggccgaccgcgccgccctgaccggcgtactggcaggtgacccgcgcccctcctaccagcacgacccgcagcgggtgtacggcatggagttcggcccggtagaggtgcattttaccgtggatggcgaggtgctcaccgtgaccggcatcgcccgccgctgagaggaagcgtttatggaactgcggaacatcaatacctttttgcacatcgccgagctgcacagcttttcccgcactgcgcggcagcttggctattcccaatcggcggtgtcctcccagatcgcacagctggaagcagagctgggcgcaccgctgttcgaccgcgtgggcaagaccgtgcggctcaccgatgcgggccagacctttttaggctatgcacgcaccctgctggccacggcgcagcaggcgcaggctgccctgcagcccgcccggcagatcagcggcagtctgcgcatcgcgctggcggattcggtgtgttccaccttcctgcccggtctgctcaaacgctaccacgccctgtgcccgcaggtggagctggtgctgtgcaccgccactgccgacgggatgctgcagatgctgggcacaaatcagatcgatctggcctatacgctggaccagcccctgctgcagcccaatctggtgcttgcggcggatgtgccggagccggtgtgttttattgcaccgtcggctcacccgcttgccgggcaggaagttgttacgctggaagagctgccccggcaggaatttctgctcactgagcgcggcatgagctaccgcgacgctttggatcagtgccttgccgcccgcggccttgccatccacccttatctggagctgggcagcgctgcgctgctgtgccagatggtggagcagggcatgggtctttccttcctgccggagtacatcgtgcgtccggcgctggccgcaggtcgtcttgcccggctgaatgtgccggactgcaccgtggagatgcatcgtcagctgttttatcaccgtgacaaatggctgacccctcagatgaaagcctttatcgagctggtgcgccagcccgcgcccagcactgccagcaaatgaaaagagcacgggtccattgaagcgcaaagctgaacacacaaacgaaaaaccgccgaaggctttccttcggcggtttttcttatgataggaggatcaaaaatgatcgtcgctaaatattagttcaggatggtcagctcggtctcgatgtcgaacaggtggaccttgtggggatcgaatgcaacgcggacggtgtctccgttgcgtgccttggaggtgggagccacacgagcggtcatcttgttgcccttgtactccagatacaggtagatctcagcgcccatcatttcggagacgtccacctgagtatccagctggcagtcagcgtgctttgccataaactcgggctcgtcgtcgatgtcctcgggacggacgcccatcttgatcttcttgccgacgtaagcatccagcttgccgtctgcggtcttctccttgggcagggggatcacgtcgccgcccagatcaacaccgtacagctcacccttcttgatcagggtgccgtccaggaagttcatctgggggctgccgatgaagccagcaacgaacatgttgcaaggcatatcgtacaggttctgcggggtatcgacctgctggatgatgccgtccttcataaccacgatacggtcgcccatggtcatagcctcggtctggtcgtgggtaacgtagatgaaggtggtagccagcttcttgtgcagcttgatgatctcggtgcgcatgctggtacgcagcttagcatccaggttggacagaggctcgtccagcaggaagactgccgggttacgaaccattgcacggcccagagcaacacgctgacgctgaccaccggacagagccttgggcttgcggtccagcaggtgctcgatctccaggatcttagcagcctcgtgcacgcgcttgtcgatctcgtccttcggggtcttgcgcagttccagaccgaaagcgatgttcttgtaaacggtcatgtgggggtacagagcgtagctttggaacaccattgcgatatcacgatctttcgggggaacgtcgttgatcagacggccaccgatgtacatttcgcccttggagatctcctccagaccggcgatcatgcgcagggtggtggacttgccgcagccagaggggccgacgaagatgatgaattccttatcctggatctccaggttaaagtcggtaacagcgggagcggtagcacccggatagatcttatagatgtgctggcagctgatcgaagccatagtcgtttgcctccataatttttaaggttctcacgctcttgacggcgtgttcattcgttggtactataatagcagataattttgtgatataaaatagcattttattgattagaggtgtcagatattgctttttgactggaacaccatcgcttttcccgcttccgtgcaggatctgcagctgtctgcccccctcaccctctccggcgaaggactgtgggtgtgccttgtgtccagcggccagtgctctgcatccgtacctgctgccgggccgctgccgctgggtgcagcgctcattttgccgccgcagtccgtgcctgccgggcacctgatcctgagccgtgccccgctggcccttgtgccggaaagcatctgccatctgctctgcgtccagcttaccgggcaggcggcttcccagtttctggccgggctgcacgaactgcccttccttgccaagggcggttcctgcccggccgctgccgaactgatggaccgccttgctgaggaaaaggccgcccacagccgtgcccgcagccagttggcctacgcactgttgtgtgagctggccgatgccgacagtgccgcgtccgccctgccgccgctggtgcaggccgccattgaggacatccgcgcaaactacgcgggcctttacggcgtggaggagctgagcgagcggctgggcgtgtccaagagccatctagtgcgcacctttaccgcagccattggcgtgtcgccgggcaaatacctcaccactgtgcgcgttgaagcagcccagcggctgctgctccaccgggagtacacactggacgtggtagccagcctgtgcggcttttccggtgccaactacctgtgccgggtgttcaaaaaagaaaccggccaatcccccgcacagtggcgggcaatggccggtcacgccgcgcagagtgggctttcgcccgaggaatctctgcgcgaacaggagctttatatttaagggctatgcggtctgctttttaccgcgcagcagcaaaaacagggtcagcactgcggtgagcagttccgatgccgggaacgccgcccatacgccgttcatgccaaataggcggctcagcaccagcgagcaggccacgatggccaccatgccgcggcagatggaggttacggaggcttccaccgggcggttggtcgcactcagatagcccgctgccacgatgttgaacccggcaaagaagtagcccacaaagtacagccgcatgcccatgtgggcaaactgcgccatctgggcggagctttcgctgttgaatatgcccaccagtgcatcggtagcaccaaagatgatgccgtacagcaccgctgccagcaccagtgcggtgcagctgcccaggatgagcagctttctggcaccggccttgtcgcttttgccgtagcactcgctcaccagcggctgtgcgccctgtgctacaccattgaagatggccgttgccaccagcgcaaagttcgccaccacgccataggccgccaccgccacattgcccgccagacccagcagcaggaagttgaatacggtggtggtaacgccggaggacatctcacccacaaagccggagatgccaagctggcagctctggcccagcagccttgccgaggggcgctggcgcacgaactgcacgctgttctcctttttaaagaagtggcggctgcagatggaaatgctgatgatgggagacacggcggtggccagcgccgcaccggccagccccagacccatgggaaacatgaaaatatagtcgaacaccacattgaacaggctgctgctcagggtagccaccatggcaagggaggggtcgccgtcgttgcgcacaaaggccgacacgatatagttgcacatgaagaagggcgtgaacataaggaagatacgggcatacgggatgcccagcgccatgatccccgcgtcaccgcccatcagccgcagaaggccgccgggcgcaaaaatgcctaccagcaggaacggcacgctgagcacacaggcgcagaagatggcattggaaaaatagcgctggcagcgctcgtctccctgcgccttgaggatggcgtagcgggtggccgcgccaaggccgaccatggagccgacggcaaagatgaagttgtagaccggcaggcagaggttgagcagggtcacgccgtcggtgcccgccgcctgcgagatgaaataggtatcggccagaatgtagcacgaggtgcccagcaggccgaagatattctgtgatacatatttaaagaactgttttgtcaggttcatccaagttccctttcatggcattttttacgcataccggcatattttagcacaccccaaaatgcaagtcaacacaaaagcgccctgtaccgcgcaaaaaagcattgacagcccgggctctggcccttacactgggagcggtcacaaaatcatccccctcgccgggggaagtcttttattaccagcatcttaatttgggaggttctctatgtccggcagcacactgttttccattggcgaagcactcatcgatatgatcccgtccagggtgggctgttcttttgacgaggttccctcgttcagcccgcgcactggcggcgcaccggccaacgtgtgcgcggcctttgcccggctgggcggcaaaagtgcttttctgagccagctgggcgacgaccccttcggccacaagatcgcccgggagctggaagtctgcggcatcgacctctcccatctggcctttaccgacaaggccagcacagcccttgccttcgtcagtctggaagaggacggcagccgcaccttcagcttctaccgcaaaccctcggcggacctgctctattctccggagcagatcgaccctgcatggttcgccgatgcctttgccctgcacttctgcagtgtctcgctggtggacagccccatgcgctatgctcatcttgcggccattgccgccgcacgcgaagctggtgctatcgtcagctttgacccgaacctgcgcttccccctctggccggaccgcgacatgctgcgcgggaccgtgctgcagttcctgccgctttccaatatcctcaaaatttcggacgaagagctagaatttctcaccggcactgcggacatcgaatccgccctgccgcagctgcttgtgggcgatgtgcagctggtgctgtacacctgcggcagcagcggtgcccacgcctatacccgcaccgcccacggctttaccccctgccggaaagtccgggctgtggacaccaccggcgcaggcgacggcttcatcggctcgtttttgtggcagctgaaacgtgacggcgtgacactggaaaaactggcaaagctcagcaaaacaaagctgaacgaataccttgcgttttccaatcagttctgcggcatcagcgtgcagacgaatggtgccatcgacagctaccccacccttgaccagatgcagtaaaacatacaatatgccctacgtcacaaaaccgcagggcttcttttctatttacaatttgtagtattgcgccgctatattccagttttgttctgttcccgacatcttttctgccggtttaagatttgtttatcctttgtacaagccttgttcttattctctgcccggttccatgttaccataagggcaagaacaacaagcagggaggctttatccatgtcctttgaatttacccttctggatgccttacaggctctgcgctgtccggtgctggatgcactggcggtgtttttcgatcaggccggtgcccacggcgagatctggatcgccttcacggcggtgctgctggcgttccggcgcacccgccgggccggactggccatggcgctggcgctgggcctttacatgctggcgggccactgcgccttaaagccgctgttcgcacgcccgcgcccctgcgacctccgtccggagatgctcacgctggtggcccggccccatggctggtccttcccttccggacacacatcctccgcctttgccgctgcctttgcgctctggctgcagaaccgcaggctcggcgtcccggctcttgcgctggccgggttcatcggcttcacgcggatgtacctgtatgtgcatttccccaccgacattctgggcggcgtggcactgggccttgcattgggggtctgcggctccctgctggcagataagatcagcaacaaatgggcgaaacgcagtgaagtaaaacgaactgtataaaccaatttcgtctcgcactcgttcttgctttgctttttacattcagatgaagtatatcgcttcgattctattcgtgaaaaagagcctcggaaaaatcctcagatttttccgaggctcaacgaattataatagaatttccgctaaaacagccaaagcgcacgcggcggctattcccaatcgttctcttgcattcaggtaaaaacaaaagcagccagcaccgtggaaaggaggataaagcggtgctggctgcggtatgagaactcccgaactttgcggcggatcaggagggatttggtagtctgtccgccgtcgttggcgattgcctggcataggcgggggacagtgttttaataagtacctgctgggctgtgtcagatgcaccagcccccgcaggtgaaagcccttgtcggctttggggagacgtctttgcatctccctgactgcacccttatgttaccagacaatcgtggcatttttttgtggagtttttgaacaatttgcaaatagattttcaggtgttttcaaaggaggccccgcgcataagcgttggggtgggactggagtcccgggctgttcgcggagaaagcttcctactggcctgcattcctgcttttactgcgccccgaaaaattccttggcgatgtccgcgctgcgcttggcatccttggcgtaccagtccgcgccgatcttctcggcatattccggcgtgagcaccgcaccgcccaccatgatcttgcagtccaagcccgcttcgtgcagggcggcaatggtttcctccatgctcttgagggtagtggtcatcagggcggaaaggcccaccagatgcacattcttttcccgcacagtgttcaccaccgtctccaccggcacatcacggcccaggtcgatcacctcaaagccgtagttctccagaatcaccttgacgatgttcttgccgatgtcgtgcacgtcgcccttgacggtggccagcacgatgcggcccttgctggcgctgccctcgcccttctgggcaatgacgttcttgatctcctcaaaggcgctctgggcagcacttgcggcctgcagcagctgcggcaggaacagcgttcccttctcgtacttggcgcccacgatgtccagcgccgggatcagtgcttcgtccaccacttccagcggctgcttttcggccagcagtgccttggtctgggcagcagcatcacccttcaggcccttttccaccgccttcatcagtggagcgtaagggccggtaagctctgcactctcaccggatgcggatgccgaagccgcaggcaccacctgcgcggcctgccggatggctgcggatgcaggcacatggtcggcataccgctcaatgtacttggtgctctgctggtcgcggttggtcagcacgttgtaagcatacaccgccgccatcatctcctcgctggaagggttcataatggcgaggtcaaggcccgcatacatcgccatggtgaggaaggtggtgttcaggtacgggcggcagggcaggccaaagctgatgttggacacgcccagaatggtgcgcacccccagctcttttttgcaggcttccaacgcctgcacggtggccagaacgtccttctgctgggcgctggcggtcagggtcaggcagtcgatgtagatgtcctcccgcgggatgccgacggcaagggccgcctccgtgatgcggcgggcaatggccacccggtcctcggcggcgggcaggatgccccgctcatcgatggcaaggcccacgatggccgcaccgtactttttgcacaggggcaggatcgcgtccagcttttcctgctcgccgttggtagagttgacgatgggcttgccgttataaacgcgcaggccgttttccagtgcctgcacattggaggaatccagctgcagcggcaggctggtgacgctctgcagggccttgaccaccttgggcatcagggcaggctcgtccacgccgggtgcgcccacgttcacgtccagcacctgagcaccggcttccacctgactgaccgcctgttccagaacatagttcatatcctcttcccgcagtgcctgctggaagcgctttttgcccgtggggttgatgcgctcacccaccaccgtgatgccgtccacgttgacgaaatccaccggcgtgcagagcaccgagggcattttgtgggccgaacggccgggtacgcagcctgcaaaaacgctgttcagcagcttgatgaactccggcgtagtgccgcagcaaccgcccgccgcaaacaggtgcaggtcccggtagggcttcatttccatggcgaagagctgcggagtgatatcgtagccgctgccgtcggcccggggcaggcccgcattgggcttgacgaacaccggaaagtcgccgggcacagcctctgccagacgctttgccatggggaagatctccttggggcccagtgagcagttgatgcccaccgcgttggcacccaggccacgggcggtcacgccgaagctttccaccgtgcaaccggtaaaggtgcgcccgccggcttcaaagctcatgctggctaagataggcaggccgctgttttcctttgctgccagcagagcggctttcagctcgtacagatcggtaaaggtctcaaagaaaatgaggtcggtcccggcggcagcgcctgcccggacgatgcgcgcatactcgctcaccgcatcctcaaaggccagcgttccgctgggttccagcagttctcccagcgggccgacatccagcgcggtcagggcaccgtagggcgcacaggcgcgcttgcagttggcgatgcccgccgcaatgatctcttccagactgtaggcgctgcccgccagcttgtgggccgatgcgccaaaggtattggcgttgacgatgcggctgcccgcagcggcatacttggcatggatgctctcgatcagctccggattggtgatgttcagctcctccggctttgcacccagcttcaggcccgaagcctgcagcatggtgcccatgccgccgtccagcaggacggtattgctctgtttgaaaagttcactcgcttgcacaggtctttcccctctttctatactcacaccgggtgcgcagcacgcagtggccgcacccggccagttttccctttaccgggtggccgctgacccccagaatggccgtcacgctcttgcgcggggtcatcaggttggtatcggtcacacacaggcccgcccggcgcaccgtatccagcgcgtttgccaccagcggctgtactgcaatatcccagtcaccgtagccgggcgaaaaccgcccggtcaaatactttccctcttttgcggcccactggcgcagctctgcttcggctgcgtctgcggcctgctcggccagcgcactgcccagtgcgtcggacgcaacgcccgccgcgatatctcccacaccggcacggcggatctgtgcatccacgccggggccaagggtcacagccagcagcaccgcctgcgggcagttttccagatgcttcatcacatcctcaccccgcaggatgcctgcttcagcaagggcagccgtgtccgcttccagccagaccgcccggggcgttgccgccgccagcagcggcatggcgcatgtttccaacagggtcatggtgcggtcgtccggttcccctctggccccgaaataccgcgctgcctgtgctgtatcgatcgccgccggttttgccagcaccagcggctgcggtgcaccgatcatccgccgcacctccttgcttttttgaaataaagtggttttaagtatacctcacctgtgggattttatcaatcccgcagagcggcggataaaagaaaactccctcagtcacagctcacgccgtgccagcttcctcaaggagggagcctctgtcgaaaaggtaagcttttcggttttgccaaaggccccatcccagagggggctgtctgtgaagcagactgggggagttcgttctttatttgatgcagctggaacagggcgtatagcctgcttccacggcttcctcgtagctggagaacaggacctggttcttctctgccggcaggttcgggcaggtaggcagatggaactttttgctgttcacattgccgatgtacgcctgctgggccgtgctggatgccgccgggtcggtggggttcagcgcggaatctgccgcaaagtgctcggtgcccacggtgtagttctggccgtcactgccaatggtgatggtgccctgcaggtcggtgcggtacacatccaccccggcatcccgcaggatgctcagcgtttcctcgtgcgggtggccgtacttgttgttcacgccgcaggagatgatgcccatttccggcagcaccgcgttcaggaagaggtagctggtggaggtgctggaaccgtggtggcccacctgcagcacatcggccctgaggttcgcgccgctgttcacaaggtcggtctccgcagtcttttccatgtcgccggtcagcaggaagctggtggagccgtagtcgatgcgcagcacaatggaggtatcgttggtgtcgctgtactgtgccaccgggccaagcatggtcacggtagcgccgcccagcggccacatcgtgcccacggcgggcacctctacctgcaggccctgctgttgggtgtatttaacaaaatcctgaaagcacttggtggaggcatcggtcaccgggctgtacacatggtacgccgggaagtaggccagtgcggcagccaagccgcctacatgatcctcgtgcgcgtgggagcagaacacatattccagctgttccaccccctgactctgcaggtaagagacaatgagactgccgtcgtccacattgccgccgtcgtagagcatgaactgtccgtcgcattccaccagcacactcagcgcctgacccacatcgatgaaatgcacctccaagggtgcgtccactgtatccacagccgccgcagcagaagcggacgggttcggcactacatcggcgcttccgcccgggacggacggcagcccgctgcagcccgcaaggctcagcaccagtgcggcggcagcggccagcgcagcaaggcgctgccacaggcctttcttaggcgcgtttactttttcttctttccagttttccacgttgtgttctctttctgttgatcgttttttggcttgcgcgcgggtgccgaattgggcgcaaagcgtgcgccggggctgggtgcacggcctgtcggtgcagcggcacggttctggccgtgggcaggcttgccgttatggcccttctggttcgggcgcaccgtataggtgccgtcattgtggatcgtcacatcggcggcttcggcccggcgggcagagcgctgcacggcgcggcggcctgcggcgggcaccagcagggggatcaggtcctcccggtgggtcatcttcagcgccttgactaccttctcggcgttgcgaggctcgtagtattgcagcagcgcccgctgcagcgccttgccctcgggggtcttttccacaaacaccggcttcagggtgtaggggtcaaggccggtgtagaacatgcaggtgctcacagtgccgggggtggggtaaaaatcctgcacctgttccgggcgcatgtggtttttataaagatattctgccagatagaccgcatccttgagagtgctgcccgggtgactggacatcagatagggcaccagatactgctttttgccggcctttttgctcagctcatagaatttatccttgaacttgttgaaggtctcgatgggcggcttgcccatgtaggccagcgtgttgggagcacagtgctccggagccaccttcagttggccggacacatggtactctaccagttccttgaagaaggtgtcgtccgggtcggccatcaggtagtcgaaccggataccgctgcggatgaacacctttttcacgcccggcagctcccgcacccggcgcagaatcttcaggtagtcgctgtggtccacgatcatgtgggagcaggtggtgggggcaagacagtgcttgccgccggtgcacatgccccgcagcatctgctcccggcaggagggaaagcggaagtttgcggtggggccgcccacatcgtggatgtagcccttgaaatccggctcgtgggtcatgcgctcggcttctgccacgatgctgtccgcgctgcggctggtgacacggcggccctgatgcagctggatggcgcagaagttgcagccgccaaagcagccacggttctggatgatggagaactgcacctcacggatggcgggcacgccgcccatgctctcgtagatggggtggtaacggcgggtgtagggcagagcgtagaccttatccagctccccgcgcaccagcggctttgcggggatgttctgcaccagatacttttcgctctgcttctgcacgatgatctggccgctgaccacatcctgattgtccatctggatgcggcaggccttggcatacgccgtcttatccgacgccacctttttaaagcctgcgcactccacgtagcgctcgggcaaatggtcgaagtcggtcatgtaacaggtgccgtccacgtccgtgatgctctccaccggttccccggcggcaaggcggcgggcgatctccacggtctggtgctcgcccatgccaaagctgatgatgtccgcgccggaatcctcggcgatgctgggcagcacggtgtccagccagtagtcatagtgggcaaagcggcgcagagaagcttccagaccacctaagatcaccggcaggtcgggataggcctgcttggcaaggcgggtgtacacggtggcgctgcggtccgggcgtgcgccgcccttgccaccgggggaatattcgtcctcagcgcgggggatctttgccacggaatagtggctgaccatgctgtccacgttgccgccgccgatgaagaagccgtacttcggcttgccgaaccgcttgaagtcctcgcagtcggtgtagcgtggctgggccagcacgccgatcttatagccctcggcttccagcagacggctgatgatggcagtgccaaagctggggtggtccacataggcatcgccgcccaccaccacaaagtccagctgctcccacccgcgggcctccatatcggcccggctgatgggaagaaattcagtgtaaatcttaggggaagagttgtccataatgctccttttattgttaaaccctctcaggcaacgccgcaaggcgttgccagattcccccttttgtcactgcgcgacatcttcccccggagcgggggaagtctttcctcaaagggggagctttttgcatcttttcatccggtttttctttgaaggcagacgatatcttacccactcataaagctcgcccttcgggagagctggcgcgtcagcgcctgagagggtcattcctccggctggttcatctgctgttcgatccactgctggcggctgataagcacagcgcggggcttggcgccctcgtagggtccgatgatgcctttttgttccatctcgtccatgatacgggccgcgcgggcgtagcccagcttgcagcggcgctgcagcaggctggtggaggcctgaccggcatcgatgaccacctccacggcctgcttgaacatcgggtcggtatcgggatcctcgtcggagtccgcgccgccgctgcccttcttgccgtcctgaatggcgtgcttttccatggcttcgatcatggcttcgtcatactgcacggtgccgctctgcttgatgaagtccagcacacggctgatctcctcatcccgcacgaaagtgccctgaatacgggtaggcttgggcgcacccacgggcatgaacagcatatcacccatgcccagcagcttttcggcaccggagccgtccagaatagtgcggctgtccacctgactggacactgcaaatgcgatgcggctggggatgttggccttgatcaggccggtgatcacgtccacgctggggcgctgggtggctacgatcaggtgcataccggcggcgcgggccttctgggcgatgcggcagatggagtcctccacatccttgcccaccaccatcatcagatcggccagctcgtcgatgataatggcgatgtagggcatcttttccagatcaggccgttctgcggccagcttgttgaaagacttgatgtcgcgcacattgttctctgcaaacagatgatagcggcgctccatctcctgcaccgcactgccaagggcacctgcggcctttttcggctcggtgaccaccggcatcagcaggtgaggaataccgttgtactcggccagctccaccaccttggggtcgatcagcagcagcttcacgtcctccgggctggagcggaacagcaggctcatgatgatgctgttcacgcacacggatttaccgctgccggtgctgcctgcaatgagcagatggggcatcttgcacaggtctgccacctgtgccacaccggcaatgtccttgccaagcgcaatgcccagaggtgaggtcatgcgcaaaaagctctggctctcgaacacgctgcggatatacaccggggtctttttgtggttgggcacctcaatgcccacggcaggcttgccggggatgggtgcctccatacgcacatctgccaccgcaaggttcagggcgatatcgtctgccagcgaggtgatgcggctgatcttgacacccgccatgggctgcacctcgtaccgggtgacggaggggccccgggagatatccagcacacgggtgcgcacgccaaagctttccagcgtatccaccagcttctgggcgttggctttcagctcttcctgcgcgccggggtcggtctcgtcctgcgatttttcaaacagctcaatgggcggatactggtactgataagtatccaccggttcggcctcgtccacaggggccgctgccgcggcctgctcggaagcggcaggcttttccattgccgctgccaccagcgtgctgatatccttttcctccaccggttcgctggtaatgctgatccagccgtcctcgtcgggtgtgccgcgcatggcaacggcgttttcggcgctcacccgggcgggtgccgccgggactgcgggctggatgggcacggcgggcatctccggcgtgactgccgctgccgggctttccggctgggccgtcggcattgccggggtcatgaccggagtatcaaagctttccgctgccgcaggctgcaccggctgtgcagcctttgcaaagaaatcggatgcatcggtctccactgcgtcctgtacgatgggctgtgtggcaggtctgggggccgggcgcagcgggttctgcccaaaggtgccgcccgggcccacgatgagcggctcgatgggttcgctgccgccctccttcacctcagtgtggtcggggccaaggtctacgtcaaaggaagcccggggccgggatacccgtacctgcaccggcgtgatggccggggcggcaggctccggctgggcaagcggctggccggaagtatctgcgggcggctccggctgcggggcggcctccggctcctccgcctccatctcttcggtcaccttgtggccccagtggcggatgccgttcagccagtccggcacaccgatgcggaaagccggagtttccatctcctcttcggcatcttcctcatcccggtattcatcttctgcttcgtcgtagtcttcctcagcctcggcttctgccgcgcgggcagcggcacgttcagcgcggcgggctgcgctctgctgcgccatggccgcaccctttgcgtgcacgccgccaaacgcagcgcacagccattgccacacctctgccggggtcagatcaaaaatgtacaggctgacacacagtgccagcacgatcatgataagggttgccgcaggccgtccgcacagcagcagcaggctgccgcccagcagtgcgcccagcgcaccgccgccgatccatgcattcacgccgtttgcgtagcaggcagccgtcatctgaaatgccgacatgccctgcggctggatatcggaaaaaacgatcaccgtgccgcaggcaaacaccagccccagaaccagcttgaagatcttgggcagaaggtcttcgccccgggtatactgcacagcaaggcagcacactgccgcgcccagcacaaagctgccgcagccaaaaagtccgaacagcacatcgtgcagggccttccatgccgaatctccctccacaaaggccagcaccaccagcaaaaggcctgcaaacagggtgccaagccccgccggaagccgctgttcggcgcgttttttgcgcgatgctgcgcgccgtgttgtcgttttacgtttttttgttgccatgtttctttgttccccgcgtttgtagtagacacactatttgattttattattgtaccacgcagggaagaaaatggcaaacctattgttgtacaaaatcggccttcatttgcgttcaatctctttatacaaccacgccagcgcatccgaaagcccgcccagctcatcaatgagcttttccttcacagcccggcgtccatccagcacggtgcccatgtccatcaccagctcgccggtgtggagcatcaggtcggtgtagcgtttttcagtcatgccgctgtgggccgctacgaagccggtgatgcgctgctgcatctgctcaaagctgcgcatggtctgcggcacccccagaatgacgccggaatgccgcaccgggtgcacggtcatggtggctgtgggcacgatgaagctgcgccgggcgctgacggcaagcgggataccgatggagtgcccgccgcccagtacaagcgttgcactgggtttggacacgctggcgatcagctccgccagcgcaaggcccgcttccacatccccgcctaccgtgttcagcaacaccagcaggccctcgatgcgggggtcctcctgcgcggccaccagctgcgggatgacatgctcatacttcgtggtcttctggccctgcggcgcttccgaatggccttcgatctggccgatgacggtcaggcagtggatcacatgctccccgcgggccagcgtgaccgtgcccagatcctcgatctcttccttttccagccgacgcgcgtcggtctgctgcgtttcatcgttcatatgctttcctcctgcgttttctgtcagcattccccagcctgtgccgggctatgcagacccgctgcagcaaaaaagcggtaacatttcataaaaattttttgagaatgatttgacattctccatcggtgcagtatactttaaataattgactgtaatatctgcaatatgaacccgtaaacggatcggggtttctctgcgccgtatctgtaaagcaggcagctgcggcaagtactgcgatagagcgaaaggagaaagtattctatgaacactcctgcaagggcttcgcttcccgttatcaagcgtcttcccaaatattaccgctatctgtgctctctgcaggcagacggcatcaacagcatttcttcccgcgagctggctgctcagatgggcaccaccgcttcgcaggtacggcaggacttcaactgcatcggcgatgtgaatggccggcagggcatcggctactcggtggaaaacctgctctccattctggaaggcctgctgttcggcaacggtgaccgcctgcccaccatcctgatcggctgcggccgtctgggcaaggcagtgagccgctttatcaccaccgataccaacggctaccgcctgatcgccgcctttgatgtggcacagagcgaggtgggcaaggagatcagcggcatccagatccgccatatcgacgagctggagtctttctgtgccgagcatcaccccaaggtcgcagtgctctgtgtgccccgcgacggtgcggaacaggtcagcggccgtctggtggatctgggcatcgagggcttctggaacttctcccactatgacctctctgtgccgtatcccgatgtggtggtggagaacgtccatctgggcgacagcctgatgagccttggctaccgcctgcgcaatcaggactgaacgtacctattgtaagtaataagagaaccctctcagtcaaagcctgagatgccgctgaaccctctcagtctcgcatacgctcgacagctcccccgaaaggggagctttatgagtggggacgggaaagtttctgcttctccggcgaaggacagcctgcccggaagatgcagaaaagctcccccatcgggggagctggcaaagccgtcaggctttggctgagagggttctttctgtaaggagagtttttcaaatggcaaaactgtatttccgttacggcgcgatgaacagcggcaagagcaccgccctgatgcaggtagcccacaactacgaagaacaggggatgcgggtgctgatcctcaagccacaggtggacaccaagggcggcggtgagctggtgagccgtctgggcgtgcgccgcaaggctgatctgctgatcccgccggagacggacgtgttcgaggccgtgcgcacggccaacgctgacggtgcgccgctggcctgcgtgctgtgcgacgagagccagtttttcactgcgcagcaggcagaacagctgttcatggtaacggtggacctgaacattccggtgatctgctacggcctgcgggcagatttttcgctcaagggctttcccggctctacccgcctgctggagctggcccacaccatcgaggagatgaagacgatctgcacctgcggccgcaaggccatctgcaactgccgcagggtgaacggcagattcgtctttgagggcgagcaggtggccatcgatctggaaaacgatgtgcagtacgtgagcatgtgcccccagtgctatttcaaggcaaagcgcgcgttctacgccgaaaaagctgcttcgcgggttgaataaacttgtatacaaggctgctgtgttcaacgacacggcagcctttcttttttattcccggcccacaggcgcagtccacacaacagcgcaaaatatgtcgctgtcggtgcttcttcacccccccaaagggcgaaaaagcaccgatttccatgcccgaagaccggtgccggatgcccgccgcaaacaattgatatatcagagtgcacattttttgcgctattgatatatcagttcaaagactcccatccgggctttttaagctgttgttcgtccacaatgtatgcaacgtttccacgttctgaaacggaatgtttacaaaattattgcaaaattcgacgttcctcctatgatgcatcccagttttctatgcaaaatagcgaagtatacatgttgcacagtttttcgagccaagtttattcatttcagcaaaggcgtcaattcttgcgcgaaaacaagagcaatatttgtacgttttttgtttagatatctgcaatttgcgtctttctttttggttgttgttttgttatcataattgtatacaacggggtatgtgcagaacccccgttcgagatgatgttttctgtatttaggaggagaacaaaaatgagcaaggcaatttctcgtcgtgattttatgaaggtcaccggcgctgtgggcgctgccggccttctggctgcctgcggcggcaactctgctgcatccagctctgctgcttccaccgcttcttccgctcccgctgcttctgcagacgagagcctggcactgtctgacggccctgtttccatgaccatcagctggtggggcggcgacagccgtcacgaggcttaccagaacgccatcaaggagttccaggctgagcacaccaacatcaccatcgagcccaccttcgccgcatggtccggctgggaagagaagatggcagctgccttcatcgctggcaacgcacaggatgtgtgccaggtgaactggaactggctgtacaactactctgctgatggcagcaagttcgtggacctgaacactgtttccaagttcctggatctgacccagtgggatgacgctgccatggacgcctgctacgttgcaaacagccagcagtgcgtgcccgtttccatgaccggccgtatcttcttctggaacatgaccaccttcaacaaggctggcatcaccgaagttcccaagtctctggatgatctgatggctgccggcaaggcattcaaggagaagctgggcgacgattactaccccatgcatctgggcgcatacgaccgtatgatcctgatggtcttctacctcgagtccaagtacggcaaggactgggctgaccccgtcacctctaccctgaactacaccgaggacgagatcgctgagggcatcgacttcatcaagagcctggtggatggccacgtcatgatgaacctgaagacctactactccgcaaactctgataccgctacccaccagtccaacgagtggatcaccggtaagatcgcaggcatcttcgagtgggattccgctgcttccaagtactcctccgctctggatgacgccaacaaggacggcttcaccgttggcgaagagatcaagttcggcgacaacaacggcggcttctccaaggtctccatgggtctggccatcaccaagaccagcaagtgcgttgccgaggctgctaccctgatcaacttcctgctgaacgaggagaagggcgcttccatcatgggttccgagtgcggcatccccgcttccaaggctggtctggctgctgctcaggctgccggcgctgtcaaggatctggttgctgaggcaaacgccaaggtcatggccttcaccaccaacaagctggatcccctgttcgagaacaacgacctgaaggcttccggcaccggcatctatcaggaagtgttcgacaccgttgactacgacggcgtttccggtgcagacgttgttgacaccctgctggacggcatggagtctgttggctacaccatcggctaagttacatttttgagtgccgccgtgtgcggtcacgcacagaaaagggcaccctttgactgaacccgaggggcacctgccgcccgaccggcagatgtcccttttttgtcagagatatattacaaaatcttgacaaagctgtatccagtctgttaccccttcgtccgtctcatgctccgaaattccttaaaaaggaggatttcccagatgaaagaaagcaatgctcccgccgtcgggcgcaccccgttccagaagtggctggacaaatatcagggtctgttttatctgattccctggatcatcggcttcgtcgtctttaaggcagttcccttcggtcagtcgctgtactacagcttcaccgatatgaacttcttcaagagcggcacccagttcgttggtctggccaactacatcacggcctttaccaccaccaagatcaccaaggcactgatcatcaccttcaagtacgccttcatcaccgtgccgctgaagctggtctttgcgctgttcatcgcatacatcctgaacttcaagatcgcatgcgtcaacctgttccgtactgtgtactacatcccctccattctgggcggttctgttgcgatcgccgttctgtggaaggctgtgttcagcgtggacggcctgctcaacaccgtgctgcgcgctgtcacctttggtctggtgcagggccccgagtggctgtctgaccccagctacgcgctgtggatcatctgcttcctgcgcatctggcagtttggttccgccatggtgctgttcctggccgctctgaagggcgtgcctgcagacctgtacgaagccgctaccattgatggtgccggcaagtggcgtcagttcttctccatcaccgttccgatgatcacccccatcatcttctacaatctggtcactcagatctgccaggctttccaggagttcaatggcccctacatcatcaccaacggcggtccccgtggttccaccacgctgatctctctgctggtctacaactacgcattcaagtcttatgacatgggtatggcatccgctctggcatggatcatgttcatcatcgtctgcatcctgacgatcattgcattcaccagccagaagaagtgggtctactactctgacgaaaggtaaggtgaccagtatgggaatgaaagcatcgaacaaaatcgcgaccttcttcaagtatttcgtcctgatcctggtcggcgtcatcatgatctatcccctgctgtggatgatcagcgctacctttaaggacaacagcgagatctttgcaggcatcagcctgtggatcaagcaccccactctggatggctaccgcggcgcactgaacaacttcggcggttccatcaacatcctgcaggccatgctgaacacctacagctacgtcatccccaaggtgatctgcacggtggtctccgcctgtgtggctgcctacggctttggccgcttcgatttccccggccgtaagctgatgttcaacatcatgctggccaccctgttcctgccgcaggtcgttctgaatgtgccgcagtacctgctgtacaacaagttcggctggctggacagccccttctatctggctatctgggtgcactgcgcatttgcaaccgagacctacttcgtctaccagctggtgcagttcatgcgcaatgtcccccgtgatctggacgaagccgctgccatcgacggctgctcctccttccagaccctgtacaaggtcatcgtgcccatgcttggccctgctctggtgtcctgcgcactgttccagtttatgtggagctgcaacgacttcatgggtccgctgctttacgtcagcactcccggtaagtacccgatgtccctgttcgtcaagctgtccatggacggtgataccggtttcgcatggaacaagatccttgctctgtccctcatctccatcctgccgcagctgatcgtcttcttctgtgcacaggaccagttcgttgaaggtatctctgccggtgccgtcaagggctaagccctttccccgcacagcataagatcatctgatacaaacaaacaccccctgtgccgttcccgtagatggcgcagggggtgtttcttatttcttatgtcctttgcggtactgcagtgggccggtacccatcacctcgcggaacacccggcggaaatgggcggcgctggcaaagccggtctgctcggctaccgcactgatggaaagctcggtcgtttccagcagcttctgggccgcttcgatgcggcggttgttgatgtaatccacgatggactggcccgttacccgccggaacaaacggctcaggtagtagggcgaaagataaaaccgcgccgccacctcggtgagggaaaacttctgccggtaattggccgcaaggtaggcgcagatctgctccaccgtctcgttgcgggggcgtgccacggcgctgctctcggcaatgcactcctgctccacatagtgcaggatcagcagcaggtacagcgggccggggtaatcctgctcggtgctggcgctggccatcatttccagcagggtacggatgcggctctgccactgcaccggtgcatacagcactgtgcgctccccgggcgcaaacaggcggccgaaatcccgcccggctgtgtttttcaaatcatgcagcatccccagcggaaagtggcaccccacgatctgcggcacggcgctgccggtctgtgcaaagcggcagccgccggggccaagcagcacggcgctgccggggtttaccagcacattcccgccctcgtattccagcgtgacgctgccctccgacaccagcagcagatagcaggtgtcctcatccggcggcagctcgtagcggccaatattcagccgcagggtggcagcggccaccttgccggtgatcttttcacgttctgatctcataggtaactccttcagtcgcggctgatgccgcgccagctccctcaaagagggagcctctggcgaataggaaaagctttccggtatgccaaagcctccatcacggatggaagtggcaaacccgcgagggttcgacggaaggggttcccttcattctaatctttatcatatcatgtccgcttcctgcgggcaagacaaaaccatcaggaggttctctcatgaatctgtcgcttatccgttccatgacgcgcagcgctgttttcgagctggaaaacggcctgtgctatcgtccggcccatccgttcaccgttaccctgaacggaaagaccgtctacgaagcctgccagaccaacgtgttctccctgttctccctgctgcccggtactgagtacacggtgggtgtgcaggccgagggcgaaagcctgacctgcacctttaccaccgaggccgagaccttctttgtggatgcttcccgctacggtctggtggccgacggcaccacggacaacaccctcaagctgcaggcggctctttccacctgccccaagggcggcacagtgtacgtgcccgcaggccgctaccgcacctgcagcctgttcctgaaaagcaacaccaccctctatcttgaaaagggcgctgtgctgctgggcgacaatgaccgcacccactaccccatcctgcccggcgtgatccccagcgagaacgaggtggatgaatactacctgaccggctgggagggcaacccgctggacagctttgcgggtctgttgaacatcacgcaggtgcacgatgtcgttgtgaccggcgagggcacgctggactgcgatgccgagaacggcgactggtgggtaacgcccaagatcaagcgcatcgcatggcggccccgcgctgtggctgctgtggacagcgagaacatctgcctgcacggcatcacggtgcagaacagctattcgtggacgatccaccccatctttgtcaagcaccttgacctgctgaacttcaacatcaacaatccttacaatgcccccaacaccgacggcatcgaccccgaaagctgcgagtatatccgcatcatcggcgtgaacatccatgtgggcgacgactgcattgccatgaaggccagcaaggtattccttggcatgaagctgaaaaagagctgtgagcacaccgttatccgcaactgcctgttggacaaaggccatggcggcatcgtcattggcagcgagatgagcggcggtgtgaaggatatggtggtcacccagtgcctgatggatcacaccgaccgcggcctgcgcgtcaagacccgccgtggccgcggcaacaccgccgtcatcgacgggctggtgttccgcaacgtggagatgcgcggtgtcaaggcacccttcgtcatcaacatgttctacttctgtgacccggacggtcacggcccctatgtgcagtgccgcgatgccatgcccgtggacgagtacaccccaaagctgggcagcctgaccatggaggacatcgtcgccaccgacgctcagttcgcgggatgttacttcgacggcctgccggagcagcctattgagcgcgtttccatgaagaacgtcactatcacctttgaccccaacgccgaagccggtcaggccgccatggcggacaaccgcccgctggtgaaaaagctggccatctatgccgagaacgtcaaagagatcgacctgcacaacgtgaagatcgagggctacgagggcgaacgcctgcactttgcaaatgtcggccattttgaggaggactgataccatgacccatgaagaaattcttgccatgctgggcgattacgtggactacctgatcgccaattccagcgccgaagcacccatgtggaacatcgagaaggtgcgcagcggcaagcccaacaagtggaactacatcgacggctgcatgatcacggcctgcctaagcctgtacaagaccaccggcgacgagaagtatctgaacttctccaagagcttcattgattactttgtgcaggaggatggctccatcaagacctacgaccccaaggagtacaatctggacaacgtgaatcagggcaagaacctgttcaccctgtacgatatctttggtgacgagaagtaccgcagagccattgacaccatccgcagccagctggccacccagccccgcaccaaagagggcaacttctggcacaaggacatctacccgtggcaggtgtggctggacggcacctacatggcccagcccttctacatggagtacgagacccgctttaacaagatgcagggctgcatcgacagctacaaacagttcatgaatatcaaaaagcacatgcgggacgaaaagaccggcctgtactaccacggctacgatgagagccgccagatgtactgggccgaccccgtcaccggttgcagccccaacttctggctgcgtgccatgggctggttcatggtagccatggtggacgtgctggagcggatggacgagcagctgtacaacgagtaccgcggcatcatggcaatgctcaagcagaccattgaggatgtgcacaaattccaagacgaggagaccggcatgttctggcaggtgatggaccaccccggcgtggagggcaactacctcgagaccagcggcaccgcgctgtttgcctacgcggtgctcaaaggcgtgcgtctgggctacctgccgaaacgcatggccgcatgggccgaaaaggccttctacggcacctgcgacaagtacctctccaagaacccggatggcagtctgcagctggacggcatctgcctggtggcgggtcttggcggcaaggatcaccgcgacggctctctggcctactacttcagcgagccggtggtctgcaacgatgccaagggtgtcggcccgctggtgctggcttacaccgaaatgatcgcacgcaagtaaactgcatatcgtgggcgggcagctttcttgccggacacgagtcgggccattccatcgcccgcggggctgttgcaaaacagcgtccctttaaaatgttgaaaactgccgcattcaccgtacaaaacgggcagaatgctgaaaactcaaaggcagatctcaaaaaaaaaatgagataggcagcccctttcggggaagcctatctcattttttcgttggggctgctttgcaacagccccttctctatggaaagaggttcaacatgaattctcgaagatgtcttatcagaacttgaacaggttcacgatgcgctgccacaggcgggtaaagatattgccttccttcaccgtctcagtcacggctgcagtggtgtcggcagcggccacggtttcagcggtcttatagacgaacttcacgctgctctcggcatcgtccggtgcaccggcaaagctggtgtagtcgttcaggcggtcggtcatctcgtccagcacggtcttcaggccatggagctgatcctgatccagcgcgccggtcagcttggagatgccttcctcgttgaactggttcagaccatcgttcagctggcctgcgccgtcattcaactgacctgcaccggtgttcagggtgttcacgccgtcatacagggtcttggtgcctgcagccagctgtgcgctgccatcctttgcggagtgggcaccgtccgcagcggtctgcacgcctgcggtgtactggttcacgctggaaacaaagaactggatctgagaaaggctggtcttcagggcgcggacatcggccatatcctggctgttctcgatctggtacttcagctcttcgtggatggtgttctttgcatcggcattggtcaccatctccagagcgccggtcagcatggaagcgtcaaagttctgcatcagcttcagggctgcttccagatcgtggttcgtcttggtcgcggacagatacagggccagatccagctggctgtccttgaagctgggttcctgctcccacacggtgcgcacgatcttgcggcgtccggcagcaagggtcttatcgttcatggtgaggatgttgtcgatcacagcctcgtagttcgaccatgtcatgtcctcgtcgatcaggccgccttccttcagggtcttgttggcagaagccagcacaccgtcagccacctgctgcgcaccggcgttcagtgctgcattgttggcgctcagggtgtccagaccgttggtcagctggccaaggccgtcgtccagagcggcagcgccgttgttcagggtgttggcaccgtccagcagggccagaacaccgcctgccagctgagaggtgccgtccaccagctgggaggcgccgtccatgagctggctcatggcatcgttcagctggttgatgccgtcggtcaggtcgttgatgctgctcaggtcgaacacgttgctcgtgcccagagcggccgtgctggtagcgcaggccaccatgacctgcgggcaggtaaagtcttccacatcggcttccacagtcacggtgtcctgcagatagtcttcgatgctgttcacctcatcgggcagcaagccggacagggaatccttcacgcccggcagggtgacaaaggcggcaacgctgcttttggcggcgctttcgatcatactgtgttctgcggtcacgttggaagcatccccgcccagaatgacgcccacagcggtgatcagcggagtgacgatggtgcggtccttgccgttcacgttcacggtgccggtctcgttgttcttcaggttgacggtcacagtcaggtggccgctcttgccaatgatgtcctcaagggcggcttcctgaccgtccagagcgtaggtcaccttcacatcgatgggcagggccttgtcggtattgcccttgtagtaaacatcggtgtcgttggtgttccacaccagctcttccccgttctgggtgaactcggcatcgctctcagtgttctggatgtcggtcagggtggtcttgtcggtgacgtttgcaaggccggaggcgctgtacaggtgctcgctgacggtggtgctcttgatggagccgtcgccgttcatcacagcatagacggtctcagatttggaaaagctgctcttaccagctgcaaatgcgggcattgcacagcctgcggcgagggtgagagccagcgccgcactggcgaaacgaagcgattttttcataacgtaattactccttttcagacttcttggcgttggcggattcgggtaccatccacttgagggtggtgtggcggatgatccagtcgcacagcatcagggctgcgggcagcatcaccagaatgaccaccatgctgatcagtgcgccgcgggagatcagcaggcagatgctcttcagcagctccatcttactgatggcagccacaccgacggtggcggcaaagaaggtcaggccgctggtcaggatggactggctgcagtgctccagcgactgctgggcggcttccttcggggtgcggccaaaggcgcgctcctcgtggtaacgggtggtcatcaggatggagtagtccacggtagcacccagctggatggtgccaatgacgatgcttgcaatgaagggcagctgcgtaccggtgaagtacgggatgcccatgttgatggcgatggcggcttcaatgctggccaccagcagcgccgggatggaaatgctcttgaaggaaacggcgatgatgaccagaacggccatgatggaccagacgttgacattcttgaagtccacatctgccacttcgatcaggtctttcgtcatggcgccctcgccggtgatgacgccctcggggtcaacggtcttgatgagggaaatcatctcgtccagctggttgttgatggcatccgtgccggtcttataggagctgttggccaaaatcagcttgtagccgccggactgcaggatctccatgatgctgtcgggaagcagctcggtctggaagcccgggccggtgatggaatccagacttaccacctgcgtaatgccatccacgtccttgagttcatcgcacaggtcgctcacctcggtggcggtcaggtcgtcatgcaccagaatgaagtggctggtggtcatgccgaagtcctcgcccagcttgttggtgcccacgatgccggtcaggtcctgcggcagggagtcgaacagagtgtagtagacctcggtcttgttctgtgcgatggcaaaggggatgaggatgaggataaagataaccacgatgggcaccgagtgattggaaacaaagtagctgagctttttcagcttggggatcacggtgcggtgcttgtacttttccacccatttatcaaaggtaaggatcagggagggcaggatgaccacggtgcagataacgccgagggcaacgccctttgccatgacaaggccgatatcgcggcccagcgtcagacgcatggcacacagtgccaggaagcctgcaatggtggtcaggctggaagcggagatggaggtcatggtcttgcagatggcgctggtcatggcctcctcgttggaagagcgcagctccttttcttcctgatagcggtgcagcaggaagatggagaagtccatcgtaacacccagctgcagcacggtggccagtgcttcggtgatgtagctgatctggcccagaaagatgttggtgccgaagttgtacgcaatggggaacaaaagacccagcatgaacagcagcggggtgatggtgctttccagcgaaaggaacagcaccagaaggctggcacccacggcgatcaggatgtacatgggcatttcctgattgaccagtgccttggtgtcctgcaggataacgctcataccgccgaagaagcagtccttgcgcagcagcttttcgatctgagcgacggcttccatggtctcgtcgctggcgctgggggcgtcaaagcggacgatcagcatggtggaatcgtttttgccgaacatgaactgctgcacatcggcgggcagcatctcggtgggaatgctggggtcgatcacatcgctgagccagaaggtctgggtcacgccgggaacagcctcgatgtccttcttcatggcgatcagttcgtttgtgggtaagccttctaccgtgatcatgccggtggaggccaaatggaaatcgtcctcaagggctacctcgccgatcatggagtccagatcctgcggcaggtaggtgaggatgtcatagttgatgcgggtagcaattgcgccgattgcggaagggatcaacagcaggaatgctactgtcaggatcagcttgcgcagccgcacaatgccctgtgcgatctttttcatgagaaccctccatagaaaatggttaaaaatcttagtaaaatgactggtggtcatttccaagcaaacactattataaccatgacaaaccgggtgtcaagcacaaaaatgaccaaaagtcagttttcttatcaactgcctgaaattgtatagctttttgggcttgcactatcgggaaaggactgctaaaatgattgagataacacaaatgagcgaatgaaaacgagcggaaaagaggaatcgtcagggaatatgggtaccgtggagggcaaaaagcaggagaagcgccgggcgctgctggaagcagcctatgatctgtttttggagcgaggtgccgcaaaaaccagcgtagaggacatcaccagccgggccaaggtggccaagggcaccttttatctgtattttcaggataagggtgcggtgatgcaggcgctgctgggccgggtgagctaccagctgctgagcgacgcgtgcgaagcggtggaaaagcagacagagctcgaaaacttcccggacaagatggtggcggtgatcgaccacatcatcgaagcactgcggaaggatacgctggtgctcaagtttctggagcacaacttcatatggccggggctggatcagatcgaagccagccgcgaagccgagccgctgatgcgcaagctgctgaatgtggtgctgaccagcccggaaatggccggccgcaccgagcgggagatctaccagcgcatcacggcactgggcagcatgtgcatgtcggtgtgctattccagcgtgctggagggcaaacccgatgatattgaagccatgaagccggtgctgtacgatatcgtccgcaggtcgctgaaggcggaaaaataaaaaatcacagaaaagtattgcttttttgcacaggctgtggtaaactattcaagtcgatatgacttatggacggttagctcagctggtagagcatctgcttgacgtgcaggaggtcacaggttcgagtcctgtaccgtccaccatacagttcgtactcgaacccgattcttta

SEQ ID NO: 1108 - DNA, 16311 bp, Unknown
  gut microbiota DNA sequence
gaaacaagttcggattatttttgtttggtccgagtggcgagaatcgaactcacggcctcttgaaccccattcaagcgcgctaccaaaactgcgctacacccggatatcgaccgccgcttccctaccgaagcgtggcgacatgagatattatactcagatacagcagttttgtcaacagatttttacaattttctttgcttttttcgtaaaaagtctgatttttgcgaaagtacgcgctttatttattttgctctttttcttgcaggagcttgtctttttccaaaagcggtttcagatactggccggtaaagctgcccggcacctctgccacctgttccggcgtgccttcggccacgatctcgcctcctgcgctgccgccttcagggccaaggtcaatgatatggtcggcgcacttgataagatccagattgtgctcgatgacaataaccgtgttgcccgcatctaccagcttctgcagcacctcgatcaggcggtgcacatctgcaatatgcaggccggtagtaggctcgtccagaatatacacggtcttgccagtgctgcggcgggccaactcattggccagcttcacgcgctgtgcttcgccgccggaaagggtggtggcgctctggcccagtgttacataaccaagacccacgtccaacagggtctgcagtttgcgggcgatcttgggctggttggaaaagaataccactgcttcctccacggtcatgttcagcacatcggagatggtcttttccttatacttcacttccagcgtttcgcggttgtaacgcgcccccttgcatacctcgcagggcacgtacacatccggcaggaagtgcatctcgatctgcagaataccgttgccctcacaggcttcgcagcggccgcccttgacattaaaactgaaacgccccgggccgtaaccgcgcattttggcatcctgtgtctgggagaataccgtgcggatatcattgaacacaccggtataagtggccggattggagcgcggcgtacggccaatgggctgctggtcgataccgatgaccttatccacaaattccagcccttctaccccatcgcatttgcctgcgcgggaacgcgcaccgttcagctcgcaggcaagcgtcttatacagaatttcgttgatgaggctggacttgccggagccggaaatgccggtaacgcaaataaactctcccagcgggaatttcacgtcgatattgcgcaggttattttcccgtgcaccccgtacagtaaggtaattgccgttgccggtgcggcgggtctgcggtacggcaatgcgtttgcgaccggagagataatcgccggtgatgctgcgctttgccttgcagatgtccttcacgctgccagcggctacgatctcaccgccatgcacgcctgcgcccgggcctacatccacgatataatccgcgctgcgcatggtatcttcatcgtgctccaccacaatgactgtgttgccgaggtcgcggagatttttcagggtggcaatgagcttgtcgttatcgcgctgatgcaagccgatggacggctcgtccagcacatagagcacgccggaaagcgcactgccgatttgagtggtcaggcggatgcgctggctctcgccgccggaaagagtgcctgctgagcgggccagcgtgagataatccagacccacgctctgcaaaaactgcaggcggttccggatctccttcatgatctgcccgccgatctgcttctgcttttcggtcaggttcggttcgttctcagcaatgaatttcagctcgtcccggatggacatttcgcagaaatcactgatgttcttatccccgatggtcacagccagcaccacgggtttcaggcgcttgccgtggcagtccgggcactccacgccggacatgaagctgccgatttcttccttcatccactcgctgttggtctcgcggaagcggcgctcaaggttctccacgatgccctcgaaggtattataatacacaccgctgccgaactcattcgtgcggtgcatctcaattttttcgccattggttccgtacagcaacgcattgacagcttcggtgctcatctctttgatgggcgtatccagcgtaaatccgtactttttgccaagacccagataatacatttcggatacagacccctcggcatagtaccagccgctggccttgatagcaccctcccggatggaaaggttccggttgggcaggatgcgttcctcgtccactcgcataaaagtgccaaggccggtacacttttcgcaggctcccagcgggttattgaaggagaagagccggggtgacaggtcgctgatggaaatgccgtgctccgggcaggcaaagttctggctgaaggtcatacaatcgccgccgatcacgtccacttcggcgatgccgccggtaagcgccagcgcggtttccagagaatcggccagacggccccggatgcccttgcgcatggcaaggcggtccaccacgatctccaccgtatgcttgatgttcttttccagcttgatctcttcgtcaagatcatacaggttgccgtcgatcttcacacgagcatagccaccgcggcgggcagcatccagctctttctgctgggtgcctttgcgctggcgcaccacaggagccagcacctgaaacttcgtaccttcgtccagtttgagcaccgcgtccaccatttcgtccacggtctgctggctgatcacccgcccgcacaccgggcagtggggcacgcccacgcgggcgtacagaagtcgcagataatcgtagatctccgtcacggtgcccacggtggaacgcgggttgtggctggtggttttctggtcgatggaaattgccggtgacaggccggtaatttcgtccacatcgggcttgtccatgcggcccaaaaacatgcgtgcgtagctggaaaggctttccacatagcggcgctggccgtcggcatagatggtgtcgaacgcaaggctcgacttgcccgaaccggaaaggccggtcataacgatcagcttttccctcgggagggtcaggttaacatttttcaggttgtgctcgcgggcacctttgatgacgattttatcgtttgccaaggtattttctcccttttcgttgtgtctgtgaatgattctgtttgcgctccgtttctgccgcagagtccaccgtcgggttctcgccccggcgcagtcggtcgatctggtcacgcaggaaggccgcgtgttcaaactccagcagcttcgccgcttccttcatctcacgggtcaggcgctcgatggcggcctcccgctccatcctgcccatgcggcgggtgttcagcttagcgttctccgctttatcgctgatctcgatgctgtctgcaatggccttgacgatggtttttggcacgatgccatgttctttattgtaggccatctggatggcgcggcggcgttcggtctcggtgatagcgcggtccatactgtcggtgacgacatccgcgtacatgatgacaaggccctcggcattgcgggccgcgcggccaatagtctggatcaggctggtctcgctgcgcagaaagccctctttgtcggcatccagaatggccacaaggctcacctcgggcaggtcaagaccctcgcgcagcaggttgatgcccaccacaacatcaatggagccaaggcgcaggtccttgatgatctccatgcgctcaaaggtgtccacctcgtggtgcatatacttgactttgatgccctgttcggtaaggtagtcggtcaggtcttcggccattttcttggtcagcgtggtcacgagaacgcgctcgtgccgctggatacgggtattgatctcgcccaacagatctaccacctgcccttccaccgggcgcaccgaaatgagcgggtccaaaaggccggtgggccggatgacctgctgcgccacctgcgtgctgttctgccgctcgtagtcgccgggcgtagccgaaacgaagatcatctggttcagcttggactccacttcctcgaacttgagcgggcggttatcgaaagcggacggcaggcggaagccgtactccaccagcgtttttttgcgggcatagtcgccgccgtacatggcgcgcacctgcggcagggtaacatggctctcgtccacaaacagcagaaaatcatccgggaaataatccagcagagtggtgggcatactgcccggcgcacggcccgaaagcaccgccgaatagttctcgatgcccttgcacatgcccacctcgttgagcatctcaatatcgtaattggtgcgctgggcaatgcgctgcgcctcgatcagcttgccctcggcggtgaactgcttcacctgtgcgtcgcactcggcgcggatcttttccagtgctgcggccttcttctcggcgctgacgatatagtggctggccgggaagatggccacgtgcttgaccacgttctgtttggccccggtgagagggttgaactccgtgatgcggtcgatctcgtccccaaaaaattccacccggatggcaagctcgctcatataggcaaggtagatgtccacgatatcgccgtgcacacggaacttgttgcgcacaaaattcacatcattgcgttcatattgcagagtgaccagcttctggcacagcgcatcgcgctccatctgcatgccggggcgcaggctgatgaccatgctgcggtagtcgatggggtcgcccagcgagtagatgcaggaaaccgatgctacaatgatcacatcccgccgctccgaaagcgccgccgtggccgaatggcgcaggcggtcgatctcgtcgttgatggcgctgtccttttcaatataggtgtccgtgctggggatataggcttccggctggtagtaatcgtagtaggagacgaaatactcaactgcgttgttggggaaaaacgaccggaactcggtgcacagctgggccgccagcgttttgttgtgggccagaaccagcgtgggccggttgcattttgcaataacatttgccatggtaaaggtctttccgctgccggtaacacccagcagggtctggcagcggtcgccccgctccacgcctttcaccagtgtttcaatggcctgcggctggtcgccggtgggctggtaagaggataccagttcaaatttttcgtctgccatcttccctctcctctccggccctcgcgcaaagaaccacaatcagttgtattttacggtttgattatagcacaccagttttataatgtaaacacttttttgttgtttcacagatcaaggccagaaaagcgtacctgttttaaagtcatagatcggcaggcggtttgcgtcccgcatggagaaatactccgtatcggtcaggatgaagtgatccagcagatggatgttcacaaggcccaatgcccgggcaatattgccagtggcctccagatcctccatggagggcaaggccgcaccgttggggtggttgtggctgagcaccaccgtgtcggtgccgcccttgatggccgcagataccacatccttgatatccagacttacccggtcggtggtgccttcccgcagccagaccgccgcgcgcacccgcttacggctgtccagactgaccagcattgcacgctcgtaatccgaccacgcaaacttcgccatcagatagctgcccatctgctccgtagttctgatgcagcgggtagtgctggtacgactgcggccatagtagcggctgatctccggcagcagatgcagcatccgggctgtggccgggcctacgccctccacagtgcacagctcttcctcgctggcttccagcacagcggcaaaatcgccaaagcggtcgatcaggtcgtgagcgatgccgttggtgtccttctgggcgttggtgaggtacagtacatattccagcgcttcgtgctcggccagactgtccagaccgtagttctgcacccgttcgcgcatccgctggcggtgtccctgatgccgtttgtgttctgccattgcggtactctccttctgattcattccttataatagtacccattttgcgcccggaactcaaggctttgcggtaaaatagttttgatccggggcgtttccgcgttgacttgcagccaaggctgtattactataaaggtatctcttgaaaattgaggaacatttatgaaacaatataccgcaaccgccaacgacgacggcgttcgtctttcccgctttgtgcagagcgtgacccgcgattttcccaccagccttttgtacaagagcttccgcaataagcgcgtgaaggtaaacggaaaaaaggccgtgccggagtaccgcattcaggcaggcgacctgatcgagctgtacatcaacgacgagtttttcccgccggaaggcgcaaaaaccgtgcagaaggccgcgccgaaaaaaaagcagaatcagcccaaggtcaatatcatttatgaggacgaaaacattgctgtgctgtacaaacccacccaccttttgtgccacagtgaccgcaccggcgatgcgaaccttgtggatgcttttacccagtatctggccgaaaaaggcgagtacgacccccacggcgagaaccggttcaagcccggcatttgcaaccggctggaccgcggcaccgagggccttgtgatcgccgccaagagctacaccgccctgcgggacatgaacgagatcatccgcactgacctactcaaaaaggagtactacaccatcacggtgggtatcccgcagtccgggcggttcaccgcatggtgggagcacgacgagaagaacaacaaggtaagcatccatgcacaccagtcgcaggacgagcgccgcaagcagatcattacggacgtggacgtgctgcgcaccgccgggccgttcgccctgtgcaagatcggccttgtcaccggccgcacccaccagatccgtgcacatctggcctatctgggccgtccggttctgggcgacatcaagtacggcaaccgcaagatgaacgagcgcaccggcaccaaaacacaggccctgtgcgctgtgcgggtcactttccttgatattcccgaggaaaacaccctgcattatctctccggcaaggtcgtcaagctgaaggacccgcagatcataaagcagttcgatgcgctggataaaaacaaggcggatggagaaaacggccatgcataaaatcgacatgaccacgtggccgcgggcagagctgttccggtttttttccggagtgtcacagccattttacagtgtcaccttccgggtggacgtaacgaatctccacgcctacaccaaagcccgcggcatttccttttattatgccctcggctatctcgtgaccgatgccgtgaacagcgtggtgaatttccgctataccatccgggacggcgatgtctggcttctggataagcgcatccccagcctgaccgacctgaagcccggcagtaagcagttccacatcgtcacactgcccaagaccggcacgctggacgagttctgctgcgccgcaaaagctaagagcgctgcacagcagagctttctggatcaggattgcgagacggacgcgctgatctacatttccaccacaccgtggtttgatctgaccagctgcaccaacgagcgggattttgacaaagacgacgccatcccccgcatcacatggggcaagtttgtaccggaaaacggccgcgaaacgctgggcatgagccttgaggtgagccaccggttcatcgatgggtatcacctggggcagttttatcaaacgcttcaaaaaagcattgatgaattgtaaaaaacggctgctgtactttaccgtacagcagccgtttttctctttgttctttactttttgtcggagtcctgctccgccttttcctgcgattcctgttcacggcgcagctctttgatgcgctttttctcgctctggacatggggccatggccagctgaagccctcgttctcacggcaccatttgaccagcggatagaaggcgaaagccagaccgaagaggtacagcagagcgtacagcagggcatccagcgtgatgagtgcatccagtgcaccgatcaccgccaccacgcagcctgccttcaaaaagaacaggccattctggcggcagtattcctcaaagtgttccgctttgacggcacggcggccctgatctccccagacacggggatttttcatgaccgaatagccgtagaataccatcatcaggccaagggtgagctgaaagccaaaaaacatttatgatacctcttatatgatacctcttaatcttcaaacagcggcttcatcaggggcaggaaatccagcgttgcaaagtaatcgcgcggagtctcggcacggcggatcagacggtgggtgccatcctcgcacagcagcacttcggcgctgcgcagcttgccgttatagttgtagcccatggcagagccgtgtgcaccggtgtcgtggatataaacgatgtcgccaatgtcgatcttgggcagcatccggtcaatggcaaacttgtcgttgttctcgcacagaccgcccaccacatcgtacatatggtcgcaaggctcattttccttgcccagcacggtgatgtggtggtaagcgccgtacatggccgggcgcatcaggttggctgcgcaggcatccagaccgatgtattccttatagatgtgcttttcatggatggcagttgccaccagtgcgccgtaggggccggtggtaaagcggcccatctcagtaaagatggccacatcgcccatgcctgcgggcaccagaatttcctcaaacttcttgcgcacaccctcgccgatggccatgatatcgttctcggtctgctccgggcggtacgggatgcccacaccgccggacaggttgatataaccgatgtgcacaccggtggccttctgcacccggacagccagctggaacaggatacctgccagctccgggtaatactcatcggaaatggtattggaagcaaggaaagcgtggatgccgaagttcttggcacccttggcggccagcttcttgtagctttcgatcatctgttcctcggtcatgccgtacttggcatcgccgggcttgtccatgacctgaaagccctcttcgctctcgcccagactgaaggtgccgcccgggttatagcggcagaagatgttctccggcacaccggcgacacgctccagaaattccaccatggtggcatcgtccagattgatgtaggagcccagctcgtaggccttcttcatatcctccacgggagtctggttggaggagaacatgatttcactgccggagaaaccgcacacctcgctgagcatcagctcagtcagggacgaacagtccacgccgcagccctcctccttgaggatctgcaggatgacagggtttggcagagccttgacggcaaaatactccttgaagcctttgttccagctgaatgccttgttgatgcggcgggcattttcacggatgcccttctcatcgtagacatggaacggcgtgggcacatcctgaatgatctcctgtgccatcgcctcggtcagaaacggtttcttttccatagtaacatccctctcattttatatgcacgcggccgatcgccgcagtggcatcagtagaaactcctttcgtcatcgctgatgcgatgccacccattcccctttttgtcgctggcgcaacatctgttcctctctttgtcacctgtggtgacatttctccccggcgcggggagaatctgtcccggccgggggaagtctttctcaatgagggaggctttgccgcacggacaggctccctctttgagggggctgtctgcgcagcagactgggggagtttacagcttcagattctggcgggtgggggtgaaggtcgggatcatctttgccagctgctgcaccacaccctcgtcgttgtgctctgccgcagcagcaagctcctgcagctgcccgtagaactcggccagatcgatgctgcgcggcgaagccacaaaaattttattgtgctgggtgcggcgcatcttatcctgctcctcgtccatcatcagctcttcgtagagcttctcgcccgggcgcagacccacgatcttgatctccatattcacgcccggctcatagccgtaaaagcggatgagctgcttggcaagatccatgatcttgaccggctcgcccatgtccagcacatagatattgccgctttcggccagcgcaccagcctgcaacaccagctgggccgcttccggaatggtcataaaatagcgctcaatgttgggatccgtcagggtgacaggcccgccttttttgatctgggcctcaaacagcggaatgacgctgccgtgactgcccagcacattgccaaaacgcacagccacacacttcatatccgtgttgcccgcaaaggtctggatgagcatttcgcagatgcgcttggtacagcccatcacactggtggggttcacagccttatcggtggaaagctgtacgaaccgctccacgtcgtgttcgctggcgctcaccagcagatttttggtgcccagaacattgttcttgaccgcttctgcagggctgacctccatcagcggcacatgcttgtgtgctgccgcatggaacaccacagtgggatgatatgtttcaaaaacctcatccagacgctttttatcgcggatggagccaatgagcaccgttaccgggatatcccggccgtacttctgctgcagctccatcaaaagctcataggcgcagttctcgtagatatcaaaaataagcagcttgccgggcttgaagcgcatcacctgacggcacagttcgctgccgatggagccgccgccgcccgtgaccagaacggtcttgccggtgaggtagccggagatctgatcggtgtccagtgtcacttcctcacgggagaggaagtccgccgggttcaactcgcggaaggctccctgctgcggtgtaccgctgcccaccagctgcgggtcactgagcagctgcaccgcacaatgggtgctgatgcacagatcgatgacatggttcagcttgctgcccttcagggtaggaatggcgatgatgatgctgtggatgccgtagcgcttgcacaggtccgggatatcctccagcgtgcccttcaccggcaccccgtggatggtctggttgagttttgtgggatcatcgtccaccgccaccaccgcgtgaccatattccttattggatttgcacacgttgatggcccatgcaccggcttcgcctgcacctacgatcatcaccggacggttggggtccttgctggcagcgccgcgcagcttttcgcccagcggatggttcaaaaacagcctccatgccagacggctgccgcccaccagcaggaagatgagcaccgccgccatacagttggcggagttgaacagcacgccgtggatgcacagacggttgacacagtagacgacaacggtaggcacagccaccgttcccgccagacgcatcaggtcgcgttcaccggcatacttccacagtacggagtacagcccgctgaacagaaagctggcaatgtacaccgccacgatccatggcagattttcgtacagaagctcacggttatgcggccaccaggcagcttccactgctccgtctgcacgcagcagcagcgcaaaataaaagctgaatgcaacaatggctgcatccagcagcacaagcagcgcccggcgcgcaagcacctgcggtgtgttctttttatctttcacaaaaaagtcctcttttacatacggcacaagagccgcagttttggccggaaaagcttccggtttcacagagcatccggcacaccggacaaccctatctttatattatactcagaacactgcagaatgtccagaaaatttgaatccgctgccaaactccctctattttttcggtctgccgggtcggtgcgcagcccagagcgcggctgcttcctctccaaggcccagcggccatgccgccagcaggaacactcctgtggtagcgcagccgcctatgcccaacgcggccagctgcaaaggcagccgagccgcaaacccatccgcaagcagcttccgcagcgccataccagccgccgcagccagcacagctgccagtgccggtgcacccagccagtggcggaatgcatgctgcgtgccgctggaaaacagcagatgcccggtgttggccgcacaggtgtacaggctggaaagcaggatcactgccaaaaagcccttcatgccaaagcgcggcagcagcgccaccaccccgccaatgcgcaggatggaatcccacacgctgtagcggaaggccgccttctgctctcctacccctttcatggcaccgtccaccatgctttcaagatacatcagcggcatggcaggagccagcgtttccagataaaacccggcatccgcactttggtacagaagctgtgccagcggccgtccccacacccagaacagcacccctgccagcgcggaaaaatagccggtgagccgcagcatccggtccaaaagtgcgttgagccgttcggtctggcccagaatatgagcctgcgtgatctccggcatcagcagcaccgaaagactgcccagcaggccaaatgggaacgtaagcagcggcagagccatgcctttcagttctccgtactgctccagcgcggcggtgcgcccgcccgcgttgatcagatagaccgcaaggcaggcgggcaccagcatattctccgccgtgtgcagggcgcttgccagcacccgcccgccctccaccggccacaggatctcccacagacggcgggccgggtctgccgggcggacggctttttgccccgcaaaggcactgcgggcatcccgccggtaaaaggccagcatgcacagcgccgacaccgcttcgctgacggcggtagctcccagcaccagcatacagcgcacgcccaccgcaaggccctcggtacgggtaagcgccagtgccaccagcgcgatgcgcaccgtctgctccgtaagctggctgaacacattgggagctacatgccgccgggcgatgaaaaagccccgcagcaccgccgagaccgccatccatggcattcccagcgctgaaacgcgcaaagcaccaacggcgcggacatcgccaagccacaaccgggccgcaagatccgctgtcgccagctgcagtgcagcggcaaacagccccagcacaagtcccgccgccagcaaacggcgcagcatgccgcgggctgcaccacgggcagagtccggaccgctgagttcttcggccatgagccgggtagctgccaccgagacgcccgccgttgccagcgtgacgaacagtgaatacaccgccagcaccagctggtaaaggcccatcccctcgccgcccagctcgtttgccagccagatgcgcaggcccatgccggccagccgcagcaccacgtctgaaccggtgagcagcgccgcatttttcaaatagctctgccgcatggcgcacctcctgccggaatgttccggttccagcatatgaagcggcggaacaggatatgcaaaagcagagcggcgcggcgggttgtttcctgagcgcttttatggtatagtaaaggggcggcttttatatggccgtattctgtttaaggaggaagcacacggccaatgcctctgagccagccgtgcgcaaaaagagaatgagcgaagaatgtacccatgactgctccagctgtggagcagcatgttcttcccgcgatgcagcgcccaagcacgatgcccccaaccccaacagcagcgtcaaaaaagtcattggcgttgtgtccggcaagggcggcgttggcaagagcatgaccagcgctctgctggcctgcgccatggcacgccgcggctaccactgcggcattctggatgccgacatcaccggcccgtccattcccaagctgttcggcatccatggccgtgccatggccgacgacaagggctgctggcccatccagagccgcatgggcatcgatgtcatgagcatcaacctgctggtggaaaatgaggaagaccccgttgtgtggcgcggcccggtgatcgccggtgctgtcaagcagttctggaccgatgtggtctggaaggacgtggacttcctgttcgtggacatgcccccgggaaccggtgatgtgcccctgaccgtgttccagagcctgccggtggacggcattgttgtggtggcaagcccgcaggagctggtgagcatgatcgtggccaaggccgtgaacatggctgagatgatgaaggtgcccatgctgggcattgtggagaacatgagctacatcgtctgccccgactgcggcaagcacatcaatgtgttcggcgagagccatgtggatgaggtggctgcaaagcacggcctgcccgtgctggccaagtgccccatcgatccccagctggctgcgctttccgatgccggcatgatcgaaacctacggcggcgagtatctggaaggtgccgcagacgcctgcgaaaagctgctgaagaaataaaaatcgtttctctgccctgtgccgtttgcgtggtgcagggctttttggttgcagaaaatatagctttctgcgcctgcagaatgcagcaaaatggagaaaagacgttcttttccgtatttcttttgttctgccagcgctttaaaaaacaaggttctgtgccgtttttttcttttatttttcgttttgtgaagcggtctcaacttttcatctgtttttttgaagcattttctgctttctcgctattgtcaaacccacagaaatgctttataataataaagcggtctgcagccataagcaggccggtgtgtaagaacggaaatccgggatcgtcccaaagcgttttagcagcgcgtccgctgtgcggcgggccgggcggtttcgtctttttcaaattttatagagtaattgggaaaaggagtattctactatgctgacaaatgaatacctgaagcgcgtttacgaaggtctggaaaagcgcaatgccaacgagcctgagttcctgcaggctgtgcgcgaggttctggagagcatccagcccgttgtggagaagcaccccgagtacgagaaggccgctctgatcgagcgtctggtcgagccggagcgcatcatcaccttccgtgtgccttgggttgacgatcagggcaaggttcaggtgaaccgcggctaccgtgtgcagttcaacagcgccatcggcccctacaagggcggcctgcgcttccatccctctgtcaatcagggcatcctgaagttcctcggctttgagcagaccttcaagaacagcctgaccaccctgcccatgggcggcggcaagggcggctctgacttcgacccccacggcaagagcgacatggaagtgatgcgcttctgccagagcttcatgaccgagctgtaccgccacatcggccagttcgtggactgccccgccggtgatatcggtgtcggcggccgtgaggtcggctatatgttcggccagtacaagcgcctgaccaacagcttccagggcggcatgctcaccggcaagggcctgacctttggcggctctctggcccgtaccgaggctaccggctacggcctgtgctacttcaccgctgaagctctgaagtgcatgcgcaacgacagctttgagggcaagaccgtggtcatctccggttccggcaacgtggcgatctacgcctgcgagaaggctacccagctgggtgccaaggtcgttaccatgtccgactccaacggctacgtctacgatcccaacggcatcgatctggcctacgtcaaggatctgaaggaagtccgccgcggccgcatcaaggagtacgccgagacccacgagggtgtaacctatgttgcagattgcagcaaggtctggactgtcccctgcgacatcgccctgccctgcgcaacccagaacgagatcaacaaggagtccgctgaggctctggtgaagggcggctgcactgtcgtgtgcgagggcgccaacatgcccagcaccccggaggccatcgaggtctacctgtccaacggcatcctgtacggacctgcaaaggcttccaacgcaggcggcgtggctacctccggtctggagatgagccagaactccgagcgcctgagctggagctttgaggaagtggatgccaagctgaagggcatcatggagggcatcttccatgcttcctacgatgcatccgtggctgccggttccgagggcaacctgatggtcggtgcaaactgcgccggcttcctgaaggttgcaaccgccatgatggcacagggcatcacctactaaatttcatagcattttcaaagggctgcgtccggtcgggcgcggcccttttttggtataaccccgccccgctct

SEQ ID NO: 1109 - DNA, 29031 bp, Unknown
  gut microbiota DNA sequence
gaaacaagttcggattatttttgtttggtccgagtggcgagaatcgaactcacggcctcttgaaccccattcaagcgcgctaccaaaactgcgctacacccggatatctgcaagcggttatcgctcacagctcaattagtatacttgattcagggtgttttgtcaagctttttctgccaggtttttgcaaataaattttcaaaactccggctcgttttcctgcagcggctgatcccttgcgggaaatgtttcaaattcaacagtggcaagtgcaattgcaaacacactctcggcaccggctgccagcagcgcctgtgtgcaggctgctgccgtggcaccggtagtgatcacatcgtctaccaaaagcacctttctgccctccacaagttccgtgtccgtcacccggaaggcacccgccacattggcaaggcgctgctcaaagggcaggcccgcctgatgccgctttgcacgagtgcggcccagtgctttcgggtacagcggtatccccagtgcgcgggccagcggcaccgccatgagctgcggcacattgtagccgcgcactctgccggataccggtacgggaacgatgcagtcgtacccaagggacatgccttccacaagctccggcaccggttctgcaccggccatatgcatctcgctgccaaaggccagctttgccagccagaggcccagctccaccgccgcccacggtgcagcatggtattttgtatgcaggatgccgcgccgcacacagccctcataccggaacggtgctgctgcaccggtcagttcccctaaataatgctgagaagcgtccagccgcattcccggcttcctgcgcagctcttccagctccgcggcacaatccgggcagacaggcacactgcccagcacccgatcacaaaacgggcagcggcgcggatacaccagctgtcttgccccgcgcagaatgcggcgcgggacgctgtaataatccatcagtcctttttgacggccacgatcacacgcacgcgcttgcccgcagcacagccaaagttatcgtaccagccggtcaggtagtagccctccgagttgacctcggtcagcttggtggcgtagtactgacccttgtaccacagatacacctgtgcgtcgtccgccatctcaaagcgggtgccgttgctcatgaccgacgctgcacccacctgatcgatcttcatgggcatgagctggaccatcgtccgcacgctgccggtcgtctctctgcgggctgcaacaccacctaccagcaccggatatttgacgttggtggtgaaagctacctgcgaaccattgacatagcacacataggtagcaccgccgccaatatagcggaagatggacgcatacggttcgcctacaaggctgcccacctgccgcagaccaaggctgagcaggctatccgtgttggctgtgatcttctgccacagagtggagaggatgtcgccgttgatcacaccccacagcacttcgctggtggtgggcaccagaacatccttcaggtcgtccacgatcttatcctgcgtatccgtgctgtcgctcttgccggtggaaatgatcttggccagcgtctgcagttccgagtagttgactgccacattcttgatatcatccagcacgccgtaggtccacaggtcgccggtgacatcattcaggatcaggcggtcgatttcgcccttctcattcagcgtatagtagcggacgttcagaagattcaggtctgtccccgctaggcggctgggacgaaccgtcccagccacaccctccgcagttgtatccagaatctgtacatcgtcggcaagggcatagctgcccagtgccgttgcatctgcattgaccttgccggtaacgaccttgttctcgatgccgctcacggactcgccttccggcgttacgcagatctctaccagccagccctttgggtagttcaggcttttgtccacattcacagtgcgctgaacaccatcggtgcacatgacagccacgcgctgcagcacatccgcgccgttatcttccacaaggctgcgggctgcgccctgcaccacgccgtagaacacctcgtcggcctctgcgccggtaataacatccgccgcctcattgttcatgcccagcagcagagtgaccacttcgcccacgccgccgccgttcaggctggacaccttggaagccactgctgtgctgcccagctgatagctggtgcccgccacggtaacggccgtgggtgcgctggcgctgggcgaaacggcagtgatgcggcctgctgctttgcgggtgtagatccatacagtctgcagactttcgctgtaataatacacatcgtaacggttcagttctgcagaagccgagaccttatcgttgcggtagatgctcaccggcgtaaaaggcagctgggtgccttccgctgccacaaagggtcccttcaggctcttgagcattaccgtggaggtgtccacctgaccgttcgaaaccgtaaagcccaggctggtaccataggcgctgccagaggcggtgtttgccgtgagggtgttatacaacagcaaagcacaatcctcatagttcatggcctcgctctggctgcggttcagctggttacgcaggcccagttcctgcgccttgttcagctgtgcagtcgggaacacgccgttgaggtcggtcattttatagcccagtagcttgagcgctgcggtgcaggcttcttccagcgtgaccgtattatccgggcggaatgtaccatcagtatagccgttcatccagccctgctgcaccgcaatgcgcacatagggtgcccactgagagctgccgggcacatccttatacagtgtgcccagattgccctgctggctggcgctttcgcggtaggccgaaaaggagaccagcatcttggcaaatgcaccgcgggtgacggcagcatccagactgccggtctggctggtatccatagcgcccagcgtgatggccgtctgaatggccgagttgttcaggctggccgccgatgccggaagcaccagcacggatacagccaggcatgctgcaagcagacatgcgaaaagacgttttttcataggtatattccccttccttggtgttttgcagtccggcgcaacgccggctgagaagagttcagtcatagcgcaatgcttcaatggggttgagccgcgctgcgcgctttgcgggcaggtagccgaacagcacgccaatccccaccgagatgccaaaggccactgcgatggaattgaaggacgggctgaccgtaaccgttgtgccgctggtgaacatgggcagcaccttgtttgctcccatggatacgatgtagcccagtgcaatgcccagtgcgccgccgagggccgaggtggtggctgcttccaccacgaactgcgacagaatggtgtgttccttggcacccagtgccttgcgaatgccgatctcgcgggtgcgctcagtcaccgacaccagcatgatgttcatgatgccaatgccgcccaccagcagcgaaatgctggcaatgccggtcaggatcacaatgaccatgttgatcatgttgttcatttcctccagccactcgctggcgctgtagacatagtagccgttatccgagccaagcaggcgctgcagttcgctttccaccgcagactttgcttcgttggcgcggccctcatcctccatgaccgcggcatagttgttcaccgtgctctggctggaaaggcgcatggccgtggtatagggcaggtaaacgcagtcgtcatcgctgccctgctgcatgtccggatcgctgactttggccgccagcacgcccacgatgcggaacttgttggcaccgatcttgagcgtctggccaaggccgttgccaccaaaggccacacggttgaggtaatcgccgatgacacacacatgcttgttatccttcatatccatgtactgcaggccgcgtccctgcgcgatctggtaatttttcatggcggaatagttctcgtccacgccgctgatgttggaccagcggtagctggtagtgccgatcttcagcgtgccgctgccgctgaaatcgatctgcggcgaaatggactggatcagctccgggtactccgtgggcagcttgtacatttcctccaccgaaacggtgcgggagccgttgccccacacctgcaccgaaagggtgttggtacccagtgccgaaaagctgtcgcgcatgctttttgtcatgccgttgcccaagcccacgatgacgatgactgccataacgccgatgatgatgcccagcatggtaaggaaggtgcgcagtttgttgctccacacgttctggatggcctgacggaaggtctcaatgatcatgctttttcctcctcatccggcagcagcgtgggctgcaccacggcttccggtgcatgggcatcgccatcgtagaccacccgcccgtcctccagacggatgatgcggtctgcctgcaccgcaatggaattatcgtgggtgatgagcaccacggtgtggccctcatcgtgcatctgctgcagcattcccagcacttcgcggccggtgtggctgtccagtgcgccggtaggctcgtcggccagaatgaccgccgggttccgcaccagtgcccgagcgatggaaacacgttgctgctggccaccggaaagctggttggggcggttcctgagcttatcgcccagacccacctgctccagcacctctttggcccgggcgtggcgctcggcgcggccgatgcccgcatacaccagcggcacctccacgttctccatcaggttgagccttggcaaaaggttgtactgctggaagatgaaacccagcatctcgttgcggacggatgccagctcgttgcggctcatccggccaacgtcttttccgttcaggcggtaggtgccgtgggtgggcacatccagacatccgatgatgttcatgcaggtggatttgccggagccggactggcccacgatggccacgaactcgcctttttcgattttcatggtgatgtggtctgcagcctttaccgtggtgtcacccatctggtaatacttgcacacctcatcaaactcgatcagagcgctcatgcattcctcctgtgtcagcccagatagaccacgccgtctgcctgagacggattcacgtcatcccctgcggagccctgcttttcctcggcttccacaggctcttccgccggtacggtcccgttttccggttcttcttcatcgaccatgctgttcgcagcatcggcgccttcctcgccctcggtgccctctgcatccgcctcgtaatagccgccgtcgtcatagtacgtatcggtacttgctgcggcagagtcgtaagccaccgtgtcattgccggtcaacccgctgacgatctgggtgtagttgtcatcgctgacgccggtcttgaccggcacatacacatagccgtccggcgcgatcatgcccgggtctgcgttgactgcgctgggggagtcctgcgtgaccagcacatagccgccgcgcacgatggcagcgttgggcacggtaagggtattctttgcctgtgccaccacgatctcagcattggcgttcatgcccgggcgcaggccatcggtctcatcaatgcgcaccttgaccgggtaggtggtggtgccgccattggaggtacccttcaaggaaacacgggtcacaacgccggtataggttttgtccggcacggcatccgccgtgacctgcacgctctgacccaccgacaggctgctgacctgcagctcgtccacgttcagggtcatctccagatagctcaggtcaaagatcgtgcacaggtccgagccggcggacagcgcgtccccggccttggcattcttttcaataatggtgccgctgatgggcgaggtgatggtgtagttgttcatggcctcctgcagattgtccatgttcagctcggcgctgcgcaggctctcggcggcagactggatggcctcggtcaggtcctcgccgctgatctgcagcacgatatcgtccttgttcacggctccgccttccggcacattgatggccgtcacggtaccggcggcaagggcagtcagggtgcgctccgcctgatactcaaagcacttggcggcaatgcagttcacgccattgatggttgccgttgctgcctgcgcagtggtcaggccgcctgcattgcgcacagcaatggtcacggtgcgggtgagcaggttgccggtgctcagggcatcggtgccggtcacagcggtcacggtgccggtcagcatttcaaaggtgccgtccagcgtcacctctgcgctctggcccaccgagaaggtggcggcatctgctgccgggaactccagccgcagcaccattttggagctgtcacggatgaccgccacttcctgaccgctggtcacttcgtcgcccttggccaccttgagggcactcacaacacctgccacctcggcgcggacatactggcggtctgccgtcttgtcgtagctgcgctgtgcctgctgcagagcaatggacgcctgctccgccttggtggtggcatcggaggagtccaccgtgtacagcacggtgccttcctccacgatgtccccttcctcaaagctgctggtcaacaccttgcccgctaccagcgacttaacattatatgtattggcagggttcagagtgccggttccgctgagggtgttggacacatcccgcttggacggcgagacctgcacatagttgatgtccttattggcgttctgtgccttgtccgggcgcaggatgaaccatccgcccagcacggccacgcacaccaccggcaccatccatttccagttcttgcggaaaaaggctgctgctttgccgcccttcgctgcgggctttgcctcacccgcagccgtctgctgtaccgcagcatcctgcttctttttaaagatcatgcttgctgtttcctcctgtatctttcagggcatgccctggtttcggtatcgggcgcagactttgcaaaagcgcgcgataaagagtttattgttagtttatcgcattttcgtctattacacaagcgtctaaattttgttttgacgcatttgtgtcaaagttttacccaactttcacaccgtgccctcttttgccttccagacaaaacaaaagagacagtgccccgctcttgcagggtactgcctcttttttgaagcacgatctttattcagctgtagtttccactaccacatacaccccggcagggacgcatgcagcccatgcgccgtccttgtccagccagccgaattgctcgcacacatggtccgggcactgactgtccaagaacgcgatggcaccatcctttacctgcagatgcacgacataattgcccacatcatacaggtaatcgtggtctgtatccagcggcagagtctcggtgatgccatcgccaaaatcgacggtggcctgcaggccgctgcccttgctgctgtgtgctgcgcgcacgccgaaatacagcgctgctgccagcacaaggatcactgcagcaaagatcaggttcttcatccatggcttcaggcctttggagccggaagcgttttcaggtgctttgcgggtactcatgcagcgtagtcgctggcagccttacctgcaatgcggccaaacacggtgaagtctgcaacagcgttgccgcccagacggtttgcaccgtgcacaccgccagtgacctcacctgctgcaaacaggccagggatcacagtgccgtcctccttgaggacttcggtgttggtgttgatggtcaggccgcccatggtgtggtgcacaccagcagtgaccttgattgcatagtacggagcagtatccagcgggtttgcaaagctggtgcggccaaagtcggggtcattcttggcctcaacatagccgttccaggtcttcatggtctcggcaaaagcagcctcatcaacgcccattgccttgcccagctcctcgtaggtctcgccggtcacggtgtagcccttcttgatgtagccctgaatgacgctggaagcatcgaccatagcctgatcgaccaccagccagctgtagctgccggtctgagcgatctcagcagcagagaccacgtcacgggtgcccacttcgtcgatgaagcgcttgccctcggcgttgatcagcacagcgccgtcgccgcgcagaccctcggtgatcagggcagcggtgttggcctcaacggtggggtggatctggatctggtccatatccacggtgccagcgccgatggcggtggccatctcaatgccctgaccctgagcgccggcagcgttggtggtcatgaagcccttcagctcaggcttgtactcgacaaccatgtccagatttgcgccgaagccgccggtggtcagcaccacagccttggcgttcacagtgacggtctcgccggtagaaccggtggccttgatgcccacagcagcgccgctcgcatcggtcaggatctcgttggcggtggtgttcagcaggatctgaacgccagccttctcacagttctcctccagcagggggatcatgtaggaaccgacagaaacggtcttgccctctgcgtccacagggcgatggatgcgcttgacggatgcgccgccaaagctggaaacgctgtgcagggtgatgccgtgctcgtccagccaatcgatggcatcagcagagttggagcacagggtctccaccagagcagggtcgttgatgcccttgccgccgatcatggtgtccagctccatcagctcaacagagtcgaagtagccggtggggttcttctggtactctgcccactgctcagagacggtctttgccagagcggtgatggtctcgttgtcagcgtacttttcagcagcggtcttcagggtcttttcgacaccggcagactcgccgaactcgttctcatcctgatacacggtcttgccggcgttcatgccgccggtagcgcgcacagagttgccgcccaccatggcctggctctccacgatcacaacgctcttgccctcggcagcagcggtgatggcagcggtcatgcctgcgccgcctgcacccacgatgacaacgtcagcgtcaacggtggaatcctcggccttggtctcgtcggccttgacctcgatcttatagtcgtcagcgttcaggccagcggcagtcagggcagcggctgctgcctccttgatggcgttggaggtgatggtcgcggtggacacgccgtccacggcgatgctgccggtctcagcgatctgagcgggcagctgctccagtgccagcgtaccgatgccgggggtctcgtccttaccctcagcggtgcagccggtgatcttgccgtcttccagcgtcagggtaacggtaacgtcgccgcccatgcccttggcagtgccggtgaaatcgccggacacgccgcctgcggtggaggcggacttgctgccgcagccgtagcccagcagactgacacccacaacaaccgccatggccagcgcagccacgctcttgcggatctgattctttttcattgtttcttccttctcatattcgggttgcttgtgttcggacatctatcagcaaaaaagggggagctgctcattcggaaagcagcttccccctcgctgaaacttaggaaaaacttaggcgttagcctgagctgcagcaacagcgcatgcaacggtagcaccaaccatcgggttgttgcccatgccgatcaggcccatcatctcaacgtgtgcgggcacggaggaagaacctgcaaactgagcatcgccgtgcacacgacccagagagtcggtcaggccgtagcttgcggggcctgcggccacgttatcgggatgcagggtacggcccgtgccgccgccggaagcgacggagaagtacttcttgccgttctcgatggcccacttcttgtaggtgcctgcaaccagatgctggaagcggacggggttggtggagttgccggtgatggagcactgaacgtcctctttcttcatgatggcaacgccttccataacgtcgtttgcaccgtagcacttgacggctgcgcgctcgccctcagagaaggggatctccttgacgacggtcagggtctgagtggggatgtcgtactcagtctgaacataggtgaagccgttgatacgggaaatgatgtaagctgcatccttgcccaggccgttcaggatgacacgcaggggggtcttgcggaccttgtttgcagtgcgggcgatgccgatagcaccctcagcagctgcaaaggactcgtggcctgccaggaaagcgaagcaggtggtgtcctcgctcagcagacgagcgcccagattgccgtggcccagaccgacctgacgctgctcagcgacagagccggggatggtgaaggcttccagaccttcgccgatggcagcagcacactcggcagcatcggtcaggccgcgcttgacggcgatagcggtgcccagggtgtatgcccagacagcgttatcaaagcagatgggctgaacgccgcgcacgatcttgtcgcagtcgatgcccttagcgaggagcatctcgttgcaagcgtccagagactccaggccgttagccttcaggcatgcctcgattttcggcatgcggcgatccatagattcaaaagttgccatgagttgttcctcctctcttattcctcacgcgggtcaatgtacttcacagcaccctgctccttgctgaagcggccgtaagtacccacgttcttctcataagcctcgttgggggtcttgccgtgacggatatcctccatcatcttgcccagcttgacgaactgatagccgatgacctcatcgttggcatccacagccagcttgttgatatagccctcggtcagctccagataacggacgcccttctccttggtggagaagatggtgccggtcatggagcgcaggcccttgcccaggtcgtccagacctgcgccgatgggcagaccgtcctcagagaaagcggtctggctgcggccgtagacgatctgcaggaacagctcgcgcatagcaacgttgatggcatcgcacaccaggtcggtgttcagagcttccagaatggtcttgccgggcaggatctcgcctgccatagcagcagagtgggtcataccggagcagccgatggtctccaccagagcctcctcgatgacaccgttcttgatgttcagggacagcttgcaggtaccctgctgaggtgcgcaccagcccacaccgtgggtgtagccgctgatgtccttgatctcataggccttgacccatgcgccctcttcggggatgggagccggaccatgcttaggacctttggtgatcgggcacatattctgtacttgctgcgaataggtcataatcatactctccttttgacaaatgttgctttgcagcacaaagccgccgccgcgccctgccggcacagccgctgccctttgctgcttgcatctgaccgggcgcgccgctctctttcagcgccttaaccggtactaccacgcatgattttattatagagaaagctgacggattttgcaatacatttccggtaaaaaacatcaaaactatttgcagttgtctgctgctaactgtcaattcggatgcttttgtcatttcattcgtcaagtttttgtcaactatgtcaagaggacaaatttcacgctcctgtgtcctgcctgcgcggtgtctgcccggcaggcttcagtacccacatggccgcaaagcccgccgctgcgccgcccacggcaagccagtgccgcccggcttccaacccccagagatttgctgcaaacggaaaggccagactgcccacgctctgccccagtgccagaaaaccgtagttcacccctgcgtgcggcaggccgaacagatcggtggaaagggcgggcagcactgctgcaaggccggaatagcagaaggtaagccccgcgtaacaggcgatcacccaccagccctgcgcaaacgcaaaccctgccgaaagccccagcgacaccgcaaacagcagcagatcggtgggcctgcggccaattttatcgctgagcatgggcatcagcaggcggcccgccgcactgcccacgctgcccagcaccacgctccacagagcagcgttctcgtccagcccccgctccacgcccagcttcaggatgatggggctgaacagaagcaccgccggggtggaaaaacacaccgcgcctgcgcacagccagtactgctttgttttcagcatctgccatggggaaaggtcgatctcatttttgccgctcccctgctggttttgtctgctttccggcgggtcctgcagcagcagactgcccgcaaggcagacgggcagcgttatggctcccagcgcccagaacgcgccccggatgccctgcacgattccaaagccgctgaccgccgtgcgcacgaacacggtgaggaacgcaccggaaaggcccaccgccccgccgatcacgccggtggcaaggcccttgcgcccggcataccacttctgtgcgcaggactggatggatgggtacagaaacgccgtgcccagccccgccgggatactgaatgccagaaaaaagctgcccgcactgccgcccggcaggatggccgctgcaaaaaatccgccgcacagcagtgctgttccccacagagccgcacaccgcgggcctcggctgtcctgcagaaagccgccgaggacgcaccccacgccgaacgccgcaatgaggatgccgaaggcatagcctgccccctgctcgctcaggccgtactcgtccatgaccggctgctggaatacgccccacgccgccgggatgcccgtgagcacctgaatggctgcgcccgccgcaaggatggtccacggatgttttgctgcaaattgctgtttcatcgtctgtcctccgaatggtttttcctttacagtgtgcccatttcaattgacaaaacggcagatttctttataatgaataaggtaaaagtatttacattgatttatatagagaggaaccatcttatgaaaacacaggcattgaagggcatgcgcgacctgctgcccgcagagcagaccctgcgcgattacattcagggcaaaattctggagacctaccgcgcgtccggcttcgagcgcatttccacccccatgctggaggatatggaaaatctggacaaatccgacggcggcgacaacctgaacctgatcttcaaggtgctcaagcgcggtgataagctcaccgccgccctgaacaccggcgatcccaagcagctgtccgatatgggcctgcgctatgacctgaccctgccgctgagccgctactatgccgccaacaaggataaactgcccagccccttcaaggtgatccagaccgaccgtgtgttccgcgccgagcgcccgcagaagggccgtctgcgcgagttcgtacagtgcgacatcgacattctgggcgattcttcccccaacgccgaggtggagctgatcgacgtgaccacccgcgctctgctgaacatcggcttcaccggcttcaccgtcaacatcaatgaccgccgcatcctgcgcgggatgctggagagcatgggtttttccgctgatacgctggattccgtctgcatcacctttgataagatggacaagatcggcgccgatggtgtgaaggctgagctgaccgaaaagcagctgccggaaaatgccatcaacgcactggccgacttcattgccgcaggcgaagtcacgctggatgccgtggctgcccgctgcgcagaccccgccattgccgacgacctcaagtatgtccttgctaccgccaacgccatggctgcaggccgctatcaggtagcctactgccccagtctggtgcgcggtcagggctactacaccggcatggtgtttgagatcacctgcccgcagttcagcggtgccgtggccggcggcggccgctacgacaacatggtgggcaagttcctgggcactcaggtgcccgccgtgggcttctccatcggcttcgagcgcgtgtgcggcatcctgctggagcagggctaccagatccccggcgcaaagcagaagatcgccctgctgtacggcaaggatgccgacttcaccaccgttcttgccaaggctgcagacctgcgcagcagctacaatgtcaccgttctgcagcaggccaagaagctgggcaaacagttgggccagctggaagcttccggtttttccggtgccgcctttatggataaagatgagatcaaaatttttgcgcagcagtaaataattgcacacaaagcccctttacttttgatatgctacccctagaatagacagagtaaaaacaaaactctgagtactcttggggtattttcatgtcaagaaaaaacacctcagaaaatcgagcgattttctgaggtgtttttgttttttctggtttaaaagccggtaggcggcacatagtaactggggatcgaggctgttttctgcacatttgcctgctggcgcagcgctgaacgggtcacctctgcccaagaatactgggtcatatactcgccgcgataggaattggtggccgagcggctgccccgcaggaaattgtaataatcacaatccaccttgctggtgtccagcgccagtgtgctgcggccgcggatgagcaggccggtaacacctgcatcctccagcgtatggctcaggtcaaagatcagattgcggagatggctgtgcagcgatgcggtgtcgggcttatcctcccacagcacggccagcatttcgccgttggtgcaggtggcaccattgcgatccaccagataggccagcaactccttgctcttgctgcgcttgaaggccaaagcgcgcccgcccacgaagatctcaaaattgccaaagcactggatcttgatgccgacaggggcattctccggcgggtagcgcagatgctccagcacattgcgcacatctgcctcgtttgcaggcttgagtaaaaagccgctcacgaagatctgcagcgcttccagcgcatactccgggtgctctgttaccacaatgatgttgcagcgcggctgcagcttctggatcatgcgcgtcaaagcaagcccattcatgccgggcatttccagattgaggaaagccgcgtccatcggcccctgacgcatccagctcagtgcatcctcggtcgtcatggcgctgatatagtcacagtcgggtgcaacgcggcacaggatgcggatcagcgaattgatcgcaagctgtccatcatcgacgaccagtatcttcattcgtacacccccgcaagtttaccatacatgttccctgtttcagtttaacactttgtcctttgattcgcaagtttttttgcacaaaaagccagaagctccacacttctttacaaaaggacgttccttccccatccgtttcctcataaagcagctggctgaaagaggcatctttcccattttcatttccggcagtcaaagcaactatacaagatactctgtgccatccagtccggtcagtttttgtgctgtcgtttgtcccacacgggtgcggagccgctcatacgcctgccgcatccgggtcgggcgggaggtgcagttgtgtgcatcggaagagaccgcgtccaccagccccgccttgacccagtgctccagccgcatccgctgccagaagccgctgtccagcacagccgaacagttgatctggcagcgcagccggtactgctcatgcaggcgggccagcaggccgtgctgcgcaaggcagggataccgctcaatgtgggccaccagaatgcggtaacccgcacccgtgatctcctgcagagccgtttccagctcctttgccgttatgttcggcacaaattccagcagcacccagccggtatctcccaaggtcagcagctggcgctggactgccgcatatcccgccgcaggggtatacaaaagctctgagccgtgctccagtttcaggtcgtagcccttctgcgcacagtaatcccgggcaaaggccagatgccggtcgtagatttcctgcgggaagcgttccatgcccggcgtactgtgcgaggtagcaaacaggtgccgcacaccgtctgctgccgctgcatccagcatggcatacatttcttctctggtctgcgcaccatcgtccacgccgtagacgaagtgcgcatgataatccgtaaagccgctcatttcttttccgcttcgtggcttcgtttataatactttctgtaatagccgtactttccatactttgagtaggatttgtagtacttgcggcccatgtaattatcgtaatccacctgattgagcacggtgcccagaatggggcagccggtctgctcgatctgctgcttcacgtccagcagttcctgacggctcacatcgttgtagttcactgcgatcagggtgccgtcacatgccttggcgatctccgccgcatcgatgaccacgcccaccgggggtgcgtccacaatgacgtaatctgccattctggccagcatatccagcagttcggcaaaatggctgttggtcagcagcgccagcgggttgggcacatcgcggcccaccggcaccatgatcgcgttggggatatcggtctggtagatgacctcatccatgcccaccatgccggccagaaaatgggagaggcccttaccgtcgttgcggccatcctcatatttcaggccgtagtcactgttgaccatgctgcggcgcaggtctgcgtccaccagcgccaccttgatgccgcgctgtgccagcgtgcgcatcaggtttatggacagatagctcttgccctctgcagcatgacagctggtgatcatgatctttttgacactcgcacctgcaaaggagaggttggtgctcagggtattaaaggcttcatttcccgcataatccagagccggaaattttgtgatcttcagctgtttcatgctttcctcccagagctgccacccacacggcggcggacatcattggcaaaccgcttggtgcggcgcttgaactcgcttttctctttcggctgttcgccagcatcggccagcgggatcgatgccagcaccaccagaccggcgtacttacggatgtcctctgccgtcttgtaggtatcgtccagcatggtccgcagcaccaccacggcgctggccagcacaaagcccactacaaagcccagcaggatgttcttggccttgttggggctgaacgggttctctggcacacgcgcagaagacatcagggtgggctcgtccgtcttcatcttttccgagatgtactttgcgcccacatccgcatactcgtttgcgatcgctgctgcttcttccggatccgggttcgtgaccgtgatatccagcatacgggtgtcgctggtgttggtgacagacagcatactggccatatcggtgtaggtgtaatccagatccaggttgctgatgaccttttcgtggacttcccacatttcaaagaccttgatgtaatcgctggtcagctcactgccgacctgcagatcggagaagttcagcaccgaatcattgcggctgaccacataaatggtggccgttgccttgtacatcggcgttaccagaaaaaacgtataaagcgccatcagtacggcacccaccacagccgtggctgcaatgagcgtccagtgggccagcagacccatgaacagttccagcagatcaatggtgtcttctccctgttccggctgtaccgccaaagctgtgcgctccttcacaaaagtatcttgctgcacgatttcactccttataaccttataatactgccgcccatgcggcccgggcgttgtgccctttcctctatttctctgaatcctatacgccaaaaatgcggcgttccctttttcatcagggagcaccgcagaacatttctagttcttagccctcaatggtcttcacggccaccagaacgaagttggagccatagagcttgacctggcggcccttcaggttcaccacgatcttgccatccacgaccttaccgggcacagtatagtaggtataggtcacagtgccgtctgccttcgtcttgggcacagccaccagaacggtaacttcctcgttgtcctcgtaagcagcctcaatgaccttggactcaatggtcagcttaacatttgcagcatcgagcaggttagaggtctgcatctcaaaggcctgcgttacagtaacatctacagtcgtcttcttttctttcgaagcgcccgcagccttctgcagttctgcatcagaagtgatgtcctgcaggactttctcaacctgagcggtatcctccttggcagtgaccttcacatcgctgataatgcccagaacaccggtgacggtagcagaaccgctggccttgacctcatctgccacagtcttgctgggcgttgctgccagaacagacacacccatgcccacgaccatagcagcggtcagaacagcgctgataactttcttcataatgaagatctcctttcacttcaagccgcacccccccaagatgctgctttctatcgcaaatgcttttcaacatttacatcattcttcaacaggcttccagaacagcgtcagaaccgctttctggacggaagcttcggtcggatagaactcggtgaatccgtcctctgccaccttgtgctcgccctccagtgcaatggcaggttccacagtatcatcctttgcggcccacacctcattgaccagctgaccctttgcaaggtcggtgaccagataaggctgcagcgcatcgtacacctgtgcggtgaactgctgatcctgctgtaccctgctttccagctgtgcggaaagctgtgcaagatactcctcctgccgcaccatgcgggcttcgttggtaccctcgccaatatccatgcgcctgcgcacaaagatctcggcctgattgccatgcagtgtcagggttgttccccttgtcatggccgggtctgctgcggagaaatcatcctccagcgtcacggtcacaccgcctgccagatcgttcagcaccgagatgccgtccagactcatagccagatagaaatcaatgttttccccctgcagcaggcgggacaccgcatcacgggcatagccgcagctttcctccttgccatcgccaaagccatgggcaaggctgatctgcatctgagtggtgcccaccggattgcccagcatgcccagcaccgtaacctctgccatggtgtcgcggtcgatcttgagctgacggacagtcttgtctttgctgtctatcacaatgagccgctgaaaatccgcctgaccgccctgataagagccttctgcttccacctcgctgtcatggtcgatgcccataacaaggatggtggtcaggtctgtgcgcctgcggtaggtcacgccgtccacttccatggtctcagcggtctcctgcggcagctccgtccgggtctccggcttttggctgcgcttttccagccagcttccgcccacaaaaagcagtacagctgccagcaccagcacagccagcgcagcagcggcaccacgatgttgtttttgtctgttcaagcgggtaagcttccctcttttcttcggaatatagttttctgcgggaaggtctttccattgccacagaaagatattccttggtctattatatcgtcacaggtgtgcaactgtcaatgtattttcgttattttccggcaggaaatttcgcattttcagcctttagggagccacagataaacacaaaccccggccatgcagagttcatccgcacagccggggccaattggtattttatttgatatccagttcaggcggcacatcgatctggtccgagacatacttgccgttctttttgcgctgccgcacgcactccgtcagcagatattcgatctgcccgttcaccgagcggaagtcatcttcggcccaggcggcaagggcatcgtagagcttcgcgttcaggcgcaggggcacctgcttttttggttctgccatcagtacaggctgccgctgttcacgatgggctgggcatcacggttgccgcacagcaccaccagcaggttggagaccattgccgccttgcgctcgtcgtccagctccactaccttgttctcattcaggcgttcaagggccatttccaccatgcccacagcaccgtccacgatcatcttgcgggcatcgatgatggcgcttgcctgctggcgctgcagcatcacggctgcgatctccggcgcataggccagataggtgatgcgggcttccactacctcgatgccggcctcggctacattcttctggatctcgtcccggatgcgggcggctaccacctccgaggagccgcgcagactgccctcatcggctacgccgtcgccggtggtatccacattgggagccacatcataggggtaaatgcgcaccacattgcgcagagcgctgtcgcactgcagggagaggtactccttgtagttgtccacattgaatacggcctttgcggtatcggtcacgcgccagatgaccgcaatgccgatctccaccgggttgcccagacaatcgttgatcttctggcgggagttgttgagggtcatcattttgagcgagatcttcttgctggtcgattctgcggtctgggaactgctgttacctgccttaagcagggccgccatgccggtttcgccgctgttcacatcgccgctctggctcagtttggtgccagctgccgggttcaccgcggtgcagaaggggttcacccagtaaaacccctgtcccttcagggtgccgatgtaatcgccgaacagggtgagcaccagtgcttcctggggctttaacaccttcaggccgcagagcaggaagatgcccgccacccagtatgcgatggacaggatcgtgagcaggatgcccggaaacaggctttcgtccagcagaatgatgctgtagaaaaacagcaggacggtaacagcatagcccagcagggtgagcagcagcatgaccatgccgttctttttggtctgcagaattttctcttccataacagtttccctccttcacagggtgcggaagtatttctttatgatatcaaaatcatatcactatatatcattcttgtcaagtcctccgcaggcaaaaaaagagccgccgcacaaacactgtgcagcagctcctttttgtttatctttttataatgtaaggggcacttgctctcaggcgaaggtcagcaccaccttgccagcgccgctgttgcggtctgcaagggtatcgaatgccttctggaagtcctctgccttgaacacatgcgtggtgatctcatcgacctctttcaggtggtcaggcaggatcttgaccacctcggggaacttctgatactgatgacgggtccccagaatggtcagttcctttgcattgatctccttgaagttcacggggatcggctccttgccaaaggtcatagccaccagacggcctgcgggagaaagctggctggttgcatgtgccagcagtgcgggaacgcctgcggcctcaaagatcacgttgacaccctcgccgtcggtcagtttgttgatgaacgcatccagatcttccttcatcgggttgatgctgtaatctgcgccaaagtcctttgccatggcaaggcggctctcgttcggctcagacacgatcacggtagcgccgcgtgattttgcaatgttggcaacgatcaggccgatggggccgccgccgtgcaccagcaccacatcgccggggcgcacatcgccgcgccagtttgcctgcaggccaatcgtgaacggctcgcacagagcagcctgctgataagtcatcttggaagcatcgtactcatacacctggctgcgcggcatgaccacatattcctgaaaaatgccgtccacgatgcagcccagaaccttcagttcacggcagacattgtggtggccgcagcggcaggcatagcacttgccgcagtaggtgatcggctcaaacacaacacttgcgccgggcttcaggtcggtaacaccctcgcccactgcgatcacctcaccggaaccctcgtggccaagcaccacaggatactttgcatacgggttgctgccatgatagacatgcacatccgagccgcagatgccggcagcgtgcaccttgacgagcacctgattcggctccttgatctcaggcatgggacgctccaccagctgcatatcaccagggccatttacaacaattgctttcataatcatgttcccctttccaaagcttcagatacccgggcaggacaggaaaccgccatccacggcaatgacctggcctgtgatgtagccagacatttccggatcagcaaagaaccgcagtgcacccaccagttccttcgggtcgccaaggcggcccatcggggtgcggtggatcacgttccagtagcgctgggtgtaggaaccatccgggttcacatacatgtcatggttcagcggcgtgaggaagtagccgggtgcgaccgcattcacacgcaccttgcctgccgtgttggacaggtagttggacagccacttggtaaacatatccacagcggccttgctgcttgcgtatgcaggcaccatgctcagtgcatcgtaggctgccatggaggtaatgttaatgatggagcagccatcgcggcccaccatgttcactgcaaacacctgacatgccatcacagtgcccagccagttcacatccatgacgcgcagcagcttatcgctgtcgatgttgaacagggtacgggacgaagccagaacgcgggccttttccgcggccagatctgctgcctgcggatctaccttgacgacctctgttgccttttcgtcgcctgcggcataagcttccgaggtggtttttgccagcgggtcctgaatgcctgcgcagttgatcagcacttcatagctgccaaagtgctgcaccacagcatcgcgggccttttccagcgaagctttgtccgtaacatccacctggaatgctgcggcatcgccgccagcctgttcgatctcgcaggccaccttctggcctgcctgaatgttaaaatcaagaatcgctacccggtatccggtctttgcaaactccttggcaaaaatgctgccgaggccgcctccggcaccggtaatcactacagtacggctcattgtaagttcctccaatcaatcatacagttatctcaatcatacagttatcaggcaaacaggctggggatccacagggtgatcggctcacagaaggagaccagcatcagcacaatcaggctggtgatcaggaacggcatatttgccttgaaggctttccagctggaaacgccgccgatctgggcaccggtgcagatgcacatgccaacgggaggcgtggtcaggccgatcatcaggttcagaatggccatcagagcaaagtggaccgggttcatgccaacagccgttgccaccggcagcagcacagggaaggtgatcaggatcgccgccagactttccatgaacatgcccacaaagatcagcacgaggttgatcagcaggataacgaggatgcggttcgtggtcatgctcaggatcgcggtagcaaccttctgcgggatgcgctcgttggtcaggatgaatgcgaacacgtttgccagaccaatcaggatgatgatggaagagcaggagcgcatattggtgtaaacgatgcggggcacatccgagagcttgatctctttatagacgaacacgcccacaatcagggagtaaacgcaggtcacgatggaagcttcggtgggggtaaagataccggaaaggatgccgcccagcaggataacgggcatcagcagcgcccagatagcatctttggtaacttccaagcgcttcttccagctggaacgctcgtgcttggggtagtggcgcttgaccgagatgatgtaggtgggtacacacagtgccagacccagcaggacaccggggatgatgcctgcctggaacatcttgccaaccgagatgctcacgcaggaaccggcaatgaccatgggcacactgggcgggatgatggggccgaccacagaggaagcagccgtaactgcaaccgagaagtcgtcgtcgtagccgtcctccaccatggcggggatcagcataccgcccagagagcacacgtccgcaatggccgtaccggaaatgccggcaaagaccatggatgctacgatgttcaccagcgcaaggctgccagtgaagtgacccaggaaggcgttgcagaagttcaggatgcggcgggtgataccgccgccgttcatcaaagcaccagccagcatgaagccggggatgcacagcagggtgaacgagtcgatgcctgcatagaatttctgtgccaggaccgccgcgttcatattggaggtcagcaggtagaacagcgaagaagcacccagagagaacgcaatgggcacgtttagcagcagcaggaccagaaacagaataaacatgccaccgatcattgtgctttgtccccctttctgatcagatttacttcattgatcgcatccagcactacgtaaattgcagtcaggataaaaatgaccagtggcaccatatagaagatgcccaggttgatctgcagagaggtggaaagcgactttgtgccaacacggaaataggtccgtgcctgcgggatgccaaagaggcacacgatcaggatggccgcatccgaaacaaggttcaggatgtgacggccggtgccatgtgtttgggctgcgatcacatcgatggatgcgtactcatggtacttgatggccatggggcaggcaatcatgatcgtatactggaaaaacaggcgtgtcatctcgtctgtccagggagcggtgactcccggaatatagcgggcaaggatctgcaccaacacgcagactgtgacgcacccaaagccgatggctgccagatagtgaaacagcctatccagcacgtccaaaactttcttcattctggatattcctccgtactcaggtgtgtattttccaaatcaagccgcgccgcccatcaagaacggcgcggccactattggagaacgatcagatgaaaatgtactttttaaaagggtctgtttagctgttggacagatcgtagattgcctgataggtggtccacaaatcgcccggctggctcttcaggaactcctcgatggcgggcatcatggcgttcttgatgtcgtcgcggtcaacgtcctcgttcacctgcataccggtttccttcagcttttcgaggtactcgtccttgtgagcgaagtagtactcgttggtccaatcctgcatctcgttggaggtctcagtgataatgttctgctgatcctcggacaggccgttccagatatccacgctgagcaggttgaagatggtggagtacacgtggttggtctggttcacgtacttctgcacttcgtagaagctgttatcgtagatcatatcgtaggggttttcctgcatttccacaacgccctggctcagtgcgttgaaggtctcgctcagtgcgatggcagaggtgatggcacctgcggcagtccacatgctgttatgcagaacattgccgctcatacgcatcttgcggccctgcagatcagaagccttgttgatgggcacattggaggtcagctcacggggaccacgcagctgataccacagcaccttgaagcctgcatcctcgaagtcctgcatgatgcccttgccgatgtcgctctcgcacatggcctgaacgtcttcctcagagttgtaagcccagggagcctccagcagggtggcgctgggtgcgtagccgttgaaggagccgccggacatggtcatggaagtggtgccgaccagcataccggccagagagtccgcctcggaaccggaggtgctggaggggtagatctcaacggtcatgctgccgccggacttctcctcgatgcggttcttgaactcggtagctgcaaggccccagggatgctccagagaaacggtcaggtcgaacttgagcaccacagaagcgttgcttgcggttgctgcgggagcagcagtggaagctgcggaagaggtggaagctgcagtggagctgctggaaccgccgcatgcggtcaaggctgcggtagcagctgctgcgccaacaacggtcagaaagctacggcgagaaatcttttccatggtaaatttcctccttgattcgtgtgttctcgttctttttattttaggtgcctttccccggcacaaaaatcggtcttatcagaaagtgcggatgcggtcgatgcaggttgcgtaatcatcctgctggaagaacagctcctgcttgccgagcacgaagccttccacattgcagttatggtacaggtcggcgatcacctcgcgggtagcaccgccatccagcatcaggtggtagttcaggcctttttccttgcggtagttatccagctcaatgaatttctggcgcgtgtaaggcatgaattcgcggcctgcaaagcctgggttcacagccatgatcatgacgtaatcggtgatgggcagcatgtccttcaccgtctcaaggctggtgcaggggttcaggatcaggcccgtctttttgccttccagctggatcagctccagcgtagcggaggggatcagctcagattcaggatgaatgtagatgatatcggcaccggcttctgcgatcctcttgatgtagcggtgcgggttcatgaccatcatgtggcagtcaaccagcttgtgatggcccgcgtcggtgatgcggcggatcatttccagctcacgcaccgacatgccgaagttcggtacaaaggtgccatccatgatgtccacatggtagatgtccatgtccgttgcatccagcttttcgatctcttcccgcatgttgtctgtggaaagattgaggatcgacgggcaaaggatctttttttgcaaggtatccattttgtaaagtcctccatgttttatacttgtttatccgttcaatctttgcggttctcgcaaattgtatactagttttctgtgccatcatcatagcatatcctcatctcaaaaacaatacttttcatacaattttaccgattccacaaatttttatggttattttatgcacattctacagtctttccgtccatttctcgcgttttagctctccatacaatctagtatacatcatcggaatcttgtattctttctaccatttacagctttttccactttttgaccagtatttatcctgaaatcttgatattttatatattgttattttttagattttaaagtatactagtttcaagagatatcgaaacctgctttaaccttctttgaaaggacatcatttatgtcaaattctctccctgccgatatgctcactgctaccgaccagatctatctgagcctgtggaaccagatctgcagtctggatctgctccccggcgaaaagctcagcgaggtgcgccttgctgccgagtttgaatgcagccgtgttcccgtgcgtgaagcactacatcgcctggctgctgatggtgctgtggatgtgttccccaaaaggggaagctttgtcagcctgatcgaccgccagcaggtggagcagacccgctacctgcgcgaagttctggaaacccatgtctgtctggaagcgttcgattccggcgcacttactgcgatctatccttatctgtgctccattgtggaacagcagcggaccgcccgcgcaatggatgacattgcaaccgtgttccgtctggatgaagatttccaccatatcttctattcgctggcccaccgggagttcgtgctggagcataccggtccacagaatgtacattatcgccgggcacgtctgctctccatccatcatgaggcaaaagaaacgatcattgagcagcacacggatattctggaagcgatccgcgccaacgaccgtgagcgcctgcaaaatgcgatctttacccacctgaacaacgtgaacgtggtcatgcaaggccccaacatgggcgaccatgctctctatttcaatcccccttatgaggtatccaaatgacacaaaatacaattacactgatcgttctggccgtccttgttgttttttccctgccggctttgtaccgaaaaaagaaaagcggtgatctgaccctgtggggtaagggacgcaacattctggggcagctgccctcggaagaagctgcttgtgcagcggtgtcttcctcttcccgcaacggttcccagaaagacattctgcagtttgtttcctctctgatgaagctggtgcgcaaaaatcactggtacatcgtcatgcccggccagctttcggacggcacgaccaaaaccaatctttcgctcgtgctcatcacgcagcatcgtgtcatcggcctgaaatgttatggttatggcggtgcccttaccaataacggaaaagccgccgactggacacagaagctggataagacgaccaaggcgatccactctcccctgccggatcagaccgcgcagcaggcagctcttgcgtctcttctgccccagctgaatgcatctcaggtcgaggtcttttccgtttttaccacaccgggcgtgcagctgatcaactgcagcggcctgaactgcttcacttccgtttccctgctggaaaagctgcaaagctcttccgcggactgcaccggccctcttcagccgaaggagctgggcactgcactggaagccatgaagccggacccgcccgccaaaagcagacaataacaacctcccatatgtgcggttgccgtacaagcaaaaacaccctcacagcttttccatttcagctgtaagggtgtttttgttttgctttttattataacccgttcacgatattttccggccgctgtccgctttgcaccgcccggatcgccgcggcgatcatgcggcaggctgagcagcggattttccgttgtgaccggttccggcgcaatggtgtccagtccggctccggcgatcttgccgctgcacagggctttggcaagggcggcgctggccacaaggtcgccgcgggcagtgttgacgatgaatgcaccgtccttcatgcccgccagaaaacctgcgtccaccatgttcacggtctgaggtgtgaccgccagatgcaggctgaggatatcgctgcatttctgtatcgtttcaagagctgcatattccgcatggcaggcttcctcggtggcgctgtcggcccg

SEQ ID NO: 1110 - DNA, 9132 bp, Unknown
  gut microbiota DNA sequence
cattgccgaggtgacgcctgcctacgtgatggtgctggtggacagcgccgagcgtccggaggatatcgacaagaaccgtgccgaggctgcccgcatccgtgccgaggagcgtttgcagcatcagcagagcatgcatgaatattatcagagcaagatcgcgctcgaccgtgcgatgcagcgcctgcaggccgctgcaaagtaccggcgctgagaatgagccgcatctgccaggaccagatctgaaaaaagagcatcatttgtatccggtgagggtgcaaagtgatgctcttttttgtttcaggctgttccatggaacgcagctttcgtgtataataaagtcaatgcaaccccgcgtgttgtgcgggaaaggaggaggttttccatgatccaattcggcctgcgtctgcatgacgcggaaaagctgcccgttgaacaggtgctgccgctggtgcgccggaaaggctttacctgcgcccatgtggctctgagcaaatccttcaaggagctgccctgcacccccagcgccctgacccccggctatgcgctgtatctgcggcatctgtttgagaaaaacggcatcgatattgccgtgctgggcaactacctgaaccttgcccacccggatgcggatgccctgcacgccattcaggaaaaatactatgcgcacatccgctttgcaagcctgctgggctgcggcatggtgggcaccgagaccggtgcgcccaacgcggagtacaaattctgtccggagtgccgcagcgatgcagccctttctacctttatcaagaacttcaagccggtggtgcgctgcgccgagcagtacggcgtgaccattgccattgagccggtggtcaagcacatcgtgtacgatgccagacgcgcccgcaccgtgctggacgagatcggcagcccgaacctgcagatcctgttcgaccccgtcaacctgctgaacatggaaaatgtggaccgccgcgaagaagtgttcgccgaggccatcgagcttctgggcaaggacatcgccatgatccactttaaggatttcctgcgcaaggatgcgggcggccagctggctgctacgggtgcaggacagggcggtatggaggactaccgcaccatcctgcgctttgcaaagcaggaaaagccctatatctttgcaacgctggagaacaccaccccggaaaacgcggtggaatgcctgaactacctgaaaaagcagtacgacgagtgctgaacactttataacaagaaaaacatctgcaagctttgcccggaatggggcagcttgcagatgttttttgtatcagatgaagtttatggttcggccttttacaaattgcaattaagaagtagtttcgctgaaaatgcccagagcgaaagcggaggacattaagatcattccagatccagcttatgctccatcagccagcgggtcagcagaaagtaccctgcggcaaaggcgatgctgaccgccagcccgaacagggtggtgaacgcactgggcgcagcgatggaaacatctacaccgccaagggtgggatcggaaacagcctgcagcatgtcggcactgctgacaccggagctcagccagttctgcaggaaggacagcaggaaaaatgccagaataccggccgggaccatgtgctttttgaactggtggccgatcatgcatgcggcatagatgcacaggatgctggacaccagtgccaccagcccgttcagcgtttcaaagatcagccagagccacccggagctgccggtcatgcggaagatctctaccactttctgccacagctccggcagctgctgcagggccgcgctgttcagagacagagccagcagcatcaccgcaaaggagaaaatacccacgatgctgctgcaaagcatccaaactacgctggagatcagcttggaaaggatgagctggctttccgtcaccggcagggtgtgcatcaggtagccttcgcggcccagcagattgcgggtgaagcgggtgacaatggtcatcacggacaccactgccaccgcaacggctacgaccatgtaggcgaacagcagcagagatgcaaagttgtccttggaagagctgcgcagggaaaagccgctcagcactgccagcgcaacaagggccagatacagcccgccgtaggtgcggccggtggccttgaattcatattttaacagctgtttcagcatttgaatacctcccggaaatatgcatccacgctcatgccctcggtctcgcgcagctcttcggcattgcggtgggcgaacacccggccatccttcaaaaagacggcttcgtccagaatgggctcgatatcgccgatgaggtgggtggatagaatgacggtcgcatcccggctgtagttgttcaggatggtgctcaggatgtagtcccgggcggcagggtccacgccgccaatgggctcatccagcaggtagagctttgcggcgcggctcatggccaggatcagctgcaccttttccttgctgcccttggagagggtcttgagccgcgccttcggttccagttccagccgggccagcatttcgttcgccttggcggggtcaaaatcggcataaaattcgtggaacatttccaccagctgttccacacgcatccagtccggcagccagtcagcgtccggcagataggacacgatggctttggtgtccggcccgggggtcatgccggcgatccggatgctgcctgcactgggctgcagcaaaccgttcgccagcttgatgagggtggtcttgccgctgccgttggggccaagcagccccacgatgcggccaaagccgatgtgcaggtctacattttccagtgcagtcttatccttctggtagcacttggtcagtgcttcacagctcaaaagctcattcattgcggtcctcctttgcgtcccagtgttccaaaagcgcggccgcctgtgcgggactgtagccgatgccgcgcatcttttccagaaaatccgacgccagcgtccgggcggtgtcggcgcgaagctgttcaatcaatgcagtatcctccgtaacatagcggcctgcggtgcgttcggtgtgcaccagaccctccgtttccagctgggcaagggcccgctgcatcgtgtttgggttcaccccggcggctgcggccagatcccgtaccgaatccagatgcccgcccggtgggtaggtgccggccaggatccgggccttgagccgttccacaagctgggcatagatcgggcggctggcatcaaactgttcgcccatggtatcatctccttgtcttgctgtattaagcgcttgatacaataatacacgatttgctctgtttgtcaagggaaaaaagaaaaaacaccataaaactgcgggaaattggaaaaaagtacccataaaacactgcacatagatgaaaatttacaataaattcaaacaatttcacattgcaaagcttttgacaatgtgctatgctgaaaaacagagagctccgcccggaaagcggcggaaaagagatttggaggaaaaataactatggctgaccgcatcgttctgaataccatctcctaccatggccacggtgccattgagaacatcgttcccgaactgaccgcccgcggctacaagaaggcattcgtctgctccgaccccgacctgatcaagttcggcgtcaccaagaaggtcaccgatctgctggaagctgcaaactttgcctatgctgtttacagcgagatcaagcccaaccccaccatcgccaacgtgcaggacggcgtggccgctttcaaggccgccgaggctgactgcatcgtgaccatcggcggcggctcctccatggataccgcaaaggccatcggcatcatcatcaacaaccccgagtttgcggatgttcgctctctggaaggtgttgctcccaccaagaagcacgcggtgttcaccatcgctgttcccaccactgccggcactgctgccgaggtcaccatcaactacgtcatcaccgatgtggacaagaagcgcaagttcgtctgcgtggataccaacgatatccccgagatcgccgtggtcgatcccgatatgatgtcctccatgcccaagggcttgaccgccgccaccggcatggacgctctgacccacgccatcgagggctacatcaccaagggtcactgcgtcatctccgatatgttccatctggaagccatcaagctcatcagccagagcctgcgcggcgcagtgcagaacaccccggaaggccgcgagggcatggctctgggccagtacatcgccggcatgggcttctccaatgtgggtctgggcatcgtccactccatggcacacggcctgtccgctctgtatgacaccccgcacggtgtggcctgcgctatcctgctgccggtgggtctggagtacaacaagagcgttgccggtgagcgctaccgcgccgtgggcaaggccatgggcgttatgggcatcgacgagatgaacgatgtggaagccgctgacgccaccatcgccgccgtcaagcagctgagcgcagacgtgggcatccccacaaatctgcacggcatcctgaaggaagaggatatccagttcctcgccgagtccgcatttgcggatgcctgccgtcccggcaatccccgcgacaccagcgtggaggagatcgtggagctgtataagagccagctgtgattccgctctgtaaattcaagctgtaattttgggccctgctgtccttcgggatggcagggcctttttctaagatgtatctgaaaacaaagcaacaggctggatcttcgtcttttcagagatgcccggagagcctgccgcgtcgcagagtgacaaaatttctgcacggctcttgtacacagcgcccaaaacgggtacaatcaatgcagtaagaaaaaactggaagcgaaaggaaccttatgacgctgaacttctatactctgggtgttatttatctagtatattcctttctgggctgggtggctgagacggtagtcgcgaccatccggggcggaaggtttgccaaccgcggtgcggcggcaggcccgttctgctttatctacggtaccaccggcgtgctgctggccgtgagtttcggcgacctgcgcaccgagccggtctacctgttctttgcctgcatgatggcggcaacggtgatggaatggatcaccgccaaactgctggaacgcctgcaccgccgcaagtggtgggactattccggcaaaaaattcaatctgaacggctatgtgtgcctgcagtattcgctgctgtggggtgcgctgggcacggcaagtgtgctgtggggcaataatgtgctgctgcggctgtgcgcgcagatccctgtctggctgctgcgcccggcagtatgggtctcgctgacggtggcggtactggaccagatcggttcggcggtgctggtgcagcagtatgcggcccggcacccgatgctggagcagctcaaccagagactgggggagcggtcggatacgctgcgccgcaggatcgcgctttacattgaaaaacgcatccagtatgcttacccggctgcggcccggcaggagcagactgcgctccggaagggggaaaagaacttcctcagcgtgtccgatctgctgtggctgttcgtgatcggcgcgtttctgggcgacatggtggagacggtgttctgccgcgtgaccgccggggtctggatgagccgctccagtctggtctgggggccgttcagcgtggtgtggggtctggcgctggtgctggcaacggtgctgctgcgtcaggaaaaggaccggagcgaccgctacctgttcgcctttggcaccgtcatgggcggtgtgtacgaatacgtgtgcagcgccgtcaccgagctgctgttcggcaccgtgttctgggactacagcaagttcaagttcaatctgggcgggcgcatcaacctgctgtactgctttttctggggcattgcggcggtggtatggatgcgctacggatatccgctggtgctcagaggcatgaagaaggtgcgcagccgcgtccgcccatggatgaccgtcctgctggccgtattcatggcggtgaacatgctcaccagtgcgctggcgctggcccgctacgatgcccgcaccagcggtgaagcgcccaaaagcagcatcgatacgctgctggatgcgcattttgacgatgcccgcatggagcgtatttatcccaatgcgaagaaagtagccaaggccggatgaaatttcaacgctcctcttgcactttggtgcaaaaaccggtataatatttttcggataaaagggagtaaagggcgctcgttttgcaaaaacggtgcgctgtggcgcagcgacatcccggcagaaatgcccgctgtgtcaccggaagcttgagacttttattacactttcccgtttttgggcaggatgtaataaaggtctcttttttattgctgctctgccaaaaacaaaaggagaaaactatgctcattcctgttttgctgttcatcgtgggcctgctgtgcctcatcaagggcggtgactggttcgtggatggtgccacgggcattgcccgccgcttccatgtgccggagctgctcatcggtgccaccgtggtgtccatcggcaccaccctgccggaggtgatggtctccaccacctcggctctcaccggccacggcgagatcgcctacggcaacgccatcggttcgatcatctgcaatgcatcgctcattgcggccctcaccattgcggtaaagccgggcaaggtagaccccaagagcctgcgcacgccggtgctgttcttctttgtggcagcggccttctatgccggtgtggcctacaccaccggctacttctcccgcccggtgggcctgatccttctggccatgttcgtagcgtatatcatctgcaacgtgatggccatgaagaacgcccccgccccggaagaagaggaagaaccggaagaaaatgcatcctttgccaaggagctgggtctgctggccgtgggcgctgtgctcattgccgtaggtgccaacctgctggtggacaacggtaccctgatcgcacaggcactgggcgtgccggagtcggtgatcgcgctcacctttgtggcactgggcacctcgctgccggagctggtcacggccatcacctcgctggcaaagggccacggtgcactttcgctgggcaatgtcattggtgcaaacgtgttcaatctggtgctggtgagcggtgtttccgccgcggtggcaccctttaccatcccgcagaactccctgctcttcggccacaatgcatcgctggtgctggagttcccggtcatgttcgccgtgatgctgctgctcaccctgcccgctctcttcaagggcaagctgagccgcccgcagggcattgcgctgctgtgcatctacgcggcattctgtgtggtgcagttcaccatctgataaaacagcaaaaggccgacgcagcactgcgtcggccttttgccgttttaagggttattttttcaaatgggaatcccagccggaagaggtgatgacctgctgatccggtgtgcaccacatggcttccacgccgtccagactttccacgatcttcatcccgtcctccagcggctggcagaacaggccggtggtcaggcagtcggcaaggccggagtcgctgcacagcacggtcacgccgttaaagtaggcggcggggaacagggtgtccgggtcgatcaggtggtgatagcgcttgccgtccaccacatagtagcgctggtagtcgccgctggtcacaagggccatatcgctcatgttgatggcaccgtccagcatggaatccgaggtgtatacatccgaagagctccacgggttttccacgccgccggtccactggctgccgtccggttttacaccaatggcgcgcaggttgccgcccacgctcaccagagcgctggtcaggccgcgggcctcggcagcctgacacaccatttccacggcgtagcccttgcccacgctgcccacatccagcagcatttccgggtcggccagataaacggtcttggcatccgcgtcgatgatcacgttgttgatatcacagtgctgggcggctgcttccagctcttccatggtgggcagcttgttgtcggcatccgtctcggcggcttcggcagcttcgcggtaattgtgccagatattcagcacgctgcccatggcaatgttcagcttgccgttggtggtctggtacatctggtcggccagctccagcatggagaggatgcggtcgtccacctccaccggagcgctgccggcattgtcgttgatggtcttgacgttggtcacgccggggtaatcgttgtagatatcatacagctggttataggtaataaggtctgcgtgcagggcatccatctgggtgttgaattcttcctcgctctcgcagtaggcgatcacctgcgttacggtatcgaacacatcataaaaaacggtggaatagcgggtaagctctttctttttggaggcacagcctgccagcaggctcaggcagagcaccccggccagcagggcgctgacgaaacgttttgcgcgggtcttcatacggtgtggttctcctttgcggcggtaaaggcggcgtgctcctcctgcaggtgggccagcagatcgccgaacacccaattgcggttggagggagtcacaacggccttgagcggaatggtgacctgtgcctgcttcatcagatccagcagggtgtccacatccttctccttgaagttggccagaaccactgccggcgggtaggcacccggctccagcaccagcgtgcgggcggccttggtctccacctcgcccagcagctgggccacggtcttgcccgcatcggcaggggagacgagcagcaccttcatgccaaaagcaggagccatgccttccagcttgccgcggtcggcgggggaaaggttccagcccagaaccagcgggacaccggcgttctggttgcgtgcgatatgtgctttcataaaaaaacctcatttcagggtggattgcaaatacactatagtataacacaaatacgcaaaaaatggaatgccggggggccggtactaccgggaaaagtttcagagaatttcgagcaaaggcaacaaaaattagaagaaattacaaggcaaatttcagtgcag

SEQ ID NO: 1111 - DNA, 64713 bp, Unknown
  gut microbiota DNA sequence
aaaagcaaaccagccaagcccgcaggcttggctggtttgcaatataaaaaataatatttcattattttatgcccagagcaaagcggagggcatttaaaatcgtttccttccccttgacattcactttgactgctgtataatatgtatgctatcaaacagttttatttgaaactgttcaatgccaaaacaaccatgaaggacaaaaccatgatgtgtgacgaaaccaaaaacgagtgctgcaatcacgccgatcccccttgggaaggcccacaggtcatcccggcgcagatccgccgggtggacaacctgatcttccgcaagatcaaccagtttgcccgcgaaaatgacgtggagcaggccacccccatgcacgggtggatcattgggtatctctaccgccaccgggacacccccgtgttccagcgggacattgagcgggagttctctatcacccgctccaccgtgaccaacatcctgcagttgatggagcgcaaggggtatatcgagcggcgcagtgttccgcaggacgcccggctcaagcagctggtactcaccgaagagggcatctgcttccacgaaaagacgatgctctgcttccaccagaccgacgactatgtggccggactgctgacagcggaggaaaataccgagctgctgcggcttttaaacaagctgcgggatgcactgcagtgatgcaacctgccgaaaaagtgttcgttaaattagtaattatgaacattttttgaaacgtcttgacaattaaaatgttttgtataaaattgttctgtaccaaacaaataaaaagtaacaggaggtaactcagatgatcaaaaagttagtgtcgcatctgggcgagtataaacgcgccgcagtcctgacaccgctctttgccgctctggaagccgtgatggatgtgcttttgcccaccatcatggcctttatcatcgatcagggcattgaaaagggcgatatgaacgccatcctcaagtacggcctgctcacctttctggtggctgtggtcgcgctggcgctgggcgttctggccggcaaatacgccgccgaggcatccaccggctttgccggaaatctgcgcgatgctatgtatgagaacatccagcattattctttttccaacattgataaattctccaccgcaggccttgtcacccgcatgaccaccgacgtgaccaacgtacagaacgcattccagatgatcgagcgcatgtgcgtgcgcgccccggtgcatctggtgttcgccctgttcatggccttgatgatcggcggcccgctgtcactgatcttcgtggtggctgtggtctttctggtggcggtgctggcaggcatcatggtgcccaccttccacatctttgaccgggtgttcaaaaactacgatgccctgaacgcttccgtgcaggaaaacgtctccgccatccgcgtagtgaagagcttcgtgcgcgagggctttgaaaacgagaagtacaccaaagcctgccagagcctgtacgaccagtttgtgaacgccgagagccgtctgagcttcaataaccctgccatgctcaccgccgtttacggctgcaacatcgccctgagctggctgggtgccaagtacgttctgcatggtgccatcaccaccggccagctgaacgctctgttcggctacatcatgaacatcctcatggccctgatgatgctgagcatggcctttgtcatgatctccatgtctgccgcttccgcaaagcgtattgtggaagtgctggacgagaccaccgacctgccccccgcaaagcagccggtgcagcaggtgaaggacggcggcatcgagttcgagcatgtcaccttcaagtataagcacggcagcggccagccggtgctgaatgatatcaccttcagcatcaagcccggtgagaccttaggtatcatcggcggcactggcagcgcaaaatccagccttgtgcagctgatcccccgcctgtatgatgccgggaccggcaccgtgaaggtgggcggcgtggatgtgcgcgactacaacctcgacgtgctgcgccgcgaggtgtccatggtgctgcagaagaacgtgctgttcagcggcaccattctcgataacctgcgctggggcgacgagaacgccagcgaggaagagtgcatccgtgtggcaaagcttgcctgcgcggatgagttcatcgagcgcttcccggacaaatacaatacatggatcgagcagggcggctccaacgtgtccggcggccagaagcagcgcctgaccatcgcccgcgccctgctgcgcaagcccaaggttctgattttggacgactccaccagcgccgtggataccgctaccgatgccaagatccgcaaggcattccgggaggagatccccggcaccaccaagatcatcattgcacagcgcatttcctcggtgcaggacgccgaccgcatccttgtgctggataacggtaagatcgatggtctgggcacccacgaagagctgctcaagaccaacgccatctatcaggaagtttacaacagccagacccagggcggcggcgactttgacaaacagggaggtgaacagtaatggctcaggcaaaagaagttcgcggccccggcccccgcatgggcggcccccggcccaaagtggaaaacccgggcaagctgctgaagcgcatcatggatgaggtattccggcactatctgccccattgcatccttgtgcttgtctgcatcgtggtcagtgcactggcaaacgtacaggccagtctgtttttaaagactctgatggatgattacatcgtacccatgacccagcagcaggatccggattttgccccgctggctgcggctctgctgcgggtaggcatcatctacgtcattggcattctggcagcgtggggcaacgcccgcattatggtcaacgtgacgcagggcaccctgcgcaacctgcgcacccagctgttcacccacatggagagcctgcccatcaagtattttgaccagcatccccatggcgacatcatgtccgtgtacaccaacgacgtggataccctgcgccagatgctcagccagagcatcccgcagctggtgtccagcgccattaccattgtttcggtgttcttcagcatgtgcatgctcagctggcagctgacgatcgttaccatgctgatggtggcgctgatgatgttctgctccaaaaagatcacccagcagtccggcaaatacttcatccagcagcagcgggatctgggcaagttgaacggctacatcgaagaaatgatggaaggccagaaggtcgtcaaggtgttcacccacgaacagaaagcgctggccggtttccgccagctgaacgaccagctgaaggacagcgccaacaaagccaacagctttgccaacatcatgatgccggtcaacgcccagctgggcaacatcagctatgccgtctgcgcgctggcaggcgcagccatggccgtgagcggcatgggcggcacgacccttggcacggtggtggctttcctgagcctgaacaagggcttcaacatgcccatcagtcaggtgtccatgcaggccaacagcatcatcatggctctggccggtgccgagcgtatcttcaagatgatggacgaagagagcgagaccgacgagggctatgtcacgctggtcaacgccaagtatgaccgcgacgataaccttgtggaagccaccgagcgcaccggcatctgggcatggaagcacccgcaccacgacggcactaccacctaccacaagctggaaggcagcatcacctttaccgatgtagactttggctatgtgccggaaaaaaccgtcctgcacgatatcaatctgtatggccgtccgggccagaagatcgcctttgtcggctctaccggtgccggtaagaccaccatcaccaacctcatcaaccggttctacgacattcaggacggcaagatccgctacgacggcatcaacatccacaagatcaaaaaggccgatctgcgccgttctctgggcatcgtgctgcaggacacccatctgttcaccggcacggtgatggagaacatccgctatggccggctggaggccaccgatgaagagtgcatcgccgccgcccgccttgccaacgcggatggcttcatcaagcgcctgccggaaggctacaacaccatgctcaccggcgatggtgccaacctctcgcagggccagcgccagctgctggccatcgcccgtgccgccgtggcagatcccccggtgctgatcctggacgaggccacctcctccatcgatacccgcaccgaagcgctggtgcagcgcggcatggacggcctgatgtacggccgcaccagctttgtcattgcgcaccgcctgtccaccgtccgcaatgcagactgcatcgtggtgctggagcagggccgcatcatcgagcgcggcagccacgacgagctgatcgctaaaaaaggcaagtattaccagctgtacaccggcaatctggccgaaaactaagctttttctgcctcctcaaaagagccgccgcaccggcacaccgccgtgcggcggctccttttctcttctccgctctggacaatcaccccctgttcgcggtatactgaaccttgaatgaattgcaggaaaacgaggtcagaacatggcatatccggaaaacgcccttacattggatatcctgccgctttcggcagacacagcccggctggtgcgggtgtacggcacagagccgtgtatcgcgctgcccggcacactgccagcaccggagggcggcagctttgctgttaccgaactgggcgactactgcttttccgaaaagccgcgcagcctgcctgcggcagacaagacctgccgctacgaggcggccccggacggcacggcgcggctgattcgggcctttgggcagacggtgggcggcacctgccgccggtatgacttcgactttgacgcgcccgctgccggttcggatgcagacgacctgcacccggtgtgtgggaactttctcgaagagctgaccctgccggacagcttacaggtcgtcggcagctgcgcattctacaactgccgcaagctgcgtctgctcaccgtgggcacgggcagcctgaccatgggcagcgatgtgtttttgaactgcttcgcgctggagaccatccgggtgcaggcaggccctgaagaacctaccggcctgtttgcccttgtgaacaacatcaccgaagcggtgcgggctgagttttgccctgccggtacagcagccccgctggcggcgctctggtatcccgcctactgggaggatatcgaggagacccccgcccacatccttcttcacaccttttccggccaaggatatcattaccggcagtgttttttagagaacaaattcctccccgcagaatacgacgcgatcttcccgcagggccacgatgccgacgatgccaatgtgatggcaatgctctgctttgaccggctgcggtatccgtggcagctgaccgaagccgccgccgggcactaccgggcatttctggcagccaacaccgaccgggtgctggcccgcctgctgaaggcgcaggacaatgatgccgtgcgtgcactcattgcgctggatgtgctggacaaagacggctttgccgaagcttcagcccttgccgccaaggccgggaacgccgctgccgccgctctgctggcggatgcggagcacaaaaagtatgttcctcagcccaaaaagcagcggtacgattttgatttttaaacagcagaaaactccttccgccgcacttcgtgcgccagctccctctgagagggagcctttggcagtaagggtaagcttccggtttcgccagaggccccatccctgagagggctggcatcgcgcagcaatgactgggggagtttgcagcgaagctgagagggttctaagtgaggtgacacttttgccccaaacgatccaaaaagaaaaattttttgacccgcgcaagccgttccagtcccagcggccggagacccacgaggagtggcaggcacgcatgggcggcgaggtgctggcggtggtgcgcagcgggctgtatctggacttccgctttctggatatggcgctcagtgccttgtcccccgccccggacgagcgctgccgggtgctggctacggacggtcaggtcctgttttatcagcccagccacctgctgcggctctatcaggacaatccaaaatatctcaaccggttgtatctgcacaccatattccactgcgtattccgacatttgtggctgaaaggccgccgggagccgcagctgtggagccttgcctgtgatatcgcagtggaaaacgttatcgacagcctgaaccgcaccagcgtcaagcgcccgctgacctatgtgcgccagaacgcctaccagcagatcaccgccgaggaaaccgtggtggcagccgcgccggtgtatcggtggctcacccggcagacccccggtgtgctgcgccagctggagcgggagttcgtgaccgacgaccaccgtctgtggccgaaggatgcgcctgaccagccccagcagatgcccacgccgctgccccagaaaacgtggcagaagatcggggagcggatgcagacagagctggacctgcgggacaaggaagcgggcgacggggccgatgccctgaagcagcaggtaaaagccgccaaccgcagccgccgcagctaccgggattttctgcgccggttctgcgtgctgcgggaggaagtaaagctggacccggacgagttcgacctgaacttctacacctacggcctttcggtgtacggaaacctgcccctcatcgagcctctggaaagccgggagagcaaaaagatcgaggagctggcccttgtcatcgacaccagctactccacctccggtgaactggtgcgggcgttccttgcggagacctacactctgctgaaaggacaggagaactttttccatcggatgaacctgcacctgatccaggccgataacgccatccggcaggatatcctgatccacaatgaggacgagctgatccacgccatgaaccactttgagctgcggggcggcggcggaacggacttccgcccggcctttgaatacgtgaaccagctgtgcgccgagaagaagttctcgaacctgcggggccttttgtacttcaccgacggcatgggcacctaccccgccaagcgcccggcctacgacaccgcttttctgtttctgggggagcggttcgacgatgccaatgtaccgccgtgggccatgaaggtggttctggatgaagaagaatttaccggtgcagcagctcgcccgcaaagcacccttgccgacgcgctggccgaagaggacgacctgtaccgtgacctgaacaattcgtgagggaatttgttatgaatatcaaacgagccaaagaagaaattgaacacaccgtaaaagcctaccttgccaaggatgctctgggcgaatacgccatcccggccatccggcagcgtcccattctgctcatggggcctccgggcattggcaagacgcaggtgatggagcaggtagcccgggagtgcggcgtggcgctggtggcctacaccatcacccaccacacccgccagagcgccgtgggtctgcccttcatccaccagcgcaattatggcggcaaagatgtctccgtgactgaatacaccatgagcgagatcattgccagcatctatgccaagatggaggccaccggcctctccgagggcattctgttcatcgacgagatcaactgtgtgtcggaaacgctggcccccaccatgctgcaatttttgcaatgcaagacctttggcaatcaggccgtgcctgcgggctgggtgatcgtggcggcaggcaacccaccggaatataacaaatctgtgcgcgactttgatatcgttacgctggaccgcgtgcgccgcatggacattgagccggacctgcccgtgtggaaggactatgcccgcgctgcccacatccacagcgccattttgagctatctggagctgcacccgcagaacttctaccagatcaacgccgatgtggacggcacccagttcgtgaccgcccgcggctgggaagatctttccaatctgctggacacctatgaaacactgggtctgcaggccgatgaagacctgatccgcgagtacatccagcacccgaagatcgcagaggacttctccgcctacctcgacctttactataagtaccgcgacgactacggcgtagaggagatcttggccggacaggcaaagcccgccgtgttcgcacggctgctgcaggcccccttcgacgagcggctttcgctggtcagcctgatccttgcaggcctcggcacccggttcacggcctcccgtcaggcagatgcagtagccgacagctgctatgcctttctgcgggagaccaaaaaagcccttgccaccgttccggaggatatcccggacggctcggcagaaatgttccaccagcagatcatggatcacgacaccgaaacacagcaaaagcgtgccgccgggctgctgagcaaagatgctctgaccacccgcctgcaagtgctggccgtgctgcgcggctgggagggcgaactgcgccgtgccaacgccgccggtacacaggaagccttcgacctgctgcgcgggcagttccagtcccttgccgatgagcgcgaaaaggcccagcagaccgccagcgccgcgctggaagccgctttcgactttatggaacaggcctttgccgaaagccaggagatggtggtgttcgtcaccgagctgacggtggacccggtgtcccacgccttcctcaccgagaacggctgcgaacgctacttcaagtacaacaaagacctgctgctggaccaccgcaaagctgctctgcagcaggagctttcagcggaacagcaccgtcatggcggggtgtgagccatgctggaaaatattctgttcagcatgaacagcaccatgccgctgttctttatcatgctgctgggctatgtgttgcaccgcaccggttttctgagcgatgcgttcgtggccggggccaacaagttcgtgttttatgtggcactgccggtgcagctgttccgcgaccttggcaaaaacgatgtccgcgccaccttcgatggccggtatgtgctgttctgctttgcggtcacactggcgtgcatccttgtgatctgggcgctggcaaagctgtttttaaagggcaccggccttgtgggcgagttcgttcaggtgtgttaccgctcgtcggctgccatcctcggctcggcttttctgcagagcatctacggcgatgccagcatgtccagcctgatgatccttggcagtgtgccgctgtataacatcatggcagtggtcattttgatgctggaagcgcccactgcgcaggctcagaccggcaatatggctgaaaagctcaaaaagagtgtgaaaggcatcctgacgaaccccatccttctgggcattgcagcgggctttgcgtggagcatgctgcacatttccatgcctgccatgctggataaggccctttccaatgtggccggtctgaccagccctctggccctgcttgccattggtgcaggcttcaagggcaaaaaagctctgggatacctcaagcctaccgctgtggctactgtggtcaagctgatggtgctgcctgcgctgttcctgccgctggctgtgcgctttggctttaccgacgaaaagctggtggccctgctggtgatgctgggcagcatcaccaccccggcgtgctacgttatggcaaagcagatgggccacgaaggtgtgcttaccggcagcgtgtgcgttaccaccaccctgttcagcgcattcagcctgaccttctggctgttcgtgctgcggagcctcggatatattttataacatcttttgcatagcacaacagcggacggcctgcaggctgtccgctgtttgcttttcagatgttgcttggggaatcaggccgcgccgaagggatgcagcttctgccctttattctgtcatttccagttcagagatccattcccgcacgcggtccgggcggtttgtgacgatggcatccggctgcaggggccaaaggtctttcacggcctgttccccgtccaccgtccagtatgccgccttgatgcccagatcatgcagcttctgcaccatgctgggctgctggtaagcggtgtgatattcacagctcacccagtccggcttgaagtccagcgtctgcacatactttaccgggtcccgctgttccagcaggcgctgggctacctctaccagactcttgcccggaaagttcgcctgcagcatactgatctgattgcccatccagcgcagggcccagctgcagttttcgtcatccacattttccaccgacagcggcggcagctgtggaaaatcatcctcttccagcccgttctgcaggccaagcatttcccatgtgctagtgggcagtgccatggtctccaacgcaccgtagaccagcacgcccaccttcagctccggcatcagctgctttgcctgccgcagcaggtcgtggttgaacgagatcaccaccagccggtcggtaatgtttgctgcacgcacctcctcgatcacgcgggggacaaaatccgggtcgtcatcgatggtggccttcatttccagctgaacgatggtaccttccatttccctgcacagagccagtgcctcctgcagggtagcgatcctctcgttccgatagttcacatccttccagctgccaaagtccagcgccttcagctcgccctcggtcatgtcgtagatctggccacgcatatcggtgtgccagtcaatgacaaaatcgtggtggatcaccagctttttatcgctggtctgctgtacgtccatttccacgccgtccgcgccgatctccatcgccttgcggaacgcagaaagggtattttccggcgcaagataggacgcgccgcggtgtgcaatgatctcaggtgtcataaattccaattctttctcacaaatttattttttcgcaaatttcaggcaaggtcggtgccgtttgaagcaatgacctttttgtaccagtagaagctgtccttgcggctgcgggccagtgtgccgttgccgtcgttgtccttatccacatagataaagccgtagcgctttttcatctcaccggtggatgcgctcacaaggtcgataggaccccatgtggtgtagcccatcagcggcaggccgtcctcgttgacggccttttccatctgctcgatgtgggcgcgcagataatcgatgcggtagctgtcgtggatggagccgtccgcttccacggtatccaccgcgccaaggccgttctccacaatgaacatgggcttttcgtaccggtcgtagatggtgttcagggtcacgcgcaggcccaccgggtcgatggcccagccccactcgctggccttgaggtacgggttcttcacagcttccagcaccgcattgccgtcggccttttcttctgccaggatctcctgatccgtggtgatgcagcggctggaatagtagctgaaggagacaaaatccacggtgccttctttcagaacctgctcatcgcccggctcggtgtgtagggtgatgccggctttctccatccgcttttttgcccacaccgggtaggctccccgggcctgcacatcggtaaagaagtagttgtcgcggtccgcttcctgcgcggcacggatatcctccggtgcacaggtgcgcgggtaatactggcctgccgccagcatacagcccaccatggcaccgggcatcttttcatgggccagcttgaccgcctttgcgctggccaccagctcatgatgtgccgcctgatactccacctgctgcacattctcgcccggatagaacactagccccgcgccggtaaagggcagatgcagcagcatgttgatctcgttgaaggtgagccagtatttcaccttccccttgtagcggtcaaacagcacttcacagtagtgcacataggcatccaccatgcggcggtctttccagccgccatacttttttatgagggcaatgggggtatcgaagtggcagatggtcacaagcggttcaatgccgtatttgtggcactcatcaaacacatcctcatagaacttcaagccctcttcattgggccggacatcgtcgccgttcggcaggatgcgggtccatgcgatggacagccggaagcacttgaagcccatctcggcaaagagggcgatgtcctctttataatggtgatacaggtcaatggcttcatggctgggataatagtgcttgtcgtcgcactccagcatttccagccgacccagcgccaccgggaagcggtccgggccaaacggggtcacatccacggtggcaaggcccttgccgcctgcctgccatgcgccctcgcactggttggcagcggtggcaccgccccacagaaaatctttgggaaaactgcccataagtaaaccctccctattttaatttgttgattataagataccgcacaatcgccggaatgtccatgcctacattttacaaaaaggcacctcattgttgtgaaagtacgacttttatcgtcaaatcgctgaattttgattctatttttcgtacatttttcacgagaaaaatgcaaaaacgacctgattttcctttcattctgtttctttcaaactgtccgcagacatggtacaataatcaggtaagatacaccgccgctttttcggcattggaaaatggagtgtttgattatgactgagttcaagcccattaaagaaggcaaggttcgtgagatctatgataacggtgacagcctcatcatggttgctaccgaccgcatttccgcgtttgatgtcatcctgaaaaacaaggtcaccaaaaagggcaccgttctgacccagatgagcaagttctggttcgattacacccgcgatctgctgcccaaccacatgctgagcgtggacgtgaaggatatgccggagttcttccagcagccccagttcgacggcaacagcatgatgtgccgtaagctgaccatgctgcccatcgagtgcatcgtgcgcggctacattaccggcagcggctgggccagctaccagaagaccggcaaggtgtgcggcattcagctgcccgagggcctgaaggagtccgacaagctgcccgagcctatctacactccctccaccaaggccgagatcggcgaccacgacgagaatatctcctacgaaaagagcatcgaggtgctggaaaagcagttccccggtcacggcgaggagtacgccaccaagctgcgcgactacaccattgccctgtataagaagtgtgctgagtatgcgctctcccgcggcatcatcattgccgacaccaagtttgagtttggtctggatgagaacggcaacgtggtgctgggcgacgagatgctcaccccggattcctcccgcttctggccgctggaaggctacgagccgggccacagccagccctcttttgataagcagttcgtgcgcgactggctcaaggctaaccccgacagcaactacgacctgccgcaggacgtgatcgacaagaccattgccaagtatctggaggcttacgagctgctcaccggcaaaaagctgtaaattttacgataaaacgaatcccggcagatgcttgacagctctgccgggattcgctataatgtctatagaaagggcactgcgacaagcggttggccccagttcaaggtttacagtttttgagaaccgtcaccgtgccgggtggcggttcttactttttcacgcgaatggtgaatgtcaatccaaacaagtggaatgtcaaagtaattggcatgtactcacctcctttcggaagtgagggccgaaccgcctgccgttgtttgcagtgccccgccgcctttcagcagcagagatagcataacatagttttcggctgatttcaacaaaaaaatgcttccgtgcgccgcacggaagcatttttttcacttactcagctccgaactttcctcagaataagcttcggactctgccgtttcttcgttttcttcgtccagcaggtactgcacctcggtctgctttgccatctggtcagccgtccagtccagctgcgcaatgcccaccagctccagcgtgtactgctccacattctgcaggctgccggaggcaagactctggcccgggtcgttctccggcgaccatgtaatgcgcagctcatccggctgtgcgctgcactgctgcacggcatcggtcacgctgcggcagtcctgcgcaaaggcctgtacgctgtcatagccgccaaacagctccacagtcaggctcagatagccgtttccggcattcacatcccgcagcgttttcgcctcactgctgtacaggtaggcgtttccgctgatattcttcacacggatatccggggctgtttgtttgatcttgtcataggcttctgtcgtatattcctgccccagcttcatgcttgcctgattccgctccgggccgagttcatcccacacgaccggcagcagcgacagacagaagcatccgcccatgagcacaaggcagatcagcaccgaccagaaatcgtatttccagcggcccgggcgggcggcaaagaacagcacctcgccgcccagcaggatcagccctgccgctggggcgatcttgagcatcagcttccagtcaacgcccggcacaaaataggcaagcagaaagaagatgcccgctgcgatcaggcatacgcccagcgtaaagctgcccacccggcgcagcggctgcggttttgcaggctgcggtgcttcaccggtcagcggcgcatcatttctcgtctcgtccatcgtcggcatcctccgtctcatcgtccggggtcacgggcttgcccagcagagccgagagcttgggcatggcaaagccctttgctttcggctccgcctgcgcatcctgtgcagtatactcggtaaaatcttcatcttcggcatcgttctgcggcttctgctttctgcccttggggccgcgcaccagccacgcaccgcagatgatcagggccacgcacaccaccacctccggcagctgatccatcatcaggtagagtgcgcggaagaaagggctgctctggccccagcgccacacgatatcccccagcgtgttcataaggatgttctggtaggccaccagtgcgcccagcgcgatcaggccccaacccagcagcttgtggctgtccagcatgaactgttccatgcgctggtcgtgccagttgatgtgcaccagataatcgtcctgcggggcggtgcctgcgccgatctgcgcccggagattgaaggtgtcaaagaagctgtacatccacacaatgggcatggctacatacaaaacttccagcagagtgcccgcaccaaaggccacgcagaacatcgtaatgagcgaaaggccgcgcttcatgtagccctgatacatctggcctgcgcccgggcaaaaggcgaagaggaaggtcaggattccgtttttcatcataatcgatctccttattttgtttgatctgcaagtggcgaatttttgtatttttctgctgcagggccgccggctccgaacagcaggtcattgagtgcttttgccagcgaagcctgctgcttcggcttgtcgtcgtccattggctttcccagtatttccggctgggcggacggtcggccatcttccaccggcttgcccagctgtgcaggctcttcggtctggctctggctggtctccggtgtccatgtgtacagctcctgccggaaattcagcagctggtctatggtgccggagcgccacatggtaaaggccagcaccgccgccacaccggccactgcggcacgaccccatgtgttctgcatcagccgcacccagatggcggccatcacagccttgtgcgcggagtgcggcggcgtttccagcgcatctgccgtcagcagagcggtgtagcggtccatgcatttatcgcagtaggataaatgctcggcggtctccagccggcccagctcatccagcccgcctgcctgcagggcctgtaggccttcgtcagtcaggcagccgtttttgtcaaacagttccatgtacgcactcctttccatcgttttcacgctgtagtatctgctgtgccagcatcttttttgcccggtagatctgtgcttccaccgtcttgggcgggcggccgcacagctgtgccgcctcggccatggtgtgctgttccagcagcaccagacggcaaggcgttctgtagggctcccgcaggtccaggatcatggtggtgagctcttcctcgcccagagcatccagcacctgctgttccggctgggtgccgggcggcgcaccttccagcgccagcacatcgtcgccgggaatgttcaccctgcgcacccatgcgctgcgcagatagtcctttgccttgttggcagcgatgcgtgccagccactgtttttcaaacccggacggacagcggtcaatggcccgccatgccgccagaaaggtctcctgcgtcaggtcctgcgcatcgccggcatccggcaccagctggtggcagaccgtatacacgagcgactggtatttctgcaccatcgcgctgaattccaaggtcgtcaacggcctgcccacctcctttcagtttcgtcccggtccgacgaagtgcagtctctgcgctgcccttctgcacattcatacgaaacagccgttcaaaatcctgcaaaaacttttatttttatgatacaatagaagtagtatagcacaaaaggaggcattcggccatggctgtcagtacccgtcaggcacttttgcaggcactttccgctgccgggggcagctacgtttccggccagcagctggccgagaccctcggcgtgagccgcgctgccgtgcacaaggccgctgcggccctcacggcccaagggtacgcgctggaagctgcgccccgccggggctaccggctggcaggcggcgacccgttctgcaccgaagccatcggggactaccctgcacccatctatttatatgacacgctggaaagctccaaccgcacggcaaagctgctggcgctggatggtgcaccccatggcacgctggtgctcaccgcccaccagagcgccggacgcggcaggctgggccggagatttgaaagcccggcaggcaagggcgtttactgctcggtgctgctgcgcccggaaatgcccgccgccaatgcccagaccgctaccatcagcgccgcggttgcggtctgccgtgccgtgaaaaagctctgcgggctggagcttgccgtcaagtgggtcaacgacctgtactatcagggcagaaaggtctgcggcatcctgaccgaagcggggaccgacctcgagagcggacagctggaatggctggtggtgggcatcgggctgaaccttacctccaccgccgccgactggccggaggagctggcccgcagagccggaagcctgtaccccggcgggcctgccccggtgagccgggccgcactggccggggccattgcccgggagctgctggccctgtgccccggctttgactgtctggatgagtaccgcgcccggtgctttgtgcccggccactgggtgacggtgtgtgccgagaccgagacctacgccgcaaaggcccttgccatcgacgaggaagggcggctggtcatccagagggagaacggccggcaggaggctctgcgctgcggcgaggtgaccacccggcctgctcggaccgaataagacgcaaaaaagcaccctttcctgcccggaaagagtgctttttatgttctgtacttatgtatccagatccacggcttccagcaccgtgatgtcctctttttcaaaggcggtgcggatcatcccggcaaggcctggcatttcggccttgttctcgatgcacagggtgataatgccgttcaggctggaggcttccacgcccatggagccgccatccggcgggacccagacgttgaagtctttggtgtacttctgaagctcctgcgtggccggcagcagcggatttcccagatagctgagccagaaatccgccaggacaccgctgatgtactcgcccatctggaacaccctctgcttgatgcgcaggggcgctttctgctggtccaccttgtacacccagctcatctgctcggccatgcgctgcagctttgcctccggctgcagggtgcggagcacctcggcatccatttccggcacgatgtccgcaaggcgggtgtcctcgttcagcttcacgctgctctggaaggagcacacgcagttgtaaagggcatccggcacgcccgcttccctgcgggtgtctgccgagtaggaatactggatctcgtctttgcccagatagttgcgcagcgcaaggctcagcagaccggccagcgctgtaaagggcttgacgccgttctccactgcccggtccacaaggctctgcttggtcagccgcacccgggtgcggcgcatcctgccctcccatgtctgcaccacatccctctgcatcgtgctctcagtagctgtaggagatgggtatttttccatcatggcctcgatgtcataggccgggctgcacacgatgggcgtgtttgcaaacgccgtgccatagcgcaggttgcagtactgttccagaatgcgggtgaggaagggcgacaccccgtggccgtccatgaggaaatgataccagtcaaaatagacggtgtccccctcacagctcacgctgaaaagatagccgttcgtttcctccgggatatcgcgctgtgcactgtcctgatacacaaggcaggggttcgggttcggctccagaaaaaagctccgcttttcctgcaccagctgtacccgatagtacggtgcggccgaaagcgccgcctccagtgcgcgctgcaaaagagcgggttccaccgcatcctgcagcgcaaactggtaccgacacaggatcttctcccgacggaagaagtacatcgttccctgaaagatgtactccgtcgagcgctgcgactcattcatgaactgttaccccgcgtttgccgccagataatccaccagatcccctatggtcacaaagttgcgcagctccttttcagggatgcgcaggccgaaggtctcctcgaggtctgccacaatggtcaggatctccattgaggacagatccagatcgtccatcaggacgctgttctcattcacatcttcgggagagacctcggcaacatcctccaggatggccaggatctgggaaatgatctctgctcgttccatagaaattttcttcctttccgtgacggataataggcacaatctcctatgcctttccataataataccctgattctctcctgtgcgcaagggttccggcaacaaagctttgttttttgtcggaactcctgttttcagtctgccggtctgccggcccatttatgcatccgggcattcgatcgcatccgtatcactggcgcagcagcttgcctgcaccgttgcgcggcagcggctcggtgctgaactccactgcgctcatgcgcttgtacagcggcagggtgcggtttgcctcggtgataaagtcccgcacctgctgctgtttgtcctcgtcgcaatagaccaccacgccgatcttcttgcccatttcttttacaacacattccttcacggcttcgcacttgcccacgatgccttccagctcttcggggctgatgttctcgccgctgtccagaatgatgaggttcttcttgcggccggtcaggaaatagtagccgtcctcgtccttgcgggccagatcgccagtgtggaaccagccgtccgcgtcaatgacctcggcggtggcctccaggtccttgtagtagcccagcatgatgctgtcgccgtgcatgcacagctcgccgtcctcggcgatcttgtagtccagataatcgttgccctgacccacagcgccgatgtgctttgcgtcctgtgcgtagttgatgatgccgtcgccgcaggtctcggtgctgccgtaggtctgcaccacgaacatgccgtgttccgccatatccagcatcacctgcgggtcgaacatggcagaggagcagatgggcacccacagctctcccagacgttccttgcggccgcgcatcacatcgtggtggagcgagttcataatgaccggcaccaccgccatggcctgactgggcatccgctttacctctttatagaagttgcggatgtcgctgctgacgttcagcgcccagcctgcgtgggcccaggagaacaggcagatgaacgcgcccagatggaacatgggcagcacggtgtactggctcatgacgaggtccggttcgtgcttatacgccatcatgtgctcaccgatctgggtgtgggcacgcatcaccgagaagaaattcttctcgctcagcatcacgcccttgctgcggcccgtggtaccggaggtgaacatcagaaccatcagggcttcgtggtcgatgcagcgggtcagctgcgcaggctcatagctgcggaagccatccatggggcggaggatatcgccgtaggcagccttgagttggtcgttgaagccgtagtcgtcgccgtcggtcaggatggcatccggctccacaaggcccagctcgtagctcagctcgtcccagctcttgcgctgattcagcagcaccagcaccgcaccggccgccaccacgccaaaggtgttcacggcatactcgtagctgttcttggtgagcaggcagatctttttgcccttgatctccgggatggtggactggaagtaattcaccgccttgcggatatcctgcacataatccttatagaggatggtggtcacggcatcgtttgcggtgtcgtagaagcggaaggccacattatccttgaagcggtcttccatgttgatggtgataaggtcgtagacattatccagcactctgatcttacgcattgttctgtttcctcctgtgttcagcgcagcagttttcccatggcgttgcggggcagcggctgtgcactgaactccgtcaccatgcgcttgtacagcggcaggccgcggttgaccccagtgacgaactccttcacagtttcctgctttgcagggtcacagtagatgagggcacagatctttttgttcttttccttcacgatgcactcctgaatatccgcacagggcaccagcagcttttccagctcctcggggctcacgttctcgccgctgtccagaatgatcacgttcttcttgcggccggtcaggtacatgtagccgtcctcttccacccgggcaatgtcgccagtgtggaaccagccgtctgcatcgatgacttctgcagtgccttccgggtccttgtagtagcccagcatgatggggtcgccccgcatgcacagctcgccgtcgtccagcttgtattcacagctgaggtccacatggcccacgctggtcagatactttgcctcctgtgaggagttccatgcaccgtcgccgcaggtctcggtcaggccgtacatctgggccacaaagaagcccttctccatcatatcactcagaatcttggggtcgaacatggcagcgccgcaggtcagcacgcacaggccgttcaggcggtcgcggcggcccttcatcacgtcgctgtagatgctcttcagcagcaccggcaccaccgccatcacctcgctgtgcatggcacccagatcacggtagaaatacttcaggttgttgcacaggttgatggagtggccggtgatgctccacgaaacaaggctggtcatggcggagatgtggaacatgggcagggcggacagggacgagaactcgtcggtgttccagcccatgtacttcttcacatcgtcaaaggggtccagaaaagccggcatggcgctgaacaggttcttctggctcagcataacgcccttgctgcggccggtggtgccggaggtgaacatgataaaggccagagcagagaggtcctccacctcggtcacgtcctcggcaggctcataggccgcaaagacatccatgggcttcaggatgctgccgtaggtctcagcgagggcaggctcccgctccgcgaactcgccatcctgcaggatgcacaccggctcggtgaggcccagctcataggagatggcatcccagtccttgccaaggttcagcggcacagccacggctccggcaatgaccgtgccgtacatgcagatgacatactggtagctgttgcgggccaggatcgccacacgcttgccgcgcacgtcgccatactctgcacgcaggaacgccacgaaccggcgcagatcctgggcatactgtgcgtagtgcacctcggccacgccctgcttttcttcatcataccagcgcagagccacacggtctgcaatgttggtttccatattgcaaagtgactgatacagcgatgtaatcatttttttcctccatttttatcatccgatccggcgctcctgtgtaggccaacacagatccttccagtcatttccaactgtgcccagtatacaataaggcccgtgtcaatgcaagagttttgcaacatttaattccaaacattgacaataaaatcttgcatatcatgtcgtttccagatgtaaattctgcctttcgttgcgaagccgccctgcctgtgctatgcttttattacaggctgcaatgtgtccccgcccgccggaccgcaattcaaaattgacagtctgtgcaaaaagcattatactgggttcatatccatacaaaattttatctttttcattcaaaatctacgcattgtgcggcgtccggctctgatggaatgtcccgcgcaaggaaggaacctccatggaaggaaccaagccccgcaccgccagctccatcggcatgttcgacatgctcaagggtgccggtatgctgaccatcgtttttgcgcataccgccgagctttatcccatgcaggcggtcagcggcctgtccctgaccgcgtttttcccgttcatctaccgcgaagcgctgatggccgccttttttattgccagcggctacggcttccgcaagcgctctatccacaagtgcatccaccagcagctcaaaagcctgctcaaaccctatgcttacacggcgctgttcacctgcgtgctgcactttatcattcattataagacgttccagtacctgcccggcaccatcggcgagtctatcaaggtcaccggcggctttctgctgggcctgccccacacggccgagtatttcgggcaggagttcttctcctgcgggccgatgtggtatctgctggcgctgatggtaggctgggtgctgctggatgtgatcctgaacatcttcccggagcgctatgttccatgggctgtggcaggctgcgtcctgctgggctggggcgcgagccttgtgtgggagctgcccttctgcctgatccagggtgccgtggtagtgccctacctctatatcggcttccttgccaaaaagaagcatctgctggacgagcccctgccgcccaaagtctttgccgggctgctggccgccacagcactcattgccgtaggcgctcttgctacccgcaccaccgactgcatctcgctggccgagtggtcactggggccgctgagcatctttctggacggtgctgcaggcctgcttttcatccggctgttcatgcgactcagccgcggccatggccccatcgtgcactttctggaagcggtgggccgccgttcgctgaacattttctgcgtacataccgtggagatcatcgctattccgtggtatctgatggtagcaaagttctctgcgcagccggtgctgggcatgtggctgcaatatgccatcgctctgggctctatctggctggtgtgtgagctgctgcgtgtacgccgcgcactcatcatccgatttttcccggcacagcgcagaacgcccgccgtgcactatacctcccggcactgacatgtttttccggctgctgcggtgcagccatcataaaagtaagaggagaatccggttatgaacaacgatgtccccgagacccttgctgcggcccgcagccgcgctgctgacttggaacagcagctcaagctctctgacgaaggtgtatcccggctggcacagcggtgtctggagctggaacaacaggtgctgaactatcaggccgcactggcaaggcacggcagcgacaacgagcctgccgccctgaccctgccgcagctgttctacgattccggctccggctattccccgcgggaatgcctgaccgttgccgaggatgcctacgacgaactgacccacgaggtctctgcggtgttcaccctgcccacggatgcccgtgcgctacggctggaccccggtgagctggcctgctgcgtgactgacctgagcatctcggacgagcggctggaatgccgcgccatgaacggcatccagctgcaggaagactgcctgctgtttttggatgtggaccccaacctgaccgtgtgcagcaccgtgccctttgcggccgggatgaagtttgccgtgacctatcattactatccgctgggccgcttccagcacgagcagcccggcaaggccctgctcagcgcgttgaataccatcaaactgcatgctgaggccgaaaagaacgatgttctggaacagctgcaggccgcccttgccgagaacacccggctgaacaatcagctgacggaactgcagaacagccgtgctgcctatgaagattcgctggaaaacctgtacgagagcagcagctggcggcttaccgcaccgctgcgtgctttgcgccgcctgctgcgcggctgaatcggatcgctaaaggagttgtcaacatgtacagcagttacagcaccctgcagcgtaagcagctgacgaagcaggtttataccgatacccagagtacctatctgctggtgtatgcaccgggccgtcatcaggcgctggagcacgcactggaaaaccagctgcaccgcaagttccggctggtgacggagctggcccccgccctgaccgactcggtggagggcgtgctgctggtcagcgaagatctggagtgcacctccaccgccctgacctattttgccgccgccctgcgcaccggtgccgattttgtggtgtgtgatgccgcctttggcttcgatggctccaccgccctttatctgagcacccagcacatcccgtgcagccgctgcgccatggtatcgcggaagcttctggaccgggtgcgcgccgctgcgcgcggcagggacagcgtgaccgagctgctgcgccttgccaccgccatggcggaaaactgccaccgcatcccgcagtctttgctgcacttccggcgggagctgtgtgccgacgatgtgttctctgcagacgggaagcgtgctttgatcctgagccacgagctgaccatgaccggtgcgcccatcgtgctgacaagtgccgtgccggtgctgcgcagcatgggctttgaagtggtggtgcttggccctgcggacgacggctcgctgccgctgtttctggatgccggtgccgccgtggtgacccgcagcgactgcgtgatgaactcgtcgctgtggggccttgccaccagtgccgattttgtgctggccaacaccgtggtagaggctgccgccgtgagcaccctgaacggctccttcgtgccagtgctgtggtggctgcacgatgcctttgcaggctacccattcattgcgcacaagattcccaaaacactgggctccaatgtgcatgtgtgcgccgtaggctcccatgccactgccgccatgcactcggtgcggccggacttcagcattgaacagctgatctacggtctgccggactatgcgcaggaaagcttcccgccctacgatatcagctatgccggcggcaggccgctgttcgtgaccgtaggttcctttgagccgcgcaagggtcaggatattttctgcaacgccatccgcctgctaaagcccgaggtgcgccagaaggctgctttcctgttcgtgggcaaggcggcggacaagagcctgaagaacgccgtggatgcactggtggaggactacccggacaccgttttctaccgcaagcgtctggaacggcccgagatcaaatccctgatggatcagtgcacctgcgtggtatgcgcttcccgcgatgatcccatgccaaccttcgtcaccgagggcctgatcttcggcaagccctccatcgtgtcggagcacaccggcaccgccgggctgatcaccgagggcgtggacggctttgtgtacaaagacgacgacccggatcagctggcaaaggtgctggagcatgctatcctgcatccggaacagctggccgccatgaaagctgactgccggaaaatgtacgagaaatattattccaacgaagcctatgttgccaccctgacacggctggtgaacgaatcaacagactaaaaacaagataaaggcaagggtcgatgcgtgcatctgcccttgcctttttatcattccatcaaaattgcacaagaaaattccagttccgttcacaaagacacaggccgcgtgtgttatacttttattaaatcattccgcctgaaaggagcctgttctctctatgagccaacccgcctctgccgcaccttcccgcaaaaagacagtgatctcgctgctggtgctcgccgcacttaccggcatcatcgtgctgctgttcaaggacaactgggccgagatcaccgcagcgctttcgcagctgtccgcctggcaggtgctggtggtgctggccatcggcctcagctacccgctgctggagggatgcgtggcgtgggtcatcgtgcgcagccgcatctcgggcttcaggctctggcagggcatcgataccgcgtggtgcggcacctttggcaatgtggtcacgctgggcgcaggtgcagtgccggtgcagacatggtatctgcaccgctgcggcctgccggttggcccgggcgtgggcctgatgaccctgcagtacgtgttccacaaaaccaccgtgctgctgtatgccacggtgatgctgctgtttcagcacagatggcttgccgccaacaccaccggtgtgatgaattatctgcccatggcatacgctgtagtggcggccatcattgtggtgctggtgctggtgtgcgtatcgccgctggtgcagaaccttgcccgctggctgatgcgtctgctgcccaaaacggaaaaatggcagcagcgccgcgccgactggcagcagcagctggatattctgggcgaggagagccgccgtctgctggcagataagccccactgcgctgaaattctggcattacaggcggtcaagctgttcgggctgttctgcctgccctacctgtgcatccggttcatggggctttcccctctgagctttttgcaggtgcagctgctcaccagcctgatgctgtttttgtccaacgccctgcccaatgtggccggcatgggctccatcgagacggcattcctgctggtgttcggcagctttctggagcgcggcgaggtgatgagcgtgatgatgctctaccgcatcgccagctattatgtggtgttcgccgccagcgccgtgggcttcttcatcgctcagcggcatctgggccaaatgggagcggagctgccaaaggaggcatgactcttatgaaggaaaaaggcattctgtcccggttcggcattgtcattttagtgctgcttgcactggtgctgatctttccttccgcaaagatcgaccttgcatccagcatcgaggccagcacacaggccagtgtccgggtggagcacattcagaactttgcccgctccgcagagatggatgttcagctgctttctgccgacgaccctgcctatcagcagattgcaaacgtgctctccggccttacctgtgtcaagcggttcaaccagcagtattcctcctacagccacgaatacccagtggattccgtcactgtgagctactacgatgatgccgagaacaataacctcctgttcaccgtctactccgatggcaccgccattgtgaacagccagttcgtgaagatcaaagaacccaagggcggcgcggaggaagtgtaccgggagctggcggagatcgtgaagtaaaccctctcaggcatcgctgagcgatgccagctcccccgaaagggggagcttctttgcatctggcttaaacgtttttcttcaaaccaaaagtagtatctttccgtacttgcgcatgaagctcgcccttcgggagagctgccgccgcaggcggctgagagggtcgtttcccttataaaaacaaaaatcggggcacgcaggtggtcaagctgcatgtcccgtttttgtttttcttttgcacttggtgcggtaccaatcacaccgaatgccgcgcatcgagccgtgggagcaaactaaaaccacagctcacttgaaaaaagagaatggaatggaggaattggcgtttgcgcagcaatgaaagccccagtggggcttttaagccacaaagcggtcttgcgtaagcaagatggagcggccccgccgcgacaaacttggggtctgtgcacattacacaaaccggtttttcacagacgcttttgcagaagcatctgcttttctggtgcaacgtggttagattcgtctaacctcgttgcgagaacagaataccacagccggttagtcttgtcaacccttatttttcgatttttttcgcaaaataggtgcaccgccgggatttcagcgctttttctacattctgcccaaagaaagccctttgctttggaagaaaacccacttgttatctattgctttttaaaggggttcttgctattataataacgcaagattttgtgggcaggttttcatttttgtctacaccttgtagttggggctgctgtaaccggcagttcaagaccgttttgcccccagaaagccgccatacagagcggtttttcaaaggctcattagttagaaaacgctaactgcgtaatggagcaaggaggttccaatgatcaattttgaacagtgggaaggctttgagggccgcatctggaaagaagaagtcaatgtgcgcgacttcatccagaagaactacaccccgtatgacggcgacgaaagctttctggccggccccaccgaggcaaccgacaagctgtggggtgccctgcagaagctgcagaaggccgagcgcgccaagggcggcgtgctggatatggagaccgaagtggtcagcagcctgaccgcttacggccccggctatatcgacgaaagcctgaaggatctggagcagatcgtgggtctgcagaccgacaagcccctcaagcgcgccttcatgccctacggcggcatcaagatggcagagcaggcttgcaccacctacggctaccagcccagcgaggagctgcacaagatctttaccgattatacccgcacccacaatcaggctgtgtttgatgcctacacccctgagatgaaggcggcccgccacacccacatcatcaccggcctgccggacacctacggccgcggccgcatcgtgggcgactaccgccgcgtggccctgtacggcatcgatgcactgatcaagttcaagcaggaggacttcgccaactgcggcgacggcaccatgaccgacgacgtgatccgcctgcgcgaggagatcgcacgccagatcagcgccctgaagggcatgaagaagatggccgaggcctacggctatgatatctctcagcctgcaaagaacgccaaggaggcctgccagtggctgtatttcgggtatcttgccgccatcaagacccagaacggcgctgccatgagcgtgggccgcatctccaccttcctggatatctatatccagcgcgatctggacaacggcatcctgaccgagacccaggctcaggagctgatcgaccacatggtcatgaagttccgcatggtcaagtttgcccgcatccccagctacaaccagctgttctccggcgaccccgtgtgggcaacgctggaagtgggcggcatcggcatggatggccgcagcatggtcaccaagaactgctaccgcttcctgcacacgctggaaaacatgggccccgcaccggagccgaacctgaccgttctgtactcctccgccctgccggagagcttcaagaaatacgccgccaaggtgtccatcgataccagctctgtccagtacgagaacgacgacgtgatgaagcccgtgtggggcgatgattactctatctgctgctgcgtgtctgccacccagaccggcaaggagatgcagttcttcggtgcccgcgccaaccttgccaagtgcctgctgtacgccatcaacggcggtgtggacgagaagagccacgagcagtgtggccccaactatgcccccatcaccagcgagtacctgaactacgacgaggtgctgcccaagtatgtccagatgctggactggctggctggcctgtacgtcaatgtgctgaacctgatccagtatatgcacgacaaatactactacgaggaagccgagatggcccttatcgacaccgatgtgcgccgcacctttgccaccggcattgcaggcttctcccacgtcatcgactccctgagcgccatcaagtacgccaaggtgaaggtagtgcgtgacgagagcggccttgccaccggctttgagaccgaaggcgacttccccaagtacggcaacgatgatgaccgcgccgacgagatcggcgtgtggctgctgcgcaccttcctggagatgatcaagaagcgccacacctaccgcaactctgaggctaccacttctatcctgaccatcacctccaacgtggtgtacggcaagtacaccggcgctctgcccgatggccgtgccgcattcaccccgtttgctcccggtgcaaaccccagctacggcgcagagcagaacggcctgctggcttccctgaactcggtggcaaagctgccctaccactgggcactggacggcatctccaacacccagaccatcaacccggacgctctgggccacagcgaaggcgagcgggtggagaatctggtacaggtcatggacggctacttcgatcagggcgcacaccacctgaatgtgaacgtctttggcaaggagaagctgctggatgccatggagcaccccgagaaggaggagtacgccaacttcaccatccgcgtctccggctacgccgtcaagttcatcgacctgacccgcgagcagcagatggacgttatctcccgcacctgccatgcagccctgtaaccccatcggctatgtccactcgctggaatccttcggctctgtggacggccccggtgtgcgctttgtggtgtttttgcaggggtgtgccctgcggtgcaaatactgccacaacccggaaacatgggctgcggagggcggcgaggaatggacggtggaaaagctgttccagcgggtctaccgctaccgcaactactggggcaagaagggcggcatcacggtcagcggcggtgaaccgctgcgccagatggagttcctgacggcattcttcgagctggcccgctccaaaggcgtgcacacggctctggataccgccgggcagcccttccggcccgatgacccggattatctggccggtttcgaccggctgatgaagtccaccagtctggtcattctcgacctgaaggagatcgatccggaacgccaccggcagctcaccggcaaagacaatgccaacatccttgcgatggcgcggcatatttctgacctcggcatcccgctgtggatccggcatgtgctggtacccggcctgaccgacgacgaggagggcctgcgcaggaccgcagactttatccgcagcctgaaaacggtgcagcgggtggaggtgctgccctaccacacgctgggcctgttcaagtggcagaagctgggcatcccctatccgctgccggacgccgtgccgcccaccgcggagcaggtgaagcgtgcagaaaagctgctggaagtgagccgttatcccggctaagctcctgatttgaaaaacgaccgtttccggtgtgcagaatgcgccgggagcggtcgttttttcttgacttcccttctgtacaccgttataatgaaaaaagtaaaaaaggagaaacagccatgcagattttcaatacgctgacccgccagaaagaagaattcgtgccgcaggtgcccggtgaataccgcatctatgtctgcggccctaccgtttataactatatccacatcggcaacgcccgcccgctgatcgtgttcgataccctgcgccgctaccttgagtaccgcggcaacaaggtgttctatgtttccaacatcaccgatatcgacgataagctcattaagaagggacaggaagagggcacctccatgaaggaggttgctcagcgctttgaggccgagtacctcaaggatgccgccggcctcaactgcaaaaagcccaccgtgcagccccgggctaccgagcacatccagcagatcctggatatcgtgaaggatctgatcgactccggccacgcttatgttgccaagaacggcgatgtgtatttccgggtgaagagcgatcccgagtacggcaagctgagccacctgaagctggacgatctggagagcggcaaccgtgagctgcgcagccagatggacgacgacctgaaggaggaccccgcagactttgccgtgtggaaggccgcaaagcccggtgaacctgcatgggagagcccctacggcatgggccgtccgggctggcatatcgagtgcagtgccatgagccgcacccatctgggcaagaccatcgatctgcactgcggcggtcaggacctgatcttcccccaccacgagaatgagatcgcacagagcgagtgcgccaacggctgcacctttgcccgctactggatgcacaacggcttcatcaacgtggacaatcagaagatgtccaagagcctgcacaacttcttcaccgtgcgggacgtggcggatgtctacggctacgaacccatccgctacttcatgctgaccgcaggctaccggatgccgctgaactacaccgtggatctcatcgagagctgcaagaacagtctcgagcgcctgtacacctgccgcgaaaatctggactttgccctgaccaaggatgcctttggcaccgacgagactctgaaggaaaaggctgccgaggcccgcaccaagttctgcactgccatggacgatgacctgaacaccccggatgcactggctgccgtgttcgatctggtcaaggagatcaacacgctgtcggctgtttcctccaaggatgctctgcagaccgccgccgctgcgttcgacgagatcaccggcgtactgggcctgctgtacaaccgcaagaaggacgaggtgcccgccgaggtgactgagctggtagagaagcgtgccgccgccaagaaggccaaggactgggccactgccgatgccatccgtgcacagctgaccgaactgggctgggcggtcaaggacaccgcacagggcccgcagctgagcaagctctaaattaaagtaaagctattcgcggcatgttgcggatggctttacttttttgcacgcatttgccataataaggaagaagatcagctttgcggagggaacagcaatgaaggtcatggtttttgacgtaggaggcaccgagatcaaatattcggtcatggacgagcagatgaaccgtttcgatgccggttccgtgcccacgccgcaggatacgcaggagcattttctcgacacaatatacgctctgtatgcaccgcataaggatgaagtggacggtatcgccatggcgctgcccggctttgtggatgccaacaccggctatgtctccaacggcggggcacttctgtacaacaccggcacgcaggtggggcagctggtgcgcgagagatgcggctgccgtgtcacgctggaaaacgacggcaaggctgcagccattgcagagctgcgggccggtgccttgcagggctgctgcaatgcggcagtgtttatcatcggcaccggcgtgggcggcggcatcattgccaatggccagctggtgcgcggcgtgcactttaccgccggagagtacagctttgtgaacaccaacgccgacgagtgggagaatgccgaaaaaaccatggcctgccagtgcagcaccaaatacctgctcaagtggtatcgcgcccgcaagggcctgcctgccgatgcccccatgaacggtaaactcttttttgatgccgccaatgccgccgagccggaagcgctggaagtgctggaacggttctgcaggatggtggccgtgcagatctacaacctgaccgtattgctggatgtggaaaaggtagccatcggcggcggcatcagcaagcagccgctgctgctggacagtctgcgccgggtatatgccgggctgtttgcttcccgtggggaatcaccttacatgatcggtctgccccgctgcgagatcgtgccctgccatttcagcagcgaagccaatcaggtgggagcattgtatacctatctgcaggcggaaagcaaaaccatttaatggcttccgcttcgctctagccatattcagcggaacaattatttttatagagcaaactccggcagactgcagtctgccggagtttgctttttcacaggatagggccgtattggaaaacggcatcctcccttagatttacttattggtcagccggttgaagtgcggcttttcgtcttcttccttcttcggttccggcttttccgccggggtcaggcgcacctcggtcacgcggcgcttggccgtgcgggtaacgacaccgtcgtactcgcccagcgtgaaccggtcgcccaccttgggcagatggcaggttttttcctgcaccagaccgttcaccgtattggaatcgatgtcctcatcctccggcaggcccagcctctcatacaggtcgtccacaccggcactgcccagcacgatccagctgccgtccgactgcctgcggaagtcctcggtcgcttcgtcgtgctcgtcccagatctcgcctaccagctcttccagaatgtcttccagcgtgatgatgccctcggtaccgccgtactcgtccaccaccaccgccatgtgatggtgctgttcgcgcagggtgcgcagcagctgggagatctgggtggagccggtggtataaagggtgggcttcacaaggtcttccagcgtggtatccttgcgcagacggccaaggtaaaagtccttttcatgtaccacaccgatgatgttgtcaatggtgccgtggtagacgggcagacgggaatatcccgattccgcaaaggtatcggccacctcatccagcgagagatcgtcctccaccgcgatcacatccacgcggggcgtgaggatctcctccacttccacatcgtcgaactcaatggcgctgcggatgagctggctttcccggtcggtcagctcgccgtcgttctcggcctcgctgaccatggtcatcagctcaccctcagtgatggtgtcctcctcggtgctgcggatgaaatgcctcagcaggcgcttccactggctgaacagccaggtcagcggggtgaacaggatcatgagcaggttcaaaaagggcgaaaccgccgtggcaaccgtctccggcatctcctttgcaaggctcttgggggtcacctcgccaaagatcagaaccacaatggtcagcacgaaggtggacaccgtcgcgccccgctccgggtccagcaggcgggtgaacagcactgtgccaatggatgctgcggcaatgttgacgatattgttgccgatgaggatggtggagagcagcttgtcgtacttttccgacatagccagcacgcgggctgctgccgaatcgccgtcctcggcgcggcttttcaggcggatctggttcagagaagaaaatgcggtctcagaggcggagaaaaaggcggaaaatgccaccagaatgatcagcgccgccaaaagcgtaatactgccatcgtccataaaaagggaaatcacactcaactttctgtttttgtttgaaccctctcaggcatcgctgcgcgatgccagcttccccgaaggggggagcttttttctgtgcgcccgcagccagccccttccacgcagaaggtgctgctgcccgggatatcgcacactggcgcaacgcgcctgagagagttttgggataaatgttcttacatacaaaaatgtgctccccatcgttgctgttccgcgatgaaaagcacatcaatgttatttgtaatcataccatattctgtacggtggtgcaagctttcttgccgcaaagtccgtacagaacaggtaaaatttacattatcgcagggtcaaagcgccattctcgcagtctaccgtcagggtgttgccctcggtatagctgccctgaatgatggccttggcgatcagggtctccacgcggctctggatgaaccgtttgatgggacgtgcgccatacacactgtcgtaagcagaatcgatgatgaagtccttggcagcggtggtgacctccagcttgaggtgcttgccctcgtccatgcgcttgcgcagatcctgcagctgcagatccacgatcctgcgcatctcgtccttggtcaggctcttgtagtagacgatctcatccagacggttcagaaattcggggcggaacttgctcttcagcagctggtcgatctggtgctttgcttcctcgctcagctcgttggagccgttggcacggcgctgctccagatcgttcaggatgatgtcgctgcccagattggaggtgaggatgatgaccgtgttcttgaagtccacggtgcggccctgactgtcggtgatgcggccatcgtccagcacctgcagcaggatgttgaacacatcggggtgggctttttccacctcatcgaacagcaccacgctgtagggcttgcggcgcacagcctcggtcagctggccgccctcttcataaccgacgtatcccggaggcgcgccgatcagacggctgacgctgaacttctccatatactcggtcatatcgattcgcaccatgttgcgctcgtcgtcaaacagtgcctgcgccagtgccttggccagctcagtcttgcccacgccggtggggccgaggaacaggaagctgccgatggggcggttggggttggcgataccggcgcggctgcgcaggatggcctcgctcaccttggtcacagcctcgtcctgaccgatgacccgctggtgcagcacatcgtccagatgcagcagcttctcgcgctcaccctccaccagtttctccaccgggatgccggtccagcgggccacgatgcgggcgatctcctcatcggtcacgcggtcacgcagcaggctgtcctccttcttggcggcggcgatcttctcttcctcttccagctgtttctgcagctggggcagcttgccgtatttcagctcagcggccttgttcaggtcgtactcgcgctgagccttttcaatgtcggcattggtctgctcgatctgctcacgcagggattgcaccttgccgatggcgttcttctcgttctcccactttgccttcatgctgcggaacttgtcctgcagctcggccagctccttttccagatccttcaggcggctctggctcagggcatcggtctcctttttcaggctcacctgctcgatctgcagctgggtgatgcggtgggccagatcgtccatctcgctgggcatgctgtccatctcggtcttgatcatggcacaggcttcatccacaaggtcgatggccttatccggcaggaaacgatccgtgatatagcggtcggacagggtggcagcggcgatcagggcgctgtcgttgatcttcacgccgtggaacacctcgtagcgttccttcaggccgcgcaggatggagatcgtgtcctccacggtgggctcatccacctgtaccggctggaagcggcgctccagagcggggtctttctcgatatactggcggtactcgtccagcgtggtggcaccgatgcagtgcagctcgccacgggccagcatgggcttgagcaggttgcctgcgtccatggcaccgtcggtcttgcccgcacccacgatggtgtgcagctcatcaatgaagaggatgatcttgccctcgctcttcttcacctcgttcagcacgctcttcaggcgctcctcgaactcgccgcggtactttgcaccggccaccagagcgcccatgtccagactgaacacgatgcggtccttcaggttttcgggcacatcgccgcgcacgatacgctgtgcaagaccctctgcaatggcggtcttgccaacgccgggttcaccgatcaggcaggggttgttcttggtcttacgggacaggatgcggatcacgttgcggatctcctgatcacggccgatgacggggtccagcttctgcttgcgggcaaggtctaccagatcctgaccatacttctgcagggcgttgtaggtctcctcgggattgtcgttggtgacgcgctggttgccgcgcacagccgtcagttgctgcaggaacttatctttagtgatgctgaacgcacggaacaactcggcggtgttctgagtctgctcatccagcagaccaaggaacacatgctccacgctgatatagtcgtccttcatggccttggcttctcgggcggcggcgctgagcaccttatcggcagcctgcgagatatagaccttgtcggggtcacggccggagccggacacccggggcagagccgaaagcttttcggccacggcggcagcaaaactgccggggtcaacattcagcttctgcagcagctgcgggatcaggccctgctcctgcgaagcgagggcgtgcagcagatgttcaggttccaattgattgtgctggtactccacagccagctgttgcgctgcctgcagagcctccagcgttttctgtgtatattgattggtattcataaagtcaagcctccattcataccggaaggtttattttagcgaacacgatattcgtttgctaaaagcccggtgcagagatgctgccgaacgggaagcagcggctattcttcagttgtttcacggtttcaagcacctcctgccgaactggttttacttgttttagcactctatctgttcgactgctaaaactatactcctgttttcccactttgtcaatagggttcataaaaagtttgcaaatcataatttttgctagaaaaaacacgcagccttgccataccgttcgtcgcgtaagcgacttaaaatcggcgcaacacaaaaaatcctctagcgcagcgacttggattttttgtatggagcccatccgctttgggattattaagggcgagcagcccttagtttgcaacggcgacgaccgcggccagcggccgaaacagggaggagctgttggggcagcggcctgcaggatgcgagtgccacgcaaggcacgaagcagacgcagggagccgcaacccgccgcctcccgcgcctcgaaagtagcggagaccttgccgcgctgaacacgcggcatttgctttgcaaaccggtctgcggcttaaaagccccactggggctttcatgccctgcgggcaccgccgtcctttctggttctcttttggcacgcaaaagagaacttgtccggtggagaagaattgcataaaagtcaagaaatctgttccactcgaatacgctctgtatgggaagcattgctctaaaaaaagaaccccaaaaaatccatagattttctggagttcaaaaattcatataatgtgatctcagccctgctttttccagcggcgcatcacgcccatgcccagtgcataggggccggtgtgcacggcaatggtgcagccgatctgcagcaggcccacttcgcactgtgcgccggggtactttgcacgcagagccgcgcgggtctgcatccacaggcgtttgccttcctcttcgtcgtagccgtagcctacggtgatgcggtagtcgtccggggtgccgccgtgggcatccagatagttcatcagctgttccagcgctttttcaaagctcttctgtcggccgcgtgccacgccgccggagaagatctcgccatccttgaacaggatcatcggcttgatgcccagcatgttggctgcacggcccgtcaccttgccaatgcggccgcccttaatgagatagtccagattgcctaccgtgaagaagatctggttggtagctttctctgcttccagccatgtcacggtctcgtccagcgtgcagcctgcgtcccgcatggccacggcgttttccaccatggtggactcggtaacggtagccgccgcgctgtcaatgacctcaatgcgggcatcggggaaatcttccagcaccagatcccgggcattgcgggcgctgcccacacagccgctcatcttgctggtgaacaccagacacagcacatcccggccagcagcagcatgggcacggaatgcctgctcaaagtcctcaatggaagcaaggctggttttggggtaggccgaagggttgtccaccatgaactggtagaagtcccgcacggcgatctccttgccttctttgcggtagtgctcgccgtccagcgagacatagaagggcacgacctcgatttggagctgtttggcagtgtccagcgtcaggtcgcatgcgctgtcggtaatgatatcaaacatctgtgacgcttccttttctgaatcattcaggagctttgcaggggatcatacgtggtggatataagcctcacgctcggcacccacagagatgtaggtgatcttgcagccgacagccttttccagatattccacgtaatcgcgtgcttccttgggcaggtcttcccacttgcgggctgcggtgatatcgcagtgccagccgggcaggtactccaccacgggctgtgcggtgtccagagcttcgcccatggggaagcgggtggtggtgctgccatcggtcagcttgtaggcagtgaccatggggatcttttccatgtagtccagcacgtccagcagggtcagagcaacttcatcgcagccctggcagaacacgccgtagcggcttgccaccagatcgatggggccaacgcggcggggacggccggtggctgcaccgtactcgtggccagcctcacgcaggtcgtgcttttcctcttcggtcatagccagctcggcagtgaaggggccgtcacccacgcaggaggagtaagccttcatcacgccgatggagttgtgcagcttgtggcccgggatgcctgcgccgatgggggcgtaagcaccgatgacgttggaagaggtggtataggggtaaatgccgaaatcgatgtcgcgcagagcgcccagctgagcctcgaacaggaccttcttgcctgcagcgtctgcatcggccagatactggcccacatcgcagatgtaatccttgaagatggcggcatacttttcgagccatgcccacatctcatccacgctgatgggagcggcgttgtagctgccctccatgaccagattcttggaatccaccatggtgaccaggcgcttcttcacagcgtcgtccagatgcagcaggtcgcccatgcgcagggtcttcttcatgtacttgtcgccgtaagcgtaggcaatgccgcgcttggtggagccgaactgtgcgccggttttggacagacgtgcttcttccagaccgtcctgctccacatggtagggcatggtgatggttgcacggtcggagatcttcaggtttgccgggctgatctcaacaccctgctcccgcagcttgttgatctcgccgtccagatgatgcgggtcgatgaccatgccgttgcccataacgcagaccacgttcggacgcaggatgccggagggcagcagattcagcacgaacttgccgcgctcgttcttgaccgtgtgaccggcgttgttgccgccctgataacgtgcaacgatgtcatactcctggctgatgaggtcgaccatgcggcccttgccttcatcgccccagttgatacccgtaattgcagtaagcataataaatgacctctttatcattttttcaaaagacagccttttccgtgcaccttgcccgggatacgccaccttgggaaaacacatcagcaggcatacacaaaacacataccaatgcaagtatagtatagcacagatcgccgtgcaaaaaaagaggaaaacacagcttttggctgcgttttcctccaaaaaagtgtgcgcaaaattgtgcgttcagctgcgggggttctcaaggtcggcacggcgggtcaccttgtggatggtgccgtccggctcctgaatggaggtgttggccagctgcgcgcgcaggctggccttcatgtcgtcgatgtattcgcggcgcagggcctgctgctctgccttttcggcctcggtcaagccggtggtcttgctcttttttgccagctcgttgatgcgggcgatcttttcctgtgtcatggtgcctcctgtattttcaagcggaatatgttataataagaaagcaaaccctctcagtcattgctgtgcaatgccagctcccccgaaagggcgagctttttaaggaattttctcaatcagtatagcaaaggatgataaaaatggcaactcaattgaattttgcacagcagatggatgccgtgctcaaaacgctggacggcacccggccgcgccttttgctccacgcctgctgcggcccctgctccagcgcagtgctggaacagctgtgccagtattttgagatcacagtgctttactataaccccaacacatggcctgcagaggaataccaccgtcgcggcgaagagctgaagaagttcgtggcagcagcccatcctctgggcgtgaccgtggtggaggaccactacgacccgcaggagttctactctgctgtcaccggccttgaaaacgagccggagcggggcagtcggtgcacggtctgctaccggctgcggatgcgccgggcggcgcagtacgccagtgaaaacggcttcgactggttcaccaccacgctgtccatcagcccgcataaagatgccaagcgcatcaatgccatcgggcaggagctggaagccgagttcggcgtaaagcatctgccttcggacttcaaaaagcacaacggttatctgcgcagcctgcagctttcggaggaatacggcctgtaccggcaggattactgcgggtgcgagttcagcgcgaaggcaagagggatcgaaaagtaagccgttatcgggcaggccgcttttttgcttactcttccggcagctttgccaccagcagggtgaaaataatcagccccacgcagggcacgatgttggaagccataccggcggcaaggccagccttttcggctacgatgccaatgatccacggcatgaggatggcaccgctggatgccaccggcagcatgatgcccatgctggtcacgctggtcatgcggcccgcgctggccacagcggtggggttcaggcccgccatggagaacgcaaacgcaaacagcagcacgatggccatgacctgtgtgtgggccatgaccagcagcacataaaaaatcgtacacagcacgctcatgcccaccatggccttgcgcgggttcttgaacgggaacacgaacgcgatcagcagacgggccaccagcgtggcaccccacatgaccgtgacggtgtaagccgccagtgtgcccgcaatgatgccgctgcccttgaagtaagtgaccatccagccgttgacgctctgctctgcagcgttctggaagaacaaaaggccggtcagcatccagaaccgtgccgaacgcagaaagctccagtcaatggcctgcttttccttggcattcttggccttgccgccgcccagcggggtaaaggcatataccagccacagcacaagtcccagtgccgccagcaggaacaccgccagctcagtgctcaccttcgccgctgccgcaatgaggaaggggcacagcagcgcaccgcaggcgtagcagctgtgcatcaggttcatgccgcgggtgcggtcggcagagtgatcgctgaccagaatggtgcaggtgttgataacactgcccttggcaatgcccaccacaaagaaagccactgccagcaggatctctacaccggtcaggcccatgatgccgtagcccaccgcatagccgatggtgagcagcagcacactgggcttcatgcccagtacactgggcagcataccaatgagcaggcctgccagcagattgcccacactcataagtgagagcagggtgccggtcatgccgtaggcaaagccgtagcgctcctgcagcaggctgaccaccacgcccgcactgatggcacagatgccactgaagaagaaagtaagaaagcctgtattccgcaggcgtgcagactgttgttccataatcgtcctctttctgtgaaaatatcctccttctatttaaccataattccgcatcattgcaaccggattttcttacaaaaagttgcaaaaagcccgccggggcatggacgatttaaaatgccctccgcttgcgctctgggcatcttcagcggaaaaatcatttttaatttcgcgtttggagcgaccgcatttgcgcagcaatgaaagccccagtggggcttttaagcgacagagcggtctgcgtaagcagatggaggggcgttgccccgacaagctctgcggagcgctccaaacgctttttcacgagaggggctgtgactggaaaatgcatctcatctctgcgacctttcttgttaaaatggtagaacggaacgcccgcaggcgttccgttctaccgaaatctagaagaatatttccttgaattatgcccagagcaacgcggagggcattcccaatcattttctatgcaaaaagcccgccgggcatttctgcacggcgggctttggtttacagtttactctgccttggtctcgggctttgcctcagcagcggcttccggctttgctgcgggagcagcagcgggagcggcgggcttcaccacgggcttcgggggattggggtcatccttcagcgggaagaggatgatgtgcttggggcacttctgggcacacatgccgcagcccttgcacttgtcatagtcgatgcgggccacgccgtccaccacgtggatagcgtcgaacttacaggtgcgctcgcacataccacaggcaatgcaggaggtggtgcaggccttcatggccacaggacccttgtccttgttggagcacatgaccaccggcttgcgcgggccgcccacgtcgatcatgatgacctgcttggggcagatgtttgcgcaggcaccgcagccggtgcacttgtccttgtccaccttggcaacaccgtccacaatgtggatagcatcgaacttacacaccttggtgcagtcgcccagaccaatgcaggcaaaggagcaggtcttggggccgccgtacagtgcagcagcggctgcacaggtctggatgcccttgtaatcataagcaggcttgcagtgctcggaattgccctgacactggacaaccgccttcttttccacagcgctggccgtgccgcccatgatcttggcaatggcagcggcagccttggggccgccgggtgcgcacttgtcgcagggcacgccgtccatgaccacagcctttgcgtagtccgcacagcctgcgtagccgcagccgccgcagtttgcaccggcaaggcagttggtaacttcttcaatgcgggggtcttcctccaccgccatgaacttggacgctgcgaccagaacgatcgcgccgactgcgcccacgatggtacacaggataacagcagatacaatattcataatcctgttcctcccttacagcgtgacattgaacaggttttcgacgatgccgccgaagcccatgaaggacaggctggtgattgctgctgcgatcagggtgatgggcaggcccttgaagggtgccgggggatcgcaggcttccacgcgcttgcgcacgccgctgaacatgaccatggccagcatgaagccgcagcctgcgccgatggcacacaccagagcctcaatgtaagcaacaccgaagcccatagcagccacatctgcgccgtagtcgcccacgaccagaatggtgaccgccagaacacagcagttggtggtgatcaggggcagataaacgcccagagagttatacagtgcaaccacgtacttcttgaggaagatctcgatgaactgcaccagaacagcaatgaccagaatgaacacgatggtctgcaggtagctcagaccagccgggtccagaatgaagatctggatggggaaggtaacggccgttgccatgaacatgacgaagatgacggcaccggacataccaaccgcagaatccagctttttggaaacgcccaggaacgggcagataccgtagaacttcaccagcacgtagttgttgaccagaatcatgctgaagaagatcgcagcgagttttactaacatcttattctgcctccttcttcaggttatcaaggtcgcagcagctcttgcgctcgatgcgggcatccagcttgccttccagccacacacagccggccatcaacaggccaaagcagaagaatgcgccgggagcctgcgtcatgatggagaccttggcaacgctttccgggatcacctggaagcccagccatgtgccgctgcccaggatctcacggatggatgccatcagggtagcggtgagggtgtagccaacgcccatgcccacgccgtccagtgcggagtccacgatgctgttcttgcaggcgaacatctcggcacggcccagaatgatacagttgacaacgatcaggggcaggaacacacccagagcgttgtacaggctttccatgtaagcctgcatgaacatctgaacgatggtcacgaagcttgcgataatgacgatgtagcagggcagatgcaccttgccggggatcaccttgcgcagcagggagatcatgatattggagcacaccagcacgaaggtgaaggcggcacccatgcccagagcgctggaaactgcagtggtaactgccagaatggagcaggtacccagaaccagacgcagaacggggttttctttgataatgccgttggtaaggatgcttaccttggacttattttcttgtgccatttcttaccaacctcctttacgccagctcgttgtagcagttgacacagtcattgatggcagcaaacagtgcggtggaggagatggttgcgccgctgtaggcgtcgtaatcctgattcatcacaatgttctgggtgccgtccatgccgtcgaactgcgccaggaaatcgtcactgctcacgttggagccgatgcccttggtctgggtggaagcgtctacccagatgccggtctcggcgccgttggcatcaaagcccatgataacggtcaggatgccgccgtcaaagcccttttcctcggccttgatggcagtgctgccgtccggagctttgaccacgccggtgatgccggcggtggtgtaatcggtcacttcttccagctcgctggcatccgaaacggagggcagcacgccgacataagcggccagagtggtgcgcttggtgttctcggcaatgaccggggcggtcatgccgttcaccagtgccagcagcaggctggcgatcagggagataacgctcagcacaacaatgggcttgatggtgctctcccagttggaagacttactcatttgccagcaccctcctttgctttctttgcaggcttgatgtagccatacggggtctgacgggtcagatcgttgatgtaggggacccacaggttcatgaacagcagtgcgaaggacacgccctcggtgtagctgccccagtaacggatggcaaaggtgacgatgcccagtgccacgccgtacaccagcttgcccttcagggtgaaggggctggtaacgtagtcggtagccatgaacacggcaccgaacagcaggccgccgctcagcacggcaaccagagcctcgtgcacactgtgggtagcaatgaggtagaacacgaacatgctgccgacgtaagaagccgggatggcgatgctgatggtcttggtggccaccagatagatcaggcccagcacgatggccagtgcgcaggtctcgcccagcacaccgccgtggatgcccatgaacagatccagcaggctcagcttggacttatcggccacagccagcggggtagcgctggacagctggtccaccgctgcatccgggaacacccacttgttcatggaaccggcaaagctgataaacagcacgatacggcccaccagagcggggttggcaaagttcatgccgatgccgccgaacagctgcttgacgatgacgatggccaccagatcaccgatgatgagctggccgatgggcatgcccacgggcacgttcatggccagaatgatgccggtgacgacggcggacaggtcgctgatggggttgggcttcttgagcagcttgcagtacagccactcaaaagccacacaggccaccacggacacggctgttaccagcagtgcacgcataccaaaaatgatggcagaggccaccacgcaggggcacagggcgacgatcacgttggccatcaggctctgggtggtctcttcgctgcgcacatgcggggaagccgaaacaataagcttcgtatccattacttattgcctccttttttgatttcaccaaggtagaacgcctttgccagactcatcatctgggtaacagggcgctttgccgggcagacgaaagagcagctgccgcagttgaagcagtagtctgcatgcagcttgcccagctcctgcacatcgcgtgcagcgtatgcctgattgacctccacaggctccagacccatggggcagtactccacgcagcggccgcagcggatgcagggattcaccggtgcaggctctgcagcggccttgctcaggaagatcaggccggaggtggtcttggtggtggggtagctcaggttctccacagcggggcccatcatggcaccgccggcaaccactttgcccagctcgcccttgacgcccgcaaaatcaatgatgtcctgataggcagtgcccacggggacaacgatgttctggggctttgcacaggcatcgccgtccacggtgatggtgcgctcgaccaccggcataccggtagccagatacttgccaagggtggaaacgctggtcacgttcatgacgatggcgccggcatctgcgggcagaccgccgtggggcacttcgcggcccagacacttttcaataaggatcagctctgcgccggtgccgtagacactgggcaggggcttgacctcgatggtgctgtcgccattggtctttttgcacagcaggtcgatgcactcaggcttgttgttctcaatgccaatgacgcacttcgggatgccggtgtactgcagcacggccttgatgccgcggatgatatcatcgctgcagttcagcatctcctgcgtatcgctggtcagccacacttcacactcggaagcgttgatcagcagggtatccacctgctgcttgggctgcagctttacgtcggtcgggaagcctgcgccgcccagaccgaccaggccgcactcacgcacagccttgaggaagctggccttatcggtcacttccggtgccttgacagccgggtccacggtctgtttgccatcggtcttgatgacgacagagtcgcacatgcggccattggacagacggaagggctccaccgcggcaaccgtgccggagacactggagtggatgtttgcagagacgaagccgccagcctcgccgatctttgtaccaacgaacacctcgtcgccctttttgaccagagctttggcgggagcgccgatatgctggctcatgaggatgcgtacctgcgcgggcagaggcatcgggatcggtttgcttgcagcagttgccttgtcatgcggcgtatgcgcgccaagcgccgcacgtttcagcttgttcaacatggaattcaaatcccccattctgcttgaattgccgcccccacgcccatgcaggcgcactggtacagggacagcagctgcttaacatgtttattgtatcattttggcgtgggaagtcaacgacaatggcacaaaaatgatgtattttcctgaactttcttttcattttttcgtggttatatacaactaaccaccgtatttttcttcctgcactcagtgtttgcctttgcagacgaaatatggtatactattgtcaacattcacttgcggaacgtcccccgctccgcgcaagacttttccaaggaggcttcaaaccatgaaagttctcaaagtgctgctcgcattgctcaccacgctggccgttgccctgaccgccgcgctgctgttcattcaggataagaacgcaccccgttatatccagatctacgagaacgagcagtaacacccgtcttgcacaaaaagcatcccccagcctgaacggcagcgccgcccgggctgggggatgtgttgttttatgacatacaaaaagcaccgccgggtctccctcagcggtgttttcaggcaaaatattccttttagtaatctttttcgcagcccagcaggtatttcatgtgctcaaaggtgcggtcatgcccaaggtcgcgcaccattttcagcagctcttccagcagggcacgggtctccgggtggagcaggtagtgggtcttgctgcgctcgtagtattcccacggggaagcatcggtgtacttgtcgcccagatagatctggcttgcggccacgcggtcgcacaccatttcgcacacatagcgcaggggcatcttcatgccggcaaggcccaccttccgggtgctgtagtcgatccagtattccagatggtgcttgttgcggcccttgtggtgcagccacgcggaggaatagccccgcgccagacgttccgcttcgttggggctgtggtcaccctgataatagatgcagcccggaatgaactcggtagggctgtacttgctcaggtcgtgggcaaggccctgctcatagagcccgcaggcaaagcagtatttcatcaccagcagcttgtgccgggtgatggtctcaaaatggcccttgatgttcatgctgttatttcctccactgcaccgtgatacgtccctctttcagcccgcgcagatcattgctttcggaaaaatcctcccggtccatggtcaggttggggttgtagtaggggtcgtgcaggatgttcgccttgccgtgcacggcatacagccgctgctgctcggcggcaaagcgccgggctttcaccgggtctttttcgtcgccgccgcggctcttgctctcgtaatgggtcagctgagcatagggtgtccacgcaatgcggtaccctgcatcccgcacccgcagacagaaatccacatcgttgaaggccaccgcaaaggcttcgtccagaccgcccacttcgtcccacacgctggtctttaccagcaggcaggcaccggtgacggcggaaaagtcctgcaccgttgcagcgcggaacatgtagccgctgccgcccgccttgcagtatttgtggctgtggcccgcgtagccgccaaggccggtcacaacgcccgcatgctgcaacgtctcgtccgggtaaagcagctctgcgccgcagatggccgcgccgccggggtgagcacactgccgcaaaagctccgtgagccagtcggcattgcgcacctccacgtcgttgttcagcagcagcagataatccccgctggcgtactgtcggccaaagttgttgatgccggagaagttgaagcccttctgcgggtagttgaccacctgcaggccgtcgtagcgctgccgggcttccttataataggcaaaggtcgccgggtcggtggagttgttctcgatgacgatgacctcaaagttctcccagctggttttggtccagatgctgtgcaggcacttttccagatcgtcggtgtggtccttgttcgggatgaggatgcttaccttcgggtcgcccacgatatcccacttcacccggtaggtactggggaacaggccatcctccacggtgccggtgcgtccggtgcgggccagatggtcggccagcgcctttttggctgctgccgccacatagggcttggcatcggtgccgccggaggtggagcctgcgtgcacccgccagtagtacagcacctgcggcacatgggccgcaccgccggtcttttccacaaggcgcaggaacaaatcgtggtcctgactgccgtcgcactccggccgctccccgccgatctcatcccacagcgccttttggaacaccgccaagtggcagatgtagttgcagcacagcaggtagtccggggcgtaatccggcttgaagtgggccaccatgggccgctggatgctcttggaaaagagtgcttcatcgctgtagaggaagccgtccggctcgccctgcgcccgcagctgcagaatggctttgcccatggtgtacatggcgtggggcgcaaggatatcatcgtggtcggcaagggccagatattcccctgtggcaagctctgctgcagcattggtgttggccgcaatgcctttgttttcgatctttttgtatacgatgcgttgattctttgtctgatattcctccacgatgcgcttcacatcggcatgttctgcatcggaagcatccgcaaggcagagctgaccgttgggggccgtctggttcacaaaggaatccagaaattcccgcaggtatttttccggtgtattatacagcggggtcaggatgctgatggtgggcaggccgcagtctgccgccgttttgtcggccatttcagcccgctgggcttccagcacctttttggcgggcagatagcgggcacgcttgccaaagcagcggcgcttgacaaagcccgcgccccgtttgagcatggtgggcaggccctcgtccttcgtcagctgcaccgcatagcctgccagttctctggcacgtttcagtcgtacattcatatcaggcctcgccgcgctgcgttgccttgtaggccgcgcagaccgttgccgtatcgccattcattttcaggtggccgtggctcagccatgccaccttgctgcacatgcgctcgatctgctcaatggagtgagacaccagaatgaccgtggtgccgcccgccatcagctcctgcatccgcttttcgcacttctgctggaacaggaaatcgcccaccgaaagcacctcgtccgcaatgaggatatcgggcttggtgatggtggcaatggcaaagccgatgcgggccaccatgccggaggagtagttcttgagcggcacatccagaaagttctgcagctcgctgaactccacgatctcatcaaacttttcgtccagatacttgggcgagaagcccagcaccgtgccgttcagatagatgttctcgcgggcagtcaggtccatatcaaagcccgcgcccagctcgatgagcggggcgatggagccgcggaccgtcaccttgcccttgctgggcttgtacacgcccgcaatggtcttgagcagggtggacttgcccgagccgttcaggcccacaaggccgtagaaatcgccgggcatgatgtccagactcacgtccttgagtgcgtagaattcatcgtactgcaggcggccctgcaccatggcaaggaagtattccttcaggctctcatgcttttccttggagaggttgaagcacatggaaacattgtccactttgatgatcggttccattgttcttcctccttaaatatgcagcacaaagcggtcctgcgttttgcggaacacccacacgcccaccagcatggagagcacggcgcagcagccgcacaccgcgaacatgttgaaatccagcgggatgccccacatcacggtacggcggaagcctgtgatgtaccagtacatggggttcagcttgatgatctgctgcatgttgaacccgccaatggaaaaggtcatctgggtggggtcgtagaagatggcggaaaaatacagcaatgcggtgatgaacacgctccagatgtgcatgatatcccggaagaacacggtagccgctgccagaagcaggcccacgcccagactgaagaagaacagcgtcaccagcgggtagaccgcctcgatgagggtcaggtggaagggtgcaccggtaaagatcatgaccagcagcagcgccacaaagctgaacacgcagttcaccatggcaaagcagcacttttccagcgggaagatatacttggggatatacacctttttgagcaggggcgcagcgcccagcacactgctcatgccggtggaggtggcctcgttgaagaagttgaacagcagctggccgcacatcaggaacacggcaaagttgtcgatgccgctgccgcgcatgtccatcagactgctgaacacggcccagtacacaaggcacatgagcagcgggttcagaacgctccacaccacgcccagcacgctgcggcggtatttgagcttgaagtcacggctgacgaggttccacagcagatagcggtagcgccagaagccgttccacattgctttgaattttgccacaggcgatcaccacttttcaaaatattcaaacttctgtgcagcaaagggctcgtgcagcttgtcctttgcgctggtcttgtgctcgcagccgcagtccggccactgcacgttcacggtggggtcatcgtaagggatgccgccctcgctggtggggtcgtacacatcggtgcacttgtagcagaactctgccacatcgctcagcaccagaaaaccgtgtgcaaaaccctccgggatgtagaacatcttcttgttctcctcggaaagggtcacgcccacccacttaccgaaggtggcgctgtgggggcggcagtccacggccacatcaaacacctcgcccttggtcacgcgcaccagcttgccctgcgtgtggttcttctggaagtgcaggccgcgcagcacgccgcgggtggagcggctctggttgtcctgcacgaattccttatcgatgccggcttcggcaaactgatccttctgataggtctccataaaatagccgcggtcgtcgccgaacacctgcggctcaatgaccacaacaccgggaatctcggtctgagtaaacgtaaacttgcccatattttgtacctctcttttgtgaagcatgtttgttttatctggaaaagtctgttcgacgcaggcttttgcacttatttgccgcggcgggtctgtccctgttccgtgcgcgttctgcggcgtttcttccgccaagtgatgaaccgcaccaccagaaaggtcaccagcgctgccgctgcggtggaccccagcgagatgcccagcagccagaatgcatggctttggggctttaccgccttggccgcttccaactcctgaccggtgctgttctccagcagttcaggcaggccggaaatttccgcatccacacgcacgctggtgctctcctgcttttcgccgccgtggacggtgtacacagcgtacacctccgggtcggagccaaggacatagctttccggcagttccagcgtcacctccacatcgtcggcagtcaggccgttggccagcagcagccgcacgccggggtcggagacggtcacggtgccaaggctcccgccgccgcccaccacgctcagcggtgctgtgatgccccgggcgggcaggtcggtgtagccggtaaaggtgctgaacgcataatccagcagagtgcggacatcgttgtatttatcggtgctcagctcgctctgcatggtcacgcagatgagccggacgccgttctgctccgccagacaggcgtagctgtagcgggccgtgttggtatagccgagcttggagcccttgaccgacgtgatatggtaccggctggagccgatgcgcattttgtcctgctgggaaaagtagcgggtcacgggctggatgttggtggggtccatggtgtacatctcattgcgggtgaacacctgctcaaagcccggctgctccagtgcccagcgcaggatctgcgccatatcgtagcagctggtgtagtggtcctcgtcgctgatgccgtgggggtttgcaaagtgggtgtgcgcaaggcccagctcttctacccgcgcattcatctttgccacgccgtccgcgatggtgccctctcccacatattcggccaacaggttggcgccgtcgttggcgctggccatctgggtggcatacagcgcatccgtcagggggacttcttcgccctcgcgcagggcaatgtgactggaatcggtgcctgccagcgagtaaacatcctcgtgggtcacggtgagctttatatcatcccagttcccctgcgccttttcgcaggcaaggcccagcgtcatcaccttggtgatggatgccgggtgcagctcttcgttcatattctgctgtgccagcacaaggccggtgtctgcatcgatgatgcagtaagcgcgggtggcaccaagggcagggccagccgccgctgcccctggcacaaacatacagaacacaagcagcacagcacacagcgctgcggtcagttttttcatctggtttttctccattgagcgtttttctgcccgtcgtactgcaccggcaaagcatcagataatagtataccacactttaccccggctgaaaagccattcagacgttgttttgcagcagaacgggctgcagctgccgcccggccagcgcatcgtccagtgcagcgggcagacgggcaaagtccgccttcaggctgttgggcttgtgggtggggtcatcctgcccgtagggcacaaagtagtaatgcttgcgttggaaaagtcgagcgatgttctcccccgacgctcccagcccatcgttggtggaaacgcccaccagaaccgggcaccccacccgcagcaggctctttgccgccagcgtcaccggcgtatcggaaagccccgccgcaagccgtgccagcgtggccccggtgcagggcgcgatcaccagtgcactgaccagctttttagggccaagcggctccacggcctgcaatgtgtccagcactacatggctggtaagggcttccagccgttcctgccaaaactgcccggtgccaaagcgggtatcctgctttgcggcaaagctcatgatgggcagcagctcccagccctgttctgtcagctgctgcgctgccgcaagcgccgcttccagtgtgcagaagctgccgcacaccgcaaatgcaatgcgtccttttttctgcgttctcatgtgtgttcctcccgctcccgcaaaatggtcagcacggtgcgtgccaccgcttccccggccgtgtccggcgcacaggcggcgggcaggctgagcgcatggatggccttgcagcccagccgctgcgccgcagcaaagtcggtgccgccgggctttgatgccagatctacgatcaggctaccgggccgcagagccgccagcaccggctcggtcagcaccggggccgggatggtgttcaccaccgtatcaaaggccggagccagcgcggccagccgggcaagctctgcaccccgcagaccaaggctctcggccagcgcacgctgttcggcgcgccgggcacagacagtcacatttacccccagtgccgccagccgcgcccccagcgcctgccccaccgggccaaagcccagcagcagaaggtttgtgccccacagggtacgggtgcgctcggccagcaggatgccaatacagccctccgccgtagggatggcattgtacaccgtcagctccggtcgggcaaagtaatccaccagctccacgccagctttctgtgcgatggtctttgcctgaactgagagcctgccgcccagtgccaccgcgccgggttttgcggcccgcagcagctctgccagcggggtgcgggccgcatccagcggcagaggcagcaggatataatctgccagtgcaacctgttcggctccgcccaccgcataacctgcccgttccagcacccggcctgccgccgcctgccgggcatcggtgcccaccaccacaaacagctttttcgcttccatgccgcatccccctttgcctgctcgtgggccatcctatgcgggagaaatatttgttgtgaaaaaactcctccagctttcgccggaggagttttttatcacgattatagaatgcgccgccctgacatccggcacatcttttattttacgaactttgccacagcacgggctacgatgccgcccagaatgccggagacaaggaactcggccacgccctgcacgccgaccagcagcaccacgaacatgaaggggttcgcagcacccttgacggacacgaggttctgcacgtagtcacagccgtagaaggccagcacgatccagcccatgaagaacaccgtgttcaggaacggggcgctcatggcgctgacgatgtagctccaggtgccgggcttgtcaaagcgcttcaggctgctgaagatcaggccgcagcacaggcccatcagcacgcgcatacccacgcacaggataaaggtgttcacagggcttacctgaaacagcgcacccgtcatagcggaagcaccggtgatggcatcgtagaagctcactgcgccgaacacaccgcccagcaatgcgcccacagcggggcccatggtgatggcacccactgcaatgggaagggtcaggaagctcatgtacagcgggcccacaggcacactgcccagacccaccatcttcatgaccagctcaatggcaaccagcagcgccacacgggtaagagttttcgtatttttcatattcagttttcctcctgctgccgttccgccctatacgtcggatacggcgcaaacctgcccgctctatgcgggttttaaagtagatattcaaacaatttggagcgcgtttttgtcagggcgtgttccaatgggaaaggctttttcagtggtcgcacgggaagcggatgcccgcattgcggcgggccaccgtgagcacacggctcaccgcgatggtggtatcctgcatccggccgcacagctcctgatctccgctctccagcgcacgggcaaaggcttcaaactctgccgcctgccggggcctgccgccattcaggttatagtgctcttccttgccctcgttagggtggaaggtgatgccgccgcagcagttggcggtggacttctgcatgatatagcccttcgtgccctgaatgatgtaccgggccggggccgcgcagtccttggcagcgatgctcacggccttgaagccgctgtaatccatggtcaggatgccgctggtgtcgatgccgcgctccatgttggcggtatatttggcctgattcggctccccgaacaggcccacgatgtagcttacattatatacgccaagatccatcagggcaccgccggcacaggccgggtcaaaggcaggctgtacatcgcctgcacagaaggcatcgtaccggctggaatactggctgaaattgcactgtaccagcttcacggtgccaatgcggggcagcagctcccggatctttgcgtagttttcaaggtactgggtggtgatggcttcaaacaggaacacctttttgtgccgtgccagatttaccagttcttccgtctgggccgccgtgggtgccagcggcttttccacaataacatgtttgcctgcttccagcgccacgcgggcatagcgcacatgctgcaggttcggcactgcaatgtacaccacatccacccactgcagcagttccagaaaattggtggtgtgctgcggcacgccgtactggccgcaaaggctctgagccagctcggcgctgcgctcggtgctgcagatggcctgcaccgtaaaaggcgtgtgctctgcaagccatggcaaaaattcccgcacgatcttgcccgtgccaagaatgcctaatttcatctgatttttctccccatcctgtcgttggtcagcctaccagcgcttccggctcgcggcgggtgcgctttttggggtaggtgcgctgttttgcatggccgtgctggttctgtcggccatagtgcctgccgccgcccgcactgtggtgctgcggctgggacgcattgagctggtacaaaagggcaagtcccttcatcagcagctccgggtcgtaggtcagcgggtggcggcacagcggtgtcacatactttgccagccctcctgttaccaccagagtgaccggacggccaagttcttcctcaatgcgctgcaccatgccgtcaatgagcacagccgtgcccatcacggagccggacagcatgcatttttcggtgttggtgccaatggcgcttttgggcgagccaagatgcacctgcggcagctgggcacagcggtcgcccagtgcccgcagcccggtggaaagccccgggcagatgacaccgccccggaacacgcggttctcgtccaccacattaaaggtcgtggcagtgccaagatccaccgtgaccaccggcagcggaaaatttgccgccgcataagccgcatccacaaggcgatccttgcccacagcgtggggttcatccacgcccatggtcagtccggttcggatctccggcgaaacgatgaccggcttcctgcccgtataatggcgggcgcactcagccagtgccccggtgatctggggcaccacgctggtgagcacagcgccctcaaagcgcatggggcgctcaggatggcggcggtgcgcaaaaattttatccatttcgacacgatattctgcagccgtgcgggtgcgcaccgtgtccatgcgcgccacaaagcatacacgtccgtcccgaatgcccccaagggcgacggtggtgttgcctatatcaatggctaagatcataattctgttttccctttataacgcggcagtatccggcaggacggcggagaaagctccccgatggcctgcccctcaccgcagtctgtctattctttgtcaagctgtattttaccgcattttgttcccagttacaagcctgtacaaagattttgttgtgctggcggaacttttgcattatactaaggtaagaaatgtggaaacagtacgtttttgcaggaggttttaccaatggatctgaacggaaaatgcgtccttctgggcgtaagcggcggcattgccgcctataaaatggccaacgtggccagcgcactgcgcaagctgggagccgatgtggaagtcatcatgaccaaaaatgcgacccagttcatcacccctgttacatttgaaacgcttaccggccacaagtgcatggtggatacctttgaccgggatttcaagtttgaagtcacccacatctcgctggcaaaaaaagccgatgtgatccttgtcgccccggccactgccaacgtcatcgccaagatggcccacggcatcgccgatgatatgctcaccaccacagtgttggctgcaaagtgccccaagctcgtttctccggccatgaataccggaatgctggaaaaccccatcacgcaggataatatcgccacgctggaacgctacggcttcacggtgatcccctccgagagcggcgtgctggcctgcaaggatgttggcagcggccgtctgcctaaggaagatgtgctgatcgagtatatcctgcatgccattgcccggcccaaagatcttgccggtctgcgcattgccgtcgccgccggccccacgcaggagccgctggacccggtgcgctacctcaccaaccattccaccggcaagatgggctatgcccttgcccgggctgccgccatgcgcggcgcggatgtcacccttatccacggcgagactgccctgcagccggtcaagtttaccaccgatgtgcccgtgaccactgctcagcagatgtacgaagccgtcaccagccgctttgatgctacggatgtgctcattatggccgctgccgtggccgactaccgccccgctgccgtggcaaacgacaagatcaaaaaaaaggacggcgacatgtccatccctctggaacgcacgccggatattctgggcaccatcggccccaaaaagacccaccagttcctgtgcggtttttccatggagacccgcgatcttgtggaaaactcctctgcaaagctgaccaaaaagaatctggacatggtggttgccaacaacctgaaagtggccggtgccggttttggtgtggacaccaatgtagtcaccctcattaccccggacggcacccgtgagctgccgctgatgagcaaggccgatgtggccgatgccattctggatgaaattttaaaacgccgctcccagtgagaaaaagtggctgtcgcatgtgcaacagccacttttttatttttccttccgtgcaaacacgatgccaacggtacccgggccggaatagccgccgatggtggtaccgatgtctgtctcgtggcattccttgaaactgccgtatttcttcagtcccgccttcactgcgtccatgcagccgggcttcggctggcaggaggagatgaacacaaggctgtcctcgatgtcgtcgcgttccaccagacggtcggtgatgtacttgcccacgcagatgggcaggctgccgcggtattttttgactaccttcagttcgccgtcgatcacttccagtgcgggcttgatgcccagcaggtttgccccgaaggccagcacaccggagcagcggccgctcttggccataaagtccagccgatccagtacaaagctcagctctacccgtttggcaaggctctgcagccgcatcgtaatgttgcggggggtcaggccatctgcagcccacttggccgctttcagcaccagatagccctgcccggtacagatattctggctgtccaccacatagacattctcgaattcgcctgccgccagcttcgcattctggaagcaggacgaaagcttgctgctgaccgaaatatggatcaccgcatcgcactctttggcaaacggctcaaaaaattcggtatattccaccagatttgcggcggcggatttgggcattttgccgcccgcattcacataggcaaacacatctgccgggtggatcgttacgccgtccagatagctatcctcgcccatcagaatgtgcatgggcatcagggcaatgtcccactgtgccaaaagctcttcggacaggtcgcaggtgctgtccgctgtgatcttgattctcacattatttctccttttataaagccgttctgcatcctctgtcggctgcaccgacgatcccttaaaaaattgtccttttctattttaccacagatgattcaaagttgttaagtattttgtaaaggcaaatgtaaatcttttatgaagaagttcccggtttcggttttcttgtacacttatcacaaattccgaattggatttatggttctttccgaaaattcgggtttacctgtttattttgtccgccaaaaattatataataagatgtatcctaatagaatggattgaatcggtctgctctgcggccgttatttatttggaggttgccttatatgttcatgtacaccgattacaaccagcacctgctggacaatgtaaaaaagatccacttcatcggctgcggcggcagcggcatgtatccgctcatccagattcttgccgcaaaaggctacgagatctccggcagcgatgtgctggatggcagcatcatccgctacgagcgtgagatgggtgtcaaggtcagcctgggtcacagcgccgataatgtgatcggcaccgacatggtggtctactctgccgccatttccaaagataacgtggaactgaatgccgctgcctcctacggcatccccaccatcgagcgcagcgttctgctgggttatgtgagccgcctgtacaagcagagcatctgcgtctccggcacccatggcaaaaccaccaccacttccatgattaccactgcgctggagttggcaggccgcgacccgtctgccgtcatcggcggcaagcttccgctgatcaatggctacggcaaggctggcaagggcgacgatatcgtaattgagtcctgtgaatttgccgagaccttcctgaaactgaccccgtacctgtccgttgtgctgaacatcgacaacgaccatctggattactacggcagcatgggcgaactgaagtttgccttcaagcgctttgccctgatgaccaagttcatgatctttgccaatgcggacgacaagaacaccatggatgtcatgtacacgctggaccgccgcgtgcgcacctttggcatccagaacgacggcgattatcaggcattgaacgtgaatgaatacaagcccggcttctttgagttcgacctgaaggagtggaacaaggtcaccggccatatccgtctggctgtgcccggctaccataacatttacaatgcgcttgccatgtgcgccgtctgccgcttcgtcggtctgaccgtggagcagtgcgccgatgcagccctgaatttcaagggcgctggccgccgctttgaggtttacggcgagtgtaacggcgctttggtcgtggacgattatgcacatcatcccaccgagctgcgcgctaccctgaacactgccaaggagatgggctacaagcgtctgatcgccgtccaccagccgtttacatacagccgcaccaagctgctgttcaacgactttgtggatgtgctcaagatccccgatatcactgtgctgaccccgatcatgggcagccgtgagcccaacgatcccaccattaccagtgcaaaactggccgctcagatccccggctctgttctggtgaacagtctggaggaggccgctgattgggtcaagcagaacgcccgggagggcgatctggtcatcaccctcggctgcggcgacatctacaaggccagcaagatgatggtggctgataataagtaaagtccacccaataaaatatgcggccccgtcacgttgaatgctcaacgcggcggggccgctttttctgcttttattcagaaatgcggtaatgtccg

SEQ ID NO: 1112 - DNA, 16890 bp, Unknown
  gut microbiota DNA sequence
aaaaacgcgcgccgcgcgattagcatttttgccgcgcgttttctgcggctcaattctccggcctgccgtggtcgcagccgagagaaagataacgcttcatctcccctctcagcaccatctgtgcatactccaagggcttattatacagcagccagtccagctctgcccgctgtgccggggtgttgccgtactcatcctcgacggcgatgcagtcgatggcaagggtggtgccatcctcgaaccgggcttccacccggttgctgtccgtgttgtagcggcagggaagtagtttgttcatggtgaacctcatttctatatcaaacggtgtctgttcggatgtcctaaaccctgccatagaaccgatgtgtcatgtaagattgttgtttggataaaactgggaatttttgtgctgctgatgcctcaaaaatccagcaggaaagtcgctcattttgagaccatcttgtcgggctgattttagctctgcacacttttgcacattttctgcacatcgcaaggatggataacaggtgcaaaggcgtgcaagcaatgcaaaggatgcaacagaataacaacggaaaaataacggtgattcgattaaaatgacgttttaacgtcaaatgatgaaatggacaaaatgtgccattcggttcctacgaatcagtaggccgggggttcgagtcccttccatcgcaccagaaaatgccgtgaaatcgaaagatttcatggcttttttgttttgtaagccatggctgcacggtttttgcacggtcggtgttttccatgtccgatgatgtagggcgctgtattgcattgcaatcagtgcccttttttgcatcaggtgagcagtgccaggcggagctttgccttcatttccgggtcgacatccttgagcaattccaaaagagctgtcatggagatggtgggttcgcctgcggcgggtacagcctgtgggctgggggtgtcgggcttggcatagaagccgctttcaaacttcttgcccagctccacacgggaggactgctggataaggcgggcaaagacttccttgaggatgttctccgcttttttagcgtgaaaatgtaaaagaccaactgtatatttcaggtttcggaaagaagcttcccctcctccagcatctttttcacctcgcgcaggtctttgcactcggcggtgtacagacggcgcatctcgtcgtcagcgggggcaaggtccggcaccatcacggtgacaaagccgccccgcgcaccggcgcgcacgccgttgtagctgtcctccagcaccagcgtttcagccggggtggtacccagcgccttggccgcggtgaggaagatctccgggtcgggctttgacgaggtgaactgctcgccggaaataagggccttgaagtgatcggtcatgtgccagttgttgaggtgccgcaggatggatgccatccggctggaggaagccaccaccatgggaatgtgctgcgcttccagataggcaatcagttcatccagacccggctttttgggcggcggtgcctgaaaggccgtctccgcctgcgcgtgcagggcatccatgatggcatcggtgtcgcagtccgggccgtagaagcggcgcagcacggcccgcatggaatcgcctgccgagccgcgcgcggcagcgtccagcccttccttataagggagacccagtgtggccagtgcgggcttccacagggtggcccagatgcgctcagtgtcgaacatcagcccgtccatatcaaaaataacaccttttatcattgtgcaaaagctcctttctgagcctgtaagatccggcttatgccctcattgtatcatattttgggcagtttgcacatggaaaagcaggcaatttagcgcaacttaacctgtccaaagatgaaagatttttcgtttccttgtaaatcacattcatattattataatagaaaacaacattcggtgtttgcgggcgcattttcactcgctgcgcccgagatcaggaaagagggaaaataaatcatgttggatatcaagatcacccgtaccactgctccgaaggcaaagcctgacgagagcaatctgggttttggcaagaagttcaccgaccatatgttcgtgatggattacaccgagggcaaaggctggcacgatgcccgcattgtcccctacggcccctttgaactggacccggctactgtcgtgttccactacgctcaggagatctttgagggcatgaaggcataccgcacggccgatgataccgtccagctgttccgcccggactgcaacgcaaagcgtttccaggactccgccgaccgtctgtgcatccccaagatccctgtggaggactacattcaggcggttgaaactctggtggatgtggaccgtgactgggtgccccattccgacggtgcttccctgtatatccgtcccttcgtgttcgcaaacgacgtgggtctgggcgtgcacgcttccaagcactacattttctgcatcatctgcgctccctcgggcgcttactatgccgagggcatcaaccccgtccgcatctacgtggaagacgagtacatccgtgccgctcccggcctgaccggcttcaccaagtgcggcggcaactacgctgcttccatcaaggccggcgagctggccgaggagcagggctacgcacaggtgctgtggctggacggcgtggagaagaagtacgtcgaggaagttggcagcatgaacatcatgttcaagatcgacggcaaggtgtacaccgctgctaccgtcggcaccgttctgcccggtgttacccgccgcagctgcatcgagctgctgaaggactggggctatgaggtcgtcgagggcaagatcgccattgccgacatcatggctgctgcccgcgaaggcaagctggaagaggtgttcggcaccggtaccgccgctgtcgtctcccccgtcaaggagctggtctggaagggcgagcacgcctacatcggcgacggcaagatcggccctgtcacccagaagctgtacgacaccatgaccggtatgcagtggggcaagatccccgataccaagggctggatcgtgcctgttgagaaaaagaattgatcccgattctccggagagaacctttttattcagaatagcagcaaacgccgccaggcctccgctcggcggcgtttgccgtatattaggataacgtcctcgccctctccgtcaaacctccaaaatttcccggcgcaattgctttctgtgccctgcagtgctaaactgaaaacagaacagcagcctgcattgcggcaggcgtgcgggaaagattgagaggaatggacccatggtcaaaaaatggagcgtgagctaccctgccgtcaacggcaccgagcagcgcagagtatatgtttatctgcccacgatgtatgaagctgaccccgaccgccggtatccggtgctgtatatgttcgacggccagaacgtcttttttgacgaggatgccacctttggcaaaagctggggcgtggccgattatctggactacaccgacaccccgctgatcgtggcggcggtggagtgcaacgccggagccaacaacgaacggctggtggagtattcgccctaccggttcgacgacccgcagttcggccacttcgacggcacgggtcaggccaccatgagctggtatatccaccggttcaaacccttcatcgaccgcaacttccgcaccctgcccgaccgggagcacaccttcatcggcggcagcagcatgggcggcctgatgagcctgtacgcccttttgcagtacaacgacactttcagccgtgcggcggcgctgtcgccgtccatctgggtgtcgccggaaaagctttccggccttgtgggccgcgcaaagctggagccgggtaccgtgctgtacatggactacggctcccgcgagatgggcaaccacgacgggatgcgctgcggctttgcagagatgtgcgcaaaggccatgacccggggcatccaccttaccagccgcatcgtgcccggcggcacccacagcgaagccagttgggaaaaacagctgccctttatgttccatactctgatgtatgaggtggaggagtaacgggcagcagcctagccctctccgtctgctcccgttggtcgcatccacctctcccaaagggagaggccttggcaaagagatgaagtttttgtggactgccaagggctcccactttgggggagctggcaaagccgacaggctttgactgagagggcaagcacgctaaaaatgaccatcgtcaacaaaggaggaaacaccatggaaatgcagtattttaaggactacagcccggcgctgggccgcgacatggagtgcaaaatttacggccacgcaggccgcccgatgctgtacatcccctgtcaggatggccgcttcttcgattttgagaacttccacatggccgacacccttgccccatggatcgatgctggtaagatcatggtgatctccattgataccatggacaaggagacctggtccgacacgcagggtgacccctattggcgcattcgccgctatgagcagtggctgcgctatatcgtggaggaggctgtgcccaagatccagtatctggccaaggagcgcaacggctgggacgatctgcccggtgtcattgcctttggctgcagtctgggcgccacccatgcggtcaacctgtacctgcgccgcccggatgtgttctgcggctgtctggccctcagcggcatctacacggcccactatggcttcggcaattatatggacgagctggtgtacatgaactcgcccgtggactacatgaagaacttcccggaggatcacccctacatgcagctgttccgcagccagaaggcggtcatctgctgcggtcagggcgactgggagcagccggacaccacatggttcctcaagcgcatcttcgaggccaagaacatccccatctgggtagacctgtggggccacgatgtgaaccacgactggaactggtggtataagcagactgcatattacatgccgtatattctgggtgagtaaaatggctcgccctctcagtcaccttcggtgacagctcccccaaagggggagcctttggcaaaaccaaaaggccttgccgtactgccaaggcctctccctttgacagatttcccccggtcgggggaagatgtcgcgcaagcgacagaaaggggaacgaggtggacgcgagctttgcgagcggacggagagggcgaggccgcctttatagaggtttatagaggaaagaggaatcataaaaccatgcagaattttatttttatttcgcccaacttccccaccaactactggcagttctgccatgagctgaaaaacaacggcatgaacgtgctgggcatcggcgaccagccctacgatgagctgaagccagagctgaaggacagcctgaacgagtactacaaggtgggcagtctggaaaactacgacgaggtctaccgcgccgtggccttctttgcattcaagtatggccgaatcgactggctggagtccaacaatgaatactggctggagcgggacgcagccctgcgcaccgatttccacatcacctccggcttccagacctccgatatgccccgcatcaagtacaagagcaagatgaaggagtattaccagaaggccggcatcgccaccgcacgctaccacatggtggacgattacgagggctgccggaagttcatcgacgaggtgggctacccggtggtggtaaagccggataacggcgtgggcgcatccgatacccacaagctgtccagcgacgaggacctgaaaaagttcctcgtgcagaagacggcccatcacccggatgtggagtacatcatggaggagttcgtccgggccgaggtgaacagctacgatgccatcatcgatgccaacggcaaccccatttttgaggccggcaacgtcagccccatgtccatcatggatatcgtcaacgacaacgacaactccatctactacatcatcaaggacctgcccgaggacacccgcgctgcaggccgtgccgccgtcaagagctttggcgtgaagagccgcttcatccactttgagtttttccgcatgaccgaggatcaggccggcatgggcaaaaagggccagatcgtggcgctggaggtcaacatgcgcccctgcggcggctttaccccggacatgatcaactttgcccgctccaccaacgtctacaagatctgggcggacatgatcgcctttggcggcaccgatatgccggtgggcgagcacttctactgcccgtttgcaggccgccgcgacggcaagcactttgtgtacagccacgagcagatcatgcagaagtaccagcagaacatgcgcatggtggaccgcatgccggacgcgctgagcggcgccatgggcaaccagatgtacgttgccaccttctccacccgcgagggcatggagcagttctattccgatgtgctggccgtcaccgacgacaacaacgccgctgtgcagaaggagctgagcagcattctggctctgggcgagccggagaccaccccggcggaaaagcccgccgctcctgccgctaaaaaagcacgcaccacaaagaaaaagtaagaatacgctcaaaaagccccggaatggcgtgcccgttccggggcttttcgttgtccctttctgcaaagtgtgctatactgttgccagacattttattgggaacgaggtacatctatgaaaattcctgcaaacggcttcacccacgccggcaagttccacgccgacgatgtgtttgccactgccctgctgcaaattttgcgcccggacatcaagatcacccgcggctttgtggtgccggatgattttgacggcatcgtgtacgatgtgggctttggtatgttcgaccaccatcaggagccgcgggagtgccgccccaatggcgtgccctatgcggccctcggtctgctgtggcgggtgctcggccccggccttgtgggtgagcgtcaggcccggctcattgacgagaacttcatccagccgctggacctcaacgataacaccggcgagcagaacagcctgtgcgatgccattggcttttttaacccggtgtgggactccaaagaggatcaggacacctgctttttcaaggcggtggccgtggcaaagcagatcttggaaaaccagatcgccagcgccaacgccgtgaaccgcgccgacgaaaaggtgcagcaggcttacaaaaactcccgggacggcatcgtggtgctgccctgctatctgccgtggaagaacggcctgtacaagacggacgcgttgtttgtggtctaccccagccagcgcggcggctggagcgcccagtgcgtcaccgaccacaagaccaagcgccccaaactccccttcccccagagctgggccggccagccgcaggaggtcattgagcagaagagcggcatcccgggcatcagcttctgccacgccagccgcttcctcatcaccgccaaggataaggaaactgcccttgccgcctgccgtcaggtgttaaagaacaatggccgcatctgagccgtgcgcccggccaaagcccgcctttgtgtatatggtgcggtgtaccggcggtacgctgtacaccggctggaccaccgaccctgccgcccgcctgcgcgcacaccagagcggacgcggcgcaaaatacacccgtgccagaggggccggggattttgcctatctggaactgtgcgcggataagcgcgccgccctgcggcgggagtatgccctcaagcagctgcccaaggcccagaaggaactgctgtgccgcgcatggagcgcggcgggcgggccattttccggcgcataaagcgaaaacgaaacccgggactctttcagggccagacggctcacaaaaaggtcccgggctttttgtttttgcggtgtgaattctttccgtgtgctgtagtccgcacatgccccgggcgggatgcatgtgccccgaatatatactgtgtaaatgcataaaatatgaatatattctgcaaataacgcataaagatgcaacatgaacgaaaaacgggtgccggaagcaaaaaaggtttgtatggttttgttattgacgaaaaaacagcgcggcgtataataaaagcatcaaccgaaacgcaacggaagaggatgcgaagggaaagtacgcatcagaaaacaaaagtgtatttttatgaaaaaggagcgtcacctatgaaaaaggaaaacatcaaaaaagtcgtgctggcttactccggtggtctggacacctccatcatcattccctggctgaaggaaaactacaacaactgcgaggtcgtcgctgtctccggtgacgtgggacagggcaccgagctggacggtctggaagaaaaggccaaggctaccggcgcttccaagctgtacgtgctggacctgaagaaggactttgtggagaactacatcttccccaccctgaagttcggcgcgaagtacgaagattacctgctgggcaccagctttgcacgtccgtgcatcgcaaaggctctggcggatatcgccatcaaggaaggtgcagatgccatctgccacggctgcaccggcaagggcaacgatcaggtgcgttttgagctgaccctcaaggccctgtgccccgatatggccatcattgctccgtggcgtgagtgggatatcaagagccgtgacgaggagatcgactacgccgaggctcaccacatccccctgaagatcaaccgcgagaccaactactccaaggacaagaacctgtggcacctgagccacgagggcctcgatctggaaagccccgccaacgagccccagtacaacaagcccggtttcctggagctgggcatcagccccgagcaggctcccgataagcccacctatgtgaccatccactttgaaaagggcatccccaccgccgtggacggcaaggagatgggcgctgtggagctggtggagcacctgaacaagctgggcggcgagaacggcatcggcctgctggatatcgtggagaaccgtctggtgggcatgaagagccgcggtgtgtatgagacccccggcggtgccatcctgtacaaggccatcaatgttctggagaccatcactctggataaggagagctctcacttcaaggctcagctggcccagaagtatgccgatatcgtttacaacggccagtggttcaccccgctgcgcgaggctctggacgcctttgccgacagtctggaaaagaccgtgaccggcgatgtgaagctgaagctctacaagggcaacatgatcaacgcaggtgtcacctctccctacaccctgtacgacgagcagaccgcttccttcggcgaggacgaggactacaatcaggctgatgcaacaggcttcatcaacctgttcggcctgtccatcaaggagcgcgcaaagctgtccaagaactggccggaggtcaagtaagcagttgtaatatcttccctttcgtgtgttttcacactttcacacggaagttccatccaaccggcatcgttgccggcggcaccgccgcaggagcgttttcccctgcggcggctttgccgtttttagaagaaataaaatgagcggcaaaaactccttccgtcaaaccctgacgggtttgccagctccctcagtgagggagcctctggcgaagaggtgaagctttccgcactgccaaggcctccctccttgagggaggtgtcaccgaaggtgacggaaggagtctcggcgagccgcctatcagtaaaggataaaattatggcagaacaactctggaagggccgtttttccaaggccgtggattcccgcgtgaacgacttcaactcctccatccggttcgaccagcgcatgatcgcgcaggatatgcgcggcagcggcgtgcacgccgccatgctggcaaagcagggcatcatctctgaaaaggattgtgaggacatcctcaacggtctggcatccatcgccgacgatctggcagccggcaggctggagatcgaccccaatgccgaggatgtgcacacctttgtggagcagaccctcaccgcccgcatcggcgatgcgggcaagcggctgcacaccggccgcagccgcaacgatcaggtggcgctggatatccgcctgaccctgcgggactacagccacaccctgcaggcctacatcgtggagctcatcaaggtcatctgcaaaaaggccggtgagaacaccaccgccgtcatgcccggctacacccatctgcagcgtgcccagcccatcacctttggccacgccctgatggcatatgcctccatgctgctgcgcgacctgcagcgctttgaggatgccaccgcccgcatggacgcacagtgcccgctgggcagcggcgcgctggctggcaccacctacccgctggaccgccagttcaccgccgaaaagctgggctttgcggctccctgtgccaacagtctggacggcgtgtccgaccgcgatttctgcatcgaactggcaaacgccatctccatctgcatgatgcacctgtcccgtctttccgaggagatcatcctctggtgcagctgggagttcaagttcattgagctggacgatgcctttaccaccggctcttccatcatgccgcagaagaagaacccggatgttaccgagctgatccgcggcaagaccggccgcgtctacggcgacctgaacacccttctggtgatgatgaagggcattcccctcgcctacaacaaggacatgcaggaagataaggaagccatcttcgacgcagtggatacgctggagctgtgcctgaagacggtcacccccatgctggataccatgaagaccattccggtcaacatgcgccgcgccgccgccaagggctttatcaacgccaccgactgcgccgactacctcaccaagaaggggatgcccttccgcgatgcctacaagctgaccggctgcatggtgtccgactgcatcgcaaaggacaagacccttgaagagctgaccctcgacgagttcaagggctacagcgctctgtttgagaacgatatctacgatgccattgatctggtcaagtgctgcgagggccgcaccagctacggcggccccagcgaagccagcgtgaacaaccagatcgcactggcaaacgcacagctggatgcgtgggaggaaaagaacgcatgagcgtgaaagtttttattgatggctcttccggcaccaccggcctgcgcattgccgaccgtctggcacaacgcccggagatcgagctgctttccatttccgcagagggccgcaaggatgtgaacgagcgcgcgaaggtgattaactctgccgacctcgccttcctctgcctgccggatgccgcttccaaagaggtcatgcccctgctgcgcccggacgtgaaggtgctggacacctccaccgccttccgcaccgatgccgcatgggactacggcttcccggagctggcgggccagaaggaaaaaatcaaaaattcctgccgcgtggcagtacccggctgctatgccagcggctttatcagcattgcccgcccgctggtggagctgggccttgcaccggcagagtatcccttcagctgcaccggcatctccggctactccggcggcggcaaaaagatgatcgccgagtacgagagcgctgatcgcccggtgcacagcaagctggatgcacccaagagctacggtctgggccttgcccataagcacctgccggaaatgcagaagatcagcggccttgcccacacccccatgttcgtgcccgtggtgtgtgattactactgcggcatgcaggtgctggtgccgctggatctgacgctggcgggcagcaccgccgaacaggtggccgagggcattgcggcatattacaaggatgctgccaccgtcaaggtgcacgagctgaacgagactctgccggagaacggcctgtactccaatgccatggccggtaccgaccgcatggagctgtacatgaccgtgaacgctgcaggcgaccagatgatgctggtctccctgttcgataatctgggcaaaggctcttccggcgcggccgtccagtgcatgaacctgatgctggggctggaagagaccaaaggattggaataaaaaagaaaaccctctcagtcacctgacggtgacagctcccccgaagggggagcttttggcaaaaaagataacgtttccctcttgctgaaaagctccccctttgggggagctggcaatgccgcaaggcattgactgagagggttttcctgtgggaaaggaaaatcattatgcagtacaaggaagttgcgggcggcatctgcgcgcccaagggttttgctgccgccggtgtccattgcggcatccgcgcaaaccatgcagaaaaatacgatctggcactcatcaaagcggacgtgcgctgcgccgccgccggtgtgtacaccaccaacaaggtctgcggcgcacccatcaaggtggaccgcgcccacctgaaggacggctacgcacaggcgatcatcgtgaacagcggcaacgccaacacctgcgccgccaacggcgtggctctggccgaagaatgctgtgagctggtgggcaaggagctgggcatcgacccgcaggacgttctgcccgcttccaccggtgtcatcggtcagcccatggtcatcgacccctttgcccggggcatccctgccgccgccgcaaagctggctgcggacgagcagggcagcaccgatgccgccaccgccatcatgaccaccgacacccacaaaaaggaatacgccatccagttcgagctgggcggcaagacctgcacggtgggtgccattggcaagggcagcggcatgatcgcccccaatatggcaaccatgctggccttctacaccaccgatgccgccgtctcgcccatcctgctggaaaaggccctcaagaccgtggtgcccggcacctacaaccagatgagcgtggatctggacacttccacaaacgataccttgatcatcatggcttccggccttgcaggcaacccggagatctgcgaggagaacgcggactacgaagcctttgttgccgcgctcaccgccattgcagagcacatgtgtgccgagcacgccggtgacggcgagggtgccacccacctcatcacctgcgaagtgacccacgcccccgacctgaagaccgcccgtgccgtcagccgcagcgtggtgtgctccaacctgttcaaggccgcagtgttcggccgcgatgccaactggggtcgcatcctgtgcgccatcggctacacccccggcgatttctctattgataaggtctgcgtgtggctttccagcaaggccggtgaggtgtatgtgtgcgaaaacgccgcctaccacccctacagcgaggacaaagccgccaaggtgctggctgagcacgatgtgctggtgaaagtggacatgggcaccggcgatgcatccgcaaaggcatggggctgcgatctgacctacgattacgtcaagatcaacggcgattatagaacttaatggaactcccccagtcgcctgcggcgacagccccctcaaagagggagcctgaaagcctccctccttgagaaagactcccccggccgggggaggtggcacgaaagtgccagaaggggaatgggtggcatcgcgtagcgatgacggaaggagttcgtctggtggaaaacgaatgccggagcaagcgtgctggcggcaaggagagtatatgaaaaacgaagaaatggcgcgccttttctctgaggcgacaccctacatccagaagtatcacggaaagaccatggtggtaaagtacggcggcaatgccatgatcaacgaagaactgaaaaatgccgttatgaacgatctggtcaccctcaccctgctgggtgtgcgcgtggtgctggtgcacggcggcggcccggccatcaatgagatgctgaaaaaggtgggtgtggagagccatttcgcaaacggtctgcgcgtgactgacgatgccaccatggagatcgtgcagcaggtgctggccggtaaggtgaacaaggatctggtggcaaagctgcgcggccgcggcgtgggcctgtgcggcatggacggccagatgctgcgctgcaccgagctggacccccagctgggccatgtgggcgagatcgtgcatgtggatgctaccctgatcgcaagcctgctggacggcggcttcatccccgtgatcgccacggtgggcatggacgatctgggtcaggcctacaacgtgaacgccgacaccgccgctgcgcagatcgcgattgcgctgaaagcggagaagctggtatccatgaccgatatcgcgggcctgctgcgggataaggacgacgagagcaccctcatccccgaggtggaggtgtccgagatcgagggctataagtccgccggcatcattgcgggcggcatgatccccaagatcggcggcatggccgatgccatctatcagggcgtgcacgaggcggtcatcatcgatggccgcgtgccccactccatcctgctggagctgttctccaaccgcggctccggcacccgcttttaccgccgcagccaccgcgaataagcattgcgccggtgccgtgcaggcggtataataagaaaaatgaccctctcaagcctttgccagcattttctggcgcgaaagcgcctgagagggttttctgttcacagtttctgttcacaggagggtacacctatggattctgaaaaagtcatcaagcgggacaacgaatacgtcctgcacacctataaccgcaaccccatcgtgctggaaaaaggccacggcctgcgcgccgcaggcccagagggccagcagtatctggattttaccagcggcattggcgtgaacagccttggctactgtgatctggactgggccgaggccgtttccgagcaggcccacaagctgcagcatacctctaacctttactacaccgcgccctgcggcaagctggccaaaaagctgtgcaagcgcaccggcatgagcaaggtgttctttggcaactccggtgccgaggccaacgagggtgccattaaggccgcgcgcaagtacagcgtggaccactaccgcaaggaccgcaccacggtcatcacgctggtgaacagcttccatggccgcaccatcgccaccctgaccgccaccggtcaggaggtgttccacaactacttcggccccttcaacgagggcttcctgtatgctccggcaggcgatatcgaagcactgcaggagctggtggaccgcaacacctgcgccgtgatgctggaactcattcagggcgagggcggcgtgatggcgctggacccggactacgtgcaagccgtgcgcaagctctgcgacgaaaaagatcttgtgctcatcgtggacgaggtgcagaccggcgtgggccgcaccggcaccttcctgtgctgcgagcactacaacctcaagccggacgtggtcacgctggccaagggtctgggcggcggcctgcccatcggcgcagtgctgatgaacgaaaaggtggccgagggcatgggccccggcacccatggctccaccttcggcggcaacccggtggtctgcgccggtgccaacgtggtggtggaccgcatggaccagagcttccttgccaatgtcaacgagcgcgccgtccagctgcgcgcaggcatcgcaaagctgccccatgtcaagagcatttccggcatcggcctgatggtgggcatcgagttctacgacctcaaggccgcagatgtgctggccgcctgccgcgaagcgggcctgctggtgctgacagccaagacccgcctgcgcctgctgccgccgctgaccctcagcgagcacgatgtggacatggcgctggagatcctgagcgatgtgctgggcaagatggagccgacggctccgaaggagcaggcatgaaaaatctgctgaaaatgagcgacctctcccctgccgagctgacccacattctggatgtggccgatcaactcaaggcacagcagaagctgggcggcacggccccgctgctggcaggaaagacggttgccctgatgttctccaaggcatccacccgcacccgcaccagctttgaggtgggtgtgtaccagctgggcggtctgggcaactacatgaacaccgccgagctgcaggccgggcgcggtgagcccctcaaggacaccgcccgggtgctgggccgctactacgactgcgtggtgtggcgcacctaccgccagagcgatctggaagagtttgccgcgctggccggtgtgccggtgatcaacggcctgacggattacgcccatccctgccaggttctggccgacctgatgaccattcgggagctccggggcagccttgcgggccggaagctctgctttgtcggcgacggcagcagcatggcaaacagcctcatcgtgggcggactgctggctgggatgcaggtcacctgcgtctgcccgcagagctaccgcccggcggcggatgtgctgatgttcgcccacaagtacggcagcgccttccacctgaccgcagaccctgccgagggtattcaggacgccgacgtggtggcaacggccgtgtggaacaccgcccagcccggcacgtcggaaagtgagcagcgcctgcgggattttgtgggcttccagctcaccggcaagctgctggaaaacgcaaagcccgatgtcatggtgctgcactgcctgcccgcccaccggggcgaggagatctcctcggcggtgttcgagcagcacgcaccggaaatcttcgatgaagccgagaaccgcctgcacgtgcagaaagccgtgctggccattcttctggcggggaaataaaaacagaacgccaacagggccgccgcacatcgtttgtgcggcggccctgttttttatcgtgggagatttgaaaaagcgatcagctgcggtcc

SEQ ID NO: 1113 - DNA, 35754 bp, Unknown
  gut microbiota DNA sequence
tgctctaataaaaaatagtatttccgctattgatgcccagagcgaagcggagggcattctaaatggttcttgtgtttttacgctacggtgaaattctcttccagccagtccagcacacaggactgcagggcgttcaggtgcgcacggttctcaccgtaggtgtcggcataggtgctctcggcatcgtccagctcttcctgcgtgggagcaaggctcttggtctcggccacggcctgaaggatcaggtcctgctttgccagatgctcaaagtaagcgtcggatgcggccagcatggcatcggcatcggtgtagccctgcgtctgggcaaaagcattcagatccatgccgtaggcggtggcgtactggttgtagtagttcaggaacatgcggatgtaatagctggtgatctcgctgggcagctccttgaaggtggagttcgacatcaggtagtccacgatggcgttctcatagttggtggcatacagcgcatcgttaaagtagctgcgcaactggtcgacggtgtgcagatcatcgctggtgccaaagttggagtccacccactcgtcggtcagctcgggggtcacgctttcggaaatggagttcagggtcacgctgaacacggcttccttgccgctgagggtgatcgtgttgccctcggcatcggtggaatcgccgtagccgtccgggaaggtgacggtcacatcaaaggtatcgcccacattgtgcccgatgatctggtcctcaaagccatcgatgaaggaaccgctgccaagggtcaggtcgtagccggtggcagtgccgccggtaaaggccacgccgtccacggtgccggtgtaatcgatgttggcaacatctccgctctgggcggcacggccggtaacgggctgggaagaggtgtactggttcagcaggttgtccacctgctgctgcagttcatcttcggtgggagtcaggtcgttctccttcagggcaatggagccgaagtcctccggcagggtcacatagtccagcgctttgatgccgctccaatagccgttttcgtccagaccatcgctgtaatcaaaggcctcgtagtcgaagtcggcaacagagccaaactgcgagacggatgcggcagccgaagaagcgctgtcggtctgcttgtgctttgtcagcatgaaacaggcaaaaatgacgcacaccgctgcggcgatggccagcaggatgcacaggagttttttggtgttgtttttcaaaagaaatacctccataaaaatcggcctgatgcacagcaaaagaccggtacaggcagaacagatacccatttattatatacgttctgacggcaaaaggaaagttctttgcaaaatttccacaaatcctgcggcgggtttgtatcacttttgcccgtctacaggcgcaaaagtgaccaaaaccgatggaaatgggcgggcggttctgttacaataaaaataagtgagccttcccgggaacataaggcccctccctgagggggctgtcgagcgtatgcgagactggaggagttcctctttccgtcatcgctgtgcaatggagagggcgaggacggtaagatattggaggaaattcaaatggattacaataaagctgctctggaaatgcacgagacccacaagggcaaggtgggcatcgtaagcaaggtggaggtcgccacccgcgatgacctgtccaccgcctacactcccggtgtggccgaaccctgccgcaagatcaaggaaaaccccgacgacgtgtacaagtacaccttcaagggcaacatggtggctgttgtttccaacggcaccgccgtgctgggcttgggcgatatcggcccggaagccggtctgccggtcatggagggcaaggcggttctgttcaaggagttcggcggcgtggatgccttccccatctgcatcgatgcccacgacgctgccagcgtcattgctgcctgcaaggccattgcgcccacctttggcggcatcaatctggaggacatcaagagccccgagtgctttgaaatcgaggaaaccttggagcgggagctggacatcccggtgttccacgatgaccagcacggcaccgctatcgttgtcaccgctgccctcatcaacgccctgcgtgtggtgggcaagaagatggaggatgtgcacatcgtgctgaacggtcccggtgctgccggtactgccatcatcaagatgctcatgaccgcaggcgcaaaggacatcattgcagtggatcagttcggcaccctgtacaagggctgcaacagcgccgaggcccacaagaactggctgggcgaggtgaccaatccccgtcaggtcaagggcggcctgaaggaagcactggaaggtgccgacgtgttcatcggcgtttccaagcccggcatcctgaccactgagctgtgcaagaccatgaataaggatgccatcgtttttgccatggccaaccccaccccggagatcatgccggacgaggccaaggccggcggcgtgcgggtgatggccaccggccgcagcgacttccccaatcaggtgaacaacgtgctgtgcttccccggcctgttcaagggcgcactgagcgtccgcgcccgtgacatcaacaatgagatgaagctggccgccgcctacgccatcgccgacctcatcaccgatgccgaccgcagcgaggagaacatcatccccggcgcgttcgacccccgcgtggccgaagctgtggcaaatgccgtggcaaaggctgcccgcgagaccggcgttgcccgtctgtaagcggaggaagcgtttatgagaaccatttccgcacaggagatcacggataccgttgcacggctgtgcatcgaagccaacacccgcctgccgcaggacgtgcaggcggcgctggacaaggcccggcaggaagagccgtggccgctggcaaagagcactctcgaccttttgtggtcgaacctttccgccgcaaaagaagaaaacctgcccatatgtcaggataccggcatggcctgcgtgttcgtggagctgggcaccgatgtgcacatcgacggcagctttgaagctgccatccatgagggcgtgcgccggggttacaccgacggctacctgcgcaagagcatcgtggcagaccctttgcgccggggcaataccggcgacaacaccccagcggccatcacagtgcatctggtggatggcgagggctgccgcatcacggtggcacccaagggctttggcagcgagaacatgagccagatcaaaatgctcaagcccgccgacggcgtggagggcttcaaaaagttcgtgctggacacggtgaagctggcaggctccaacccctgcccgcccatcgtgctgggcatcggcgtgggcggcagctttgacaaggtggcgtatctggcaaagaaggccctgctgcgtccgctggatgtgccgaaccccgacccctattacgcacagctggagcaggagctgcttgccgccatcaacgagctgggcatcggcccgcagggctttggcggcaggaccacctgtctgggccttgccattgagcagatgcctacccatgtggcgggcctgcctgcggcggtgaatgtttcctgccatgtgacccgccgtgcaagcgcggaactgtaagagtctccgccctctcaggccgctttgcgtccagctctcccaaagggagagcccttggcaaagacgtaaagtttgcgtggactgccaaggcctcccactttgggggaggtggcatcgcgtgagcgatgacggagagggcgaggatgccaaaggagaattgctatggaatacaaaattaccactccctgcacggtcgaggaccttgccccgctcaaggcgggcgacaccgtgctgctttccggtgtggtgtacaccgcccgcgatcaggcccacaggcggatgaccgaagcactggaaaaaggcgaaccgctgccctttgatctgaccggcagcgccatctactacgttggccccacgccggaacgcccgggccaggtgatcggctcggcgggacccaccaccagcggacgcatggacgccatgagcccgcgcctgctggaccttggcaataagatcatgatcggcaagggcaagcgggacgatgccgtaaaggcggctgtggtgcgcaacggggctgtgtatctggcagcgcttggcggggccggtgcgctgatggcaaaaagtgtgcagacgctggaagtgatcgcatggccggaccttggctgtgaagccgtgcgccgcctgattgtgaaggatatgccgctgacggtgatcctggatgcccacggcggcgacctgtaccagtccggcccggcggcatatctggaagcaaaataatttatcgcctttgcacaaaacgcggccgactaaaaaacggcaaaacagcagatttgcgcaggataaatttagtttgttttaacaaacttccgcgaattgcttgcacatcggcaaaaagtgtgatatcttgtactatatgaaaccgtggtgctttgcatcccggcacagacaggaggcaaacataccatgcagatccaccaatccgcagaagattatcttgaaacgatcctgatgctgagtcagcgtatgggcaaagtgcgctccatcgatgtggtcaatgagctgggctttaccaaagccagcgtcagcattgccatgaagaagctgcgcgagaacggctatatcgcggtggacggcgagggcaacctgaccctgctggaaccgggccgcgagatcgcagagcgcatctatagccgtcaccgtctgctgacccacttctttatgcagctgggcgtggacgaaaagaccgccgccgaagatgcctgcaaggcagagcatatcctcagtgagcagacgctggaaaagatccgtgagcgcgccattgagacggatgctgagcttggcaagactgtcaagtgatccccgcagcattccaagatcgtaaaatgatcccgttcctgaaaaggagcgggatttttttgtatggaaattgggcggcagatccctcttgcatccggggtgcgggtgcggtattcttataagataagaaggttttacagccaaaccgggaggaaacagccatggatgcagacgagatccgcacgcttttgggcgataacatttttgagcgggccaagaagtaccgcaagcgcatccagcagagcacctgcaccgtgaacgccgatggcgtgcgccatatttcggccatggtacagggcagcggcggcagctattactatacgcaggcatggctgcgggagaacggcagctttgtcagtgcgtcctgcagctgcccgtataaccagaacggcgagggcacctactgcaagcatatcggtgcattgctgctggacgatgccgaaaagaatgcccctgcaccggcggcaaagccggatgcgattcccggtgttgtgcgcggcgcggcgggccttgccccggaaccggcccggcgggacagctatgcctccgggctggaaatgctatttggcaaaaagtggcacggcgaaacgccggtgtcggacaacgaagcccgcaggctgctggatacctacaaggaagcagcccttgaaaaccttggtgtggacgagaccgcccagcgcaccggctttgcccatttggaaccggagctgaccctcgtacccggcgcacagccatggctgcggctgcgcatctcggacggcgggcggcagtatgtggtaaaaagcatcccgaacctgatggaagccgtcgagatgggcaaaagcgtcagctacggcaaggcactggcttttgtgcaccggtgggatgcctttgatgaagagtcccgtgcgcttttgcagctgctgcgccgtcaggtgaacgcaaggcagagcatggacaaagccgccgtgcgggtgtacggcggggccgaacaaggcccggcgggaggcatgatcctgaccggcgagatctttgatgaccttgtgcagctgtacgagcataccggttttttgggcgggtacgagctgcgggaaggtctgcccgtcattaccatgaccgtggagcgccgccgcggcggtgtgcaggtggaaggcgaacccgcactttccgctgtgcagggccttgactatgattacctgttcagcgaggatacgctctggcggctgcagcggcccgggtgcacccgcatcctgcccgcattgcaggcgctgggcggcaaaagcctgttctttaccagcgcagatgccacggccttttgcagctatgtgctgccggagctgggcagcaagctgaacatcgtggacccggaacgtctgctgctgaaccagatcccgctggaaccggtggtgcagttctatctggacgcaccggacagcttccgcatcgaagcacacgcggagtttttgtacggggaggataaggtcacgccgttcgtgccgtctccggcagggcttttgcgggatgtgcgcgccgagagccgggcaaagcggctgctggcctcttatctgcagcccggtgtgggcggcagagaggaagtgtacggcaccgctgacgaggacgagatctaccgcatgttggaggagggcgtgccggccctgctggccgagggtgaagtatacctgacggatgccttccgcagcctgcaggccgcgccgccccgcatcacggtgggcgtttcggtgcacggcagtgtgctggatctggaagtggataccggcgagttcccggtggcagagctgaaagacctgctgcgctccctgcaccagaaaaagcgctaccaccgcctgcgggacggccgtctgctgcggctggacgacagtctggaagggctggacgaactgaacgatacactggaactttccggggccaagctcaagagcggccacgccgagctgccgctctaccgtgcacccagtctcgactgggcgctctcgggccagaacggcctgcgtttcaaccgcgacgatgcgttccgccgcatcagccgcagctttcacgccgtgaaggacagcgagtatactccgccggaaagcctgcacaatgtgctgcgcaagtaccagcgggatggctaccgctggctgcgcacgctggacggctacggcatgggcggcattctggccgacgatatgggccttggcaagaccgtgcaggtgctcagctacctgctggccatgaaggaaagcggccagcgcctgcccagcctcatcgtctgcccggcatcgctggtgctcaactggcaggaggaatgccagaagttcacgccgcagctttcctgcgtggctgtggacggtgacgctgctcaccgggcagagctggcaaagcagtgggcggaagccgaccttgtggtgaccagctatgacctgatgcgccgggacgaggagctttacagtgggcagcaattctacgcctgcattctggacgaagcacaggccatcaagaaccacactacccaaaagtacaaggcggtgtgcggggtgaacagcaaagtgcggtttgcccttaccggcaccccggtggagaaccgcttgggcgaattgtggagcatcttctccttcctgatgccggggtatctgccgccctacaagaccttctgcgcccggtttgaaaagcctatcgtgcaggaggacgacaaagacgcactgcgccgtttgaaccagctcaccgggccgttcatcctgcggcgcatgaagtccgaggtgctcaaagagctgccccccaagaccgagaatctccaccgcatcgagctggacgagcagcaacgtaagctctaccttgccgctgtggtggacgcgcgggaaaagctgcgcgctgcaaagccggaggataaaatggcggtgttcgcagtgctcatgcgcctgcgggagatctgctgcgacccgcgccttgtggcagacaactgggacggcggcagtgccaagctggatgcctgcatggagctggtgacggctgctgtggagggcggacaccgcatcctgctgttcagccagttcacctccatgctggaactgctggcaaaacggctggacgaagcgggcgtgagccactttaccctgcagggatccaccccaaagccggtgcgtgcagagcttgtgcgccgattcaacagcagcgaagcggacgtgttcctcatctcgctgcgggcgggcggcaccggcctgaacctgacggcggcagatatcgtcatccactacgacccatggtggaacgtggctgcgcagaatcaggccacagaccgcgcctaccgcatcggccagcgcaatccggtgcaggtgtacaagctcattgcgcaggacaccattgaagaaaagatcgtggagctgcagcaggcaaagcaggaccttgccgagacggtcaccggctcggcagacggagcgatcctgtccatgaaaccagaggaattgctgcagctgctgcaagaggaataaagaggagaaaacatcatgaaagtctgggatctgcactgcgataccctcagcgagctgcgcaaagccgaacatgcgggccggcccaagagcttcgcgcagaacgatctgcatatcgaccttgaaaaattacagaaaggcgactatctgctgcagtgctttgcagcattcgtcaatctgggtgacaaaacgcccggagcggacccgctggtgacagcgctggaagagatcgaccagttcaagcgcatcatggcggcatacccggaaaaaattgctccggtgtacacggcggcggacatccgccggaatgctgcggcgggaaagatcagcgggatgctcaccatcgaggaaggcgcctgctgcaagggcagcgtgggggtgctgcgccggatgtatgagctgggcgtgcgcatgatgaccctgacatggaaccacgaaaacgagctggcaagcccgcagcggaaccccggcggggtgctggtgccccagaccgaaaagggcctgaccgggaagggctttgaatttctggccgagatggaacggatgcacatgatcgtggatgtgagccatctttcggacaagggcttctgggatatcgtggagcacggcacccggccttttgcggccagccactccaactgccgcgcactggcaccccacacccgcaacctgaccgatgagatgatccgcgccctttcggagcgcggcggcattgcgggcctgaactactatgcgccctttctggacaccgaccccacccacccggaaaactgccgtagcacggtggagctgatcgcgaagcatgcgggccactacaaacaggtgggcggtgcgcagatgattgcccttggcagcgattttgatggcatcgatggcccccaccagctggaaaatgctgccttcctgccgctgctggcggatgccctgcgcaaagagggctttaccgaggacgaggtggaaggtatctactaccgcaatgccatgcgcttttttgaggaaaacctgtaataacaacggagaatatgccgatatggataaaaacatgacgctggaaaagcgcattgctgcggagctgtactgctatcagggcaaaatgagcgtgttcgtggacgacctgcagggccataccgtggaggttggcgcggacgaagaatttgagacggcatccaccatcaaggcgttcattctcgctgcattgtatttgcaggcgcagcgcggcaaagcagaccttgccgaagagatcacctatgagcagagccagttcgtggacggcagcggtatgctgcgggcgctgggcgtgggcgcaaagctcaaggtgaaggacaccgccaccatgatgatcatttgctcggacaacatcgccaccaatatgctcatcgactatctgggactggataccatcaacgcctgcatccgggagctgggctttgcgcatactgtgctgcacaatccgctgcactttgaccgctaccgccggcttggcaccaccacgccgcgcgactacgcggcgctgttcacccgcattgcaaaaggggagctggtcagccgggaagccagcgcggagatgcttgccatcctgcgccagcagcactacaacaccatgctgacccacgattttccccagtactatctggactgcgaggagaccggcgcgccggagctgatctgggtggccagcaagagcggcagcatgaacgcctgccgcaacgacggcggcatcgtccacaccccctacggcgagtatgtcatcgtgctgatgaacaaggattttcacgatatcatcgagtacaatgaacaccccgccatggtgtacggtgcccgcgtctcgcggatgatcctggatcaggtactggcctgtgagggacggctgttcctgtcctgagacgcacgttctcccaaagaacaaaattggaaaaataaaaggaattataacaatgggtatcacgctctcgccatggatgatggcgtttctcgttctgatgacgggctttgcaggctttgtggattcggcagccggaggcggcggtcttatcagcctgccggcctatctgtttgccgggctgccgccccactacacctatgctaccaacaaattcagcgccgcctgcggcaccacttttgccacagccaactttttcaaaaacggtgcaatgaacctgaaggtgggcatccttgcagccattggcagctttgcgggcagtgcactgggggcacatatcgtgctgctgctcagcgatgaactgctgcgcaccatgatgttcctcatcctgccagtggcggcagtggtcattttgtggcagcgcgacctgccggaccagaaccgggacgacggcaccctgaacctgaaaaagatcctgctggcgctgggcatcggcttgggcatcggcctgtacgacggcatcgtgggcccgggcaccggcacctttgccatcattgcctttaccaccctgatgggctttgacctgcgcaccgccaacggcaacggcaaggtgctgaatcttgccagcaactacgccagcctgttcacctatctggtgaacggtctggtggtgttccacatcggcatcccctgcgccgtcagcaacattctgggcaacctgatggggtcccatttcgccctgaaaaagggtgcgcgcttcatccgtcccatgatgctggtggtgctggtgctgctgctgggcaagctcatctcggacgcagtgctgtgagcgccgggcgcgccagaggctccctctccgagggagctggcaaaaccgtcaggttttgactgagggagattgcgcccgtttcccgctgcaaaaaacaagccgggcagcccgcaggctgcccgactttgctcggatgatcttttctcggtggtcgcttattccagcaccagccctttgtcaaagaatgccagaccaaatgcaccggggcctgcgtgggtgccgataacgcagccgatctggcgcaccagcggttcgcccatgtgcagattttcacggaagtagttctcgatgggctgcacttcccgcaggctggaagaataaccggcaacagcggcaaagtccgggctgatgccgcccagctcttcgatcttcttgaacagggccacataggcaccgggcaggccgcgggccttaccggccatggctaccttaccgtctttgatggtgatgaggggcttgatgcccagcatcccgcccgcgacggccacagcggcaggcagacggccgcccttgcgcagatacttcagatcgtcgattgcggcaaccagatgcaggtgctccttggcgtgctccagatcggtggcgatctgcaccagcgttttgcctgcgtcacgcagctgcacggccagacgcaccagcagcgattcgcccagacacacggtggcactgtccacaaacagcacgttatctacattggcgaggtctgcggccagctttgcgcactgccaggtgccggacagctcgtgggacaggaagatgcccagcacttcgtccccggcggcagcggcttccagatagaacttctcgaacagctccgggctgggctggctggtggtgggcagcttgcggcagctggccagatgggcatagtactcggttggggtcatgtcgatgccatcccgcaggatgctgccatcctccagcgtcacgttcagagggatcacggtcacgcccagctgctcggcttcggcgggcaggatgtcggacgcagaatcggtgagaatacggatcataaaatacctccggatttccggtaaaaacaaattcaagtcatgtttcccgacgctttgcaataaaacgtcgggaaacattataccagaatccacagggaaaagtcaattacctgagcgaaaattgcttcgtcccagcgcaaaatacttgcgtaaaagccgctgcttatgataagataggcgctgagaaacgcacggcagggagggcaggccatggagcaaaaggcaaaaacaagggcgctgctggctgcgttcggctgcgcgctggcctacctgctggcaggcaaagtgctggcatttctgcctgccccggcgtgggatgtgcgggcgctgagttttgtgcaccactgcatcgctgcacctgtcgtggaggaactggtgttccgcggggccatccagcagctggcgcagcccttgggcagatggcaggccgcggcgctgcaggcggtactgtttgcggtgcagcacggcaccccggcgggcatggcgtgggcgcttggctgcggccttgtgctgggcgcacttcgtgaacgcaccggcagggtatggccgggaatgcttttgcatacattgaataatctgctggtttttgcagcaggataaaggggaacctatgaccgattctgaactgatgggccttgcgctggaagaagcccgcaaggcggctgcactgggcgaggtgccggtgggggccgtggtggcccgcaacggcgaggtggtagctgccgcccacaacacccgcgagaccgaaaaaaacgccctgcatcacgcagagctgctggccattgatgccgcctgcaaaaagctgggcggctggcggctgtgggagtgcgagctgttcgtcacgctggagccgtgccccatgtgcgccggggccatcatcaacagccgcatccggcgggtggtatacggcgcggcagacaccaaggcgggctgctgcggcagtgtgaccgacctgtttgcaatgcccttcaaccaccacccggtggtggagcaggggctgcgcgcagaggaagcacaggagctgctgcaggcgtttttcaaggatctgcgggcacggcttgcggcccggccgaagtggaaaccgcctgtatgaccggcatggaatatgaagaaaccgtaaaaaagtggaagctgcgtgaaaaagtaggcggcttccactttcttttttcggcaaattgtgctatattatttaatggtgttttgtcgaaacccatcttatgccgctgtctgccgcgccgagcaccggactttgaccggataagaaatggacgctgaacggacggcgatgggccgcacagacatctcctgcacggcatacctttgcagtgcagagatcacgacaggaggactatactcttgtacgaagatgaatttgaactgacgttcaatctgtcgggtgaggagccgcagccggaacaggctgcacaggagccgcccgtaccgccaaagccaaaggcggcagcacccgtggtggacgaacccacccgggtgatggtgctggaaaagccccagcctgtgccacagccggaaatgccggagcctgtgcaggaagagccggagaaaacaccggcacctaccgtgcaggcagcagccaatggccgctgtgtgctgatctctggcggcgaccgcggcattggtgccgctgcggcccgggcgttctatgcggcgggctaccgcgtggcggtgctgtaccacagcaatgccaaagccgctgcagagctggaaaaacagctgcccggcatcaccgccgtgcagtgcgatgtggcgtcccgcgccagctgcgagcttgcgttccgcaccgcagaacaggcactgggccgtgtggatgtgctggtgagcaatgcgggcatcgcccagcagaagctgttcaccgacatcaccccggaagagtggcagcatatgctggacgtgaacctgaccggtgcgttccacctgtgtcagctggcgctgccgggtatgatccgccgcaaggccggacgcatcctgaccgtgagcagcatgtggggccagaccggcggcagctgcgaggtgcattactctgcagcaaaggcaggcctgatcggcctgaccaaggctttggccaaagaagaaggcccaagcggcatcacagtgaactgtgttgcgcccggggtcattgataccgatatgatggcagcattcaccgccgaggataaggccgcgctggccgaagagacccctgtgggccgtcttggcagcgcagacgaagtggcgcagctgctggtgttccttgccggcgagggtgcgggctacatcaccggtcaggtgttcggcgtgaacggaggacttgtgatctgatgcgcaggaacactttattacaggatttcccccggcgggagcatccccggagcaagaaggagagagcaaaatgggcatgactttaaaggaactgttgacgaaaggcgaaggcaccatttcggccaaggaggccaaggcgctggctgcacagtgcagaatggatgaggaaacgctctacacccttctggaagaacgcggcatcaaggttctggaagaggatgcagagcctacgctggatgtggacagcatcatggccgaggtcgagaatgccgagaacaacaacgatgatatgggcatcagcgaggacgaggaagagcagagcgaggagaaccctgcagacctgaaggctgccatggacgaactgctggacgaccccgttaagaactacctcaagcagatcggccagatcccgctgctgagcgcggagcaggaggtggagctgagccgccgcatccatgccggtgccgaggcggcgcacatcctgcaggccgaccgccagaagtacggcgggccggagtacatcaaaaagaacagcgcccgcttctcgtttgaagaggatgagaacagccgcagctataccgaagatctggacgaggagggcaacgagaagcccagcgaggatgccgaggaaaaggctgccgaagaggaagctatggaggctgtggagaacggccccctgagcgacgaaaagcgcgctgagctgctcaagacccgccgcgatggcctgaacgcccgccgcagcctgagcgaagcaaacctgcgtctggtggtgtccattgccaaaaagcatgtgggccacaatctggcattcctggatctgatccaggagggcaacatcggcctgatcaaggctgccgagaagttcgactgtgaccgcggcttccgcttctccacctatgcaacctggtggatccgtcaggccatcacccgtgccattgcggatcaggcccgtaccatccgcattccggtgcacatggtggagaccatcaaccggatgcgtcaggccaccaaccagctggtgtaccagaacggccacgagccgaccccggaagagttggcaaaagccatggatatgagcgtggagcgtgtgcgtgagatccagcgcatggcacaggagccggcaagtctggaaagccccgtgggtgaggaagaggattcctctctgggcgatttcgtcgcagacgaaaacgccgaagcccccggcaaggccgcagaccgcgccatggtggcacagcagatcaatctggctctcaagagcctgacccctcgtgaagagaaggtcatccgcctgcgctttggtctggacgatggccgtccccgtacgctggaagaggttggccgtgactttggcgttacccgtgagcgtgtgcgccagatcgaggcaaaggcgatccgcaagctgcacagccgcaagtgcctgtccctgctgaacggcctgatcgagtgataaagtaagactccttcagtcatcgctgcgcgatgccagctccctcagagagggagcccttggcaaaaccggaaagttgtccgtactgccaaaggccccatctccgagggggctgtctgcgtaagcagactgggggagttctttcgtaaaaaccgacttttttgcaaaaattcagatttttttgcaaaaacctcttgccaaacggtggaaactgtggtattataattgagctgtgattgcgctgctatagctcagttggtagagcgcatccttggtaaggatgaggtctccagttcgaatctggatagcagctccagctcagacgccctgaagtcgaaagatttcggggcgtttttctttgtgtagatcgtttctgctgtgcgggtccggaacagggcagagcgggctttgaacggctctttcaggcttttttgcgtttttcgtaaattcatgcttgacaagcggacgctttttcgatataataaagcacgttccggcggtaagcgccgcgcgaaacttgagcgatcatggcccggtagctcagttggttagagcaccagcctgtcacgctgggggtcgtcggttcgagcccgatccgggtcgccatttgctgctatagctcagttggtagagcgcatccttggtaaggatgaggtctccagttcgaatctggatagcagctccacagcagacacctcgaagccttaggacttcggggtgtttttttgttgtatgactgcaaaagcaggctgacggagtgcggattgctttgagtacaaaaacaaaacgcacaggctccgaagaacctgtgcgtttatggcaggggtagtaagtttcgaactcacggcacgcggttttggagaccgctgctctaccagctgagctatacccctataggcattcgctgaatgctttgttattatagccgatgcaaaggcgaatgtcaagcatttctttcaagattcaggcatttttcgtgccgcagctgcaacagccttcttttttatcggatgcaggcagctggctggaaagctgttccagcgttacgctgtcgatatactggttgatcacctcatcaaggccggtccagaagggcagggtgaagcactgctcccacatggggcactcgttggtctcgctgccaaggcagggaatgggtgccacgctgccctcaatggcgcgcaggatctcgccggcggtgtagtcggcaggggctttggtcaggcggtagccgccctgactgccgcgctcgctttttacaaggcccacacgggccagcggggtcacgatctgctccaaatatttcaggctcaggttctgccgctcactgatctccttcaggctcacggtggtgcccggcgcataacgtgccagctcggccatcaggcgcagggcataacggcttttggtcgaaaatttcatggcgatcctctccttattgcttcctatagtatagcacgttgctcggattttgcaaaggtatcctcttgtgcaaacaaaaaaggtctgctatcataggatggataagaggatattataaggagtgagagtatgagtgagaagatcacggctgccgatgccatccgtctgctggatgcacacgaggcggctgctgtagatgtccgggagccggacgagtttgccgtgggccacatccccggcgcaaagctgctgccgctgggtcaggtgctgagccgtgcggctgaggtgctgccggataagaacgctgtatggctggtctactgccgcaccggccgccgcagtgccgatgccgtgcgcaagctggaaagccttggctacacccgcctgtacgatctgggcggcatcctgagctggccctatgagatcgagggcgactttgaagggcatttttaaaaagaaagaaggataactccatgtcgttccacgcaaaagattttgccggcagtcactgcggctgccgctaccagcaggactaccgccccaccttgggccgcgacggcaaaaaggaatccggcacgctggaggtcatcaagttctattacgatggtgccatccgctttgagcagcactgctacggcgaagccgcaaccttcgtgttcggcgtatgggcatccggcatggacgaggacggcaccctgcactgggtgctgcccgaccgccgcaagagctactacgacgaggcgtatctgcccaaaaagctggaccgcgtggacgaggcgggcaatctttactttgacggcagcaattttccgtggaagctggcggacgattttgccgaagataagcgctggggctaccccaagtggaaggtggtactgggaaaactgaccggaaagggcaaaaaaggtgactgaatcacgaaaatccagtattcatattgacatactagggaatgatatggtataacttatccgttgaaaggattccgcatctgcacagggcattcaaggctcccgcagacgcgttcaataagaaaggatcattcctatggaaaacatggaaaaagtggtttatctggataatgctgccaccactccctgtgctcccgaggcactggaattgatggtcaaagccctgagcggtgcctgcggcaaccccagcagccattacagtgtgggctatgaggctaaggaattcgtggacaccggtcgtgcgcaggtggcaaaggccatcaatgcaagtccggctgagctcttctttaccagctgcggctccgaggccgacaactgggccgtaaagggcaccgccttcaccaaggcacgccagaacaaaaagcacctcatcaccagcgcttttgagcaccatgccatcatgcacagcatggctgcactggagcgcatgggctttgaagtgacctatatcaagcccaccgccgagggctacatccgtcccgaggacgtggaagctgccatccgtcccgataccgcgctggtcagcatcatgatggccaacaacgagatcggcaccatccagcccatcaaggagatcgccgaggtcgctcacaagcacggtgtctggatgcacaccgacgcggtgcaggctgtgggtgccatccccgtggatgtgaaggaactgggcgtggatatgctgtccatgagcgcccacaagttcaacggccccaagggcatgggtgccctgtattgccgcaagggcgtatggccccagaacctgatcgatggcggcagccaggaggcccgccaccgtgcaggtaccgagaacgtggccggcattgctgccatgggcaaggcactggagatcgccacggcgcatctggatgagcgcatggcccacgagagtgagctgcgcgattatgtcatcgaccgcgtcctcaagaacatcccggaagcccgcctgaacggcggccgcagcccccgtctgcccaacaatgtgaacatcagcttcccgggtctggaaggcgagaccatcctgctggatctggatatgcacggcatctgcgcctccaccggctctgcctgcaactccgacagtctggaccccagccacgtcctgctgagcatcggcgtgcctgaggagatcggccacggctccatgcggttcacctttggcccgcagaacaccatggaagaagcaaaatatctgtgcgacgtgctggaggaagtgatcccccgccgccgtgctatgagttgtatgtggctgcagggccagaacacggcccgccagttcagcctgaagggagagcagtaattatggcaagcatgtatagcgcaaaggtcatggagcattttgcaaatccgcacaatgtgggtgagatccccgacgcaaacggcgtgggcgaagtgggcaaccccaagtgcggcgacatcatgcgcatgtacctgaagatcgagaacaacgtgatcgtggatgtcaagttcctcaccttcggctgcggtgccgccatcgccaccagcagcatggccaccgacctcatcaagggcaagaccatcgacgaggctctcaagctgaccaacaaggccgttgtggaagctctggaaggtctgcctcccatcaaggtgcactgctctgttctggccgagcaggccgtcaaggctgctctgtccgactactaccgccgtcagggcatcgatccggaacccatcgtgggtaagctcgaagaggactgcgaccactgcgagagctgcggccactgatccccgcattatggaagcctgctattggacaatgtgcccgatggcaggcttcttttttgtggaaatgggaatcctttacagcatattgaaaaatgatataatagagaaaagattgttgccttttcaaaaaaggaggaaatatgaaaaaatgcaaacttgcggcgatggcatggttaagtgtatgtattgttctgtttacttcctgtggcaattctgcgggggtgtctgctggttccactagcgaggtaaaaagtacggctgtaagcgaaagcacagcggaagaaaaacagccctatgagatacttcgtgagaaagaagatgaaacaaaacagattgcggcagacgaagaacagcaggtaaaagaacttcaagatgcgctgaatgcagttaatttctattatgaagaatttgacggcggtgatgctctgatgggggtaagccccaattgcgaaaataacgaaaaacagggaaaaagctgcattgtcccagttatttatgtttttggtccgtcggtggacccaatagcatgtatagggtttgattacataggtgatacgtatctggatatggatacggtggaaattgatacggttaactatagatatacctatggaaacacaacgtttataactgatgttcagaaggacaagctgacaatatctccgaatggcgatgaaaaaacagaagaggctgcatttcgccttgcgacagaagatgacttggatgcattagtagatattgtggaatcggatgaagttggtctgacattcgcaaaatacaacaccgcaaagccggttttcgtagaatgcgaaatgccggaagaagatagacaggctatcacagatgtgttgaatgcgtattacctgtatctgaatgccagtgagaaggtgcgtgcaaaagcacttgcagatatttcgtatacagaagttgaatcgtgaataggaggagataagaatgcggagaaaaatttcagcgatccttgtaacagtgctgataatgctgatggtaatgccaatgggggcttttgcggcagtgccttcggtgcaggaagtggaaacgctgattgcacagatcgggacagtcacgcgcgagaaccgcagtgcagtcgaaaaggctgtcaatgcttataaccagttagacgatgcttctaaagcgggcgtgtcaaattttgatgtgctggccgaagcacagcagattcttggcatcaaggacgcgctggcgaaattgaatgtcgaacacgatagagtagaaaataattacacaatatcggattcttatgttgagagtacgctgaatacagggctatgtatgattgcaccgagcattcgtgtttatggtgatagagacgaactggttttaatgatttcttttgtctatgttggagatgaactcctaaatgcaaatagggtcatcgtgcgagtaggggataacaaatatacttataatcaagatgcctttagtgcgatcggccgagatatttgtaaaatcaatacgggtaaactcaaatgggtggagggttttgtaacaagagcagaagatttcgatattgaactgctgcgggatgcattaagttcacaggaagcaattttccgatttagcggatatcagaactatgactatgtattaacgcagcaaaatcgtcaggctatcacggatgtactgaatgcctacaatcttatgtgctctgtcagcccggacgtattgcgcaaagcgctggcatgacttttgaactgtgagaacaggccgttttgaaaagttggcactgttgtatcctatccgatttgtaataaactgactataaaatatcataagtttataaaaacaccctgttcacctactcgttcacgaaaaattcatatattgttcagaatgagttcaccacttttcggtataagtagggcaacacaggcgcaaagagcgccgaactcccacggaagcggacgaagaacagggcaaagaacggttcgcggcacgcactgcaatgcaggtgcgtcggccccggaaaacgtcccgccgcacaggaaaggaaacgagttagtatgaaaattggtttttgggaacttgtcgtcatcgtgatcgtggcgttcgtgttcatcggcccggatcagctgcctgtctacgcaaagaagatcggcaagatgctgcgtgaactgaaaaagtacaccggcgctgcttctgaggagatccagaagaacgttgtggagccgctgaatgagatccaagctcccttgaaggaagctgttgccccgctgaccgatatcaagaaggatatcgacaacagcgtcaaggatgtgaccaagagctttaccggtatcggcaagaccagcaaggaggaagctgccaaggcagaagccgccgaggaagtgaccgagctgaccgaggagccggtggaagagctggaagaggacgctgcatctgccgccaaggcagaggagagcgctcccgctgaggagaccactgcacctgccgagaaggccgaagaacccgccgccccggttgaaaaggctgagcctgccgcagaagcggctcccgcacaggaagctgccgaggctgttcctgcggccgagccggtggaggaagaccctcgtcagaatgatgttctgccgaaggactgattacttactggatgcacccgcgcccgcggttgcctgatacatgcaataagcccgccacgcggcgcggcaaagtaaaaaggagatttttattatgcgtattggtactaacgaactgctgatcatcctggtcgtcgctctgctgatctttggacccaagaacctgccgaagctgggcaagatgttcggcaagaccatcaacggcttcaagaagggcatggaggacgaggaaggctccgatgattccgaggagaagaccgagaagcaggtttccaagaaggacgaagacgaggagtaattgtggctacgaacgttaagcgcaaaaagaaaaaagccgaagtcatggcagaggacggcagcatgacgctgaccggccatctgaaagaactgcggaacaggctgatcatctgcgcggtggtgttcgtggtgggtgttgtggtctcgctggcatacgccgaccgtctgatcgatctgctcactgccatgggccgcgactattacgagtttgtttccattgccccgcaggaaaagctgatgcagtatttccgcgtctccattctggcaggcgtggtggtcactgtgccggtggcgttctaccacatctatgcatttgcaaggccgggtctgaaacggagcgagagcaccttcttcaagctggtcatgctgctgggtcttatcctgttctgcgtgggcgtgctgttcgcctacaagctcatgatgcccttcatgctgcgtttcctcagcaccggcatcgagggtgccgagtacatccagaccaccaccagtatcgagagctatgtcaacctctgcttgaccatgttcatcatttttggctgcgtgtttgagatgcctctgatcaccatcatcctgtccaagatgggcattatcaacccgcagctgctcaagcaggtgcgcggcgttgccatcgtgatcatcttcttcatcgcggccgttgtcaccccgccggatatcgtgtctcagtgcatggtggccggccccatggtgctgctgtacttcatcagcatcctcctgagcggcatcttctataagccgaaagaggacgatgatgacgaagatgacgaggatgaggacgaagagtaagttctgacttcaggttttctgttttatcattgcaaaagcaaaggctgctgcgccatttggtacagcagcctttttgtatgtggaaaatgcttccggtgcagagcgtaatcgcgtggggcagattctatggcttttgcaaaaggcattaccgccgaatatgtactcttttgcacgcacaaaagagtaccagaaaggacggcggtgcccgtagggcatgaaagccccggtggggctttcaaggcgcagaccggtttgcgcagcaaatgctgtgtgttcaacacagcaaggtctccgctactttcgaggcgcgggaggcggcgggttgcggctccctgcgtctgcttcgtgccgtgaacggcactcgcatcctgcaggccgctgccacaactcgtccagagcgaacgcggcggcaattccaaatcgttgctgctcagtctatacaagccacccgccctgtgctagaatgaaaccaacaaatcaaaggcggtgaaaccatgcacccactcccggaatatcctcgcccggccatgcgccgggacagctatgagaacctgaacggcctgtggaagtacgccattacccagacggcagaataccccgctgcgtgggacggcagcattctggtgccctactctccggaaacaaaggcctccggcgtgggccgcaccctgcagcccggccagtggctgcactaccactgcacctttgctccccctccgggagaagggggtcgggtgctgctgcacttcggtgcggtggacgatgcctgtgcggtgcaggtgaacggccatctggtgggcggccatcggggcggctactggcccttcacgctggatatcaccgcccagctcaacgatacgggccgcaacagcctgtgggtggccgtgcaggaccccacggacggcggcacgcaggcacggggcaagcagaccctgaagcccggcggcatgttctatccggcccagagcggcatctggcagacggtctggatggagcgtgtgccggaaaactacatccagtcgctcacggtcacgccggactacgatgcccgcaccgtgaccgtgaaagcccatacttccatgcccggaggtgcagtgaacctgtgggccgtggtgcgggccgggggcgtgaccattgccgaggactggggcagcgacgaagcggaccgggacggcgaggtgacgctgaacatcccggaggaacatttctttccgtggagcccggataccccgtttttgtatgacctgaccgtgggcaccacacagggagaggaggagcagttcgacaccgtgcacagctactttgccctgcgcaagtggagctgtgagccggatgcgcggggcgtgctgcgcttctgcctgaacggagagcctatcctgctcaacggcctgctggatcagggctactggccgcagggcctgtataccccgccttccgatgcggcggtggagcgggagctgagcgaggtgaaagcgctgggattcaatctgctgcgcaagcacgccaagatcgagccgcagcgctggtactaccactgcgacaggctgggccttgtggtctggcaggacatggtgaacggcggcagcagatacaacctgtggttcgtcacctacctgaccaatgtgctgcagccccttgtgcgccgcctgcccgacgcagagccgctctggggcctgctgagccgcggaaaagcatccagccgggaaacataccgcaaagagctgcaagccaccgtggaagccctgcgctgccatccgtgcatcggctgctgggtgcccttcaacgaaggctggggtcagtttgatgcggccggggcagtgcaggccatccgcacgctggacgatacccgccttgtggacgaggccagcggttggtatgatcagggcggcggagatgtgtgctccatccacaactatttctatccgctgcatgtaaagcccggaagccgtaccgtggccctgagtgaatacggcggcattgcatggcccatgccggggcacgaagcaccgggcaaaacctacggctacggcacggccaagagccgcgcagacctgaccgcccgctgcaaaaagctgcaattgggcacggtgctgccgcagctcaaaaaaggactctcggcgctggtgtacacccagctgacggatgtggaagatgaggtgaacggtctgtttacctatgaccgggccgagatcaagccggatgccaatgccgtccgctcggtgaatgctgcccttgccgcagagttcgcaaaagtgacgcggtgaaagaaaaaactccctcagtcatcgcgcagcgatgactgagggagttttatgttacagcagctctcagctgttggcgctgttgttcacgatctttttggcgggcagtttgttcatggcagagctgtccagatcgtgtgccagctctgcaccgcctgcggccagtgcgtcgtccagctcgccgcccttcatatcgctcaggatctggctgcgcaggtcgtccagcgaagaaacgctcagcgggtctacacgcaccatcaggagcagggtgttgctgttgatctgcacggcagcggcctcgccgtaggaaaggctgcgcagagcatcggcagcaccgtcctgcgtaaaggccgaagcaacatcgctctcggtcagcagctcggtctggacgctggcgctgtcgtcggaagttttgccgtccagcacagcgtagatgtcgggcagggcattctgtgcggcctcatgcagggcactcacctgatccgagaccgtctcgccgcctgcagcattgacgctgtcggcagcggcctgtgccagcttgagcatctcggccttctggtcatcgtccgcaaaggcgtaggtgctggtattgtacagcgggatgctgatgtagcagatctcatacatgctgtcgtccagatggctggtcagctcgtcgtcctccaccggggtctcgccgtccgggccgtagaccatatccagcagggcggtgtgctccacctgcagacgttcatatgccttgacggtctccagaccaatgccgttggcggtgtaggtgtcgccgtactggtccatcatctgctgggcataacggtcggcagtggaaagctgctctgcagtcagctcaccgcccagcgccttgaagcgggcatccacagcggccagcgtttccagcgtttcctgcgttttctgggccacatagtcgctcacaactgcggtctcgccgctgtcagagtcggtggtgatggtctctttcaggaaggcttttacgtcggtggtgtcctgatcggtgccggcaagctgggcggcctgctggtaagcaccgtactgtgccagcagatacatgccggaggtgatctcaaaatcaccgatgctgcccacggtgtccggggcggaaatggtgcagcccacaaggctgaacaccagtgcaagtgcgcagatcagcgcgagaagtttctttttcatggtaatgctcctatgatgtttatttttgctcggcggaggcaaggatctctgccatcgccttgaggatgctttgcagcagctccagcggcttttcgtcgggctgaagcgtgaccgagagatagggccggttgcctgcaccggcggtgacgcggccattgaaggccaccagcaggccccggatcatgggcagctccagactttccagctgcagggtgagggtgtcctttttctgggtcacttcggtcacgcccacagcgctggcctgcacgcgcaccagcgacacgttcaccagatcgctcaccgagggcggcgggtcgccgtagcggtcgatgagctcgtccagcacatcggcggcatcctctgccgtctggatggcggcaatgcgcttataagcttcaatgcggcccgggccgtctgcgatatatttctccgggatgaaggcatccacccgcaggtccacaaggcattcgctcttgtcccgccggatgggttcgcccttggcccgggcaatggcctgccccagcatcttcacgtagaggtcgtagcccacggcctccatgtggccgtgctggctgtggcccagaagactgcccgcaccccggatctgcagatcccgcatggcgatgcggaagccggagccgaaggccgtgaactcccggatagcggagagccgcttctgggcgatatcggtcagggtcttgtcccgccggaaggtgaagtaggcataggccttgcggccggagcggcccacccggcctctgatctggtacagctgggcaaggcccatgcggtcggcatcctcgatgatgagggtgttgcagttgcgcacgtcgatgccagtctcgatgagggtggtgcacaccagaatatcgatctcgccgttcagcagatgctgccacacggggttcagctcttcctcggtcatcttgccgtgggcaatgccgatgcgtgcgccgggcaccagcttgctcacatgggcggcgcaggcttcgatgttgtccacccggttgtgcaggtagtacacctgcccgccccgggcaagctccttcttcatggcttcggcaaggatgacgtcgttgtattccagcacaaaggtctccacgggctgccgctcgatgggcggctgctcgatggtggaaaggtcccggattccgctcatggccatgttcagcgtgcgggggatgggagtggccgacagggtgagcatgtccaccccgatgaagttctccttgagcttttccttgtgcttcacaccgaagcgctgctcttcgtcgatgatgacaaggccgaggtcatggaacttcacgtccttggacagcagccggtgggtgcccaccacgatgtccacactgcccgactgcaggccccggagggtctccttctgctgttttgcggtgcggaagcgggacatcatctccacctttacggggaaggcttccatgcgggaaagaatggtgttgtagtgctgccacgccagcagggtggtgggggcaaggatggcgcactgcttgccgcccatcacgcacttgaaggcggcgcgcagggccacttcggtcttgcccacgcccacgtcgccgcacagcaggcggtccatgggccagcccttttccatgtcctgcttgatctcggcggtggcgttcagctggtcgtctgtctcgtcgtagtcaaagcgggtctcaaagtcccgctgccagtcgccgtccggcgggaaggcgtagcccgtggcctgacggcggcgggcgtagagctcgatcagttcctgcgccatctcctcggtggctttttttaccttggcgcgggtacgctgccactcggcaccgcccagctttgccagctttaccttttcctcgtcgccgggggcggtgtagcggctcagcaggtccagctgggtcaccggtacgtacagcacgtccgagccggaatactgtactttgaggtaatctttcgtggcaccctgcacttccagccgctggatgcccgcatacatgccaatgccgtggctctggtgcaccacatagtctccgggcttgatgtccgaaaggctggaaagggcgttcttgttctttttgcgctttttggtctcggcggaggtctcttcctccaggccgtgcctgcggctggacagcaccgccgcatgggcaaacggaaaggtgcacccggcggtcagatggcccggcagcacctgtacgatgccttttgtgggccgcacatcccggctcatgctcacggagtagcccttgtcggcaaggtcgcgggtgagggcggcggcacccttgggcgttccggaaaacagggtgacggcatagccctgcgcaatgagggggtcaaggtcttctcgcagggagacaaggtcgccgttccagttgggggcggcaaaggcctcggcgttgatgaggtctttcagcttaaattcgttcatgccgcgcaggaagttctcgcacagcagggtgctctgcttctgggcggcagcggcaaggtcgtccatggtctggtagagtacatccagcccggggcagagcacaccctcttccaacaggccggtcagctcttcgctgcgacggaactcggtggccttctgggcatcccggatgccgcccacctcgtccagaatgaacagcggtgtgtccagatgatccagcagggtggccgggctcggatagcgcaggccgtagtatttatccatggcttccggcatcaggccggagtccagctgagcaaggtcggcttccgtggccttttccagtgcggtgcggtgccggccgcgtgcctttttgatggcggcacgcagggcctcggcagtctcggcggtatcgccgaacagcacctcgcgggcaggggaaagatagatcttttccagtgcgctgtcccgccgctgggtgagcaggtcgaaggaagaaatggaatcgatctcgtcgtcccagtactccacgcgggcaggctggcgcatatccggcgcatagatatccacgatatcgccgcgcacactgaactgtcctgggccgtccacctgactgcgccgcacatacccggcggcgaacagccgggccacaagaccctcgcggttgtacaccatgccgggtttgagggtaagagtgttctttaaaaattcatcccgaggcacggtgtactgcaacagcgcttcggcgggcacgcagaccgcgttcagccgcccgcctgcaagggagcccagcaccgaaaggcggcggtactcgtactcgcggcccgcgccctccactgggcgcagcataaagtcccggggcgggaacacggcggcagaaaggcccaacgctttgaggtcgtccgcaaagtgggtggcctcggcctcgccgggggtcacgatgcacagcacccggccaaggtctttttgcagcgcggcgtacagcagggcacggcctgcgggcggcagaccgaacagcgcggcaggaccaggctttgcaaagctggcggcgatcttctgatattccggtgtggccttgagtaaggcttcgtacatggaaaaacctcctttcctgctgggatgacgatttgaaattgccgccgcagacgggttgcggcacccagcatctgcttcacgccttgagcggcgctcgcatcttgctggccgctgccccaacaactcctccctgtttccgccactggcggcggtcgtcgctgttgcgctttggcaatggcagaggaatgattattttttatttgcagcagagaaaagcctgcgggcttttctctgctgctttttcacgagagggggcgtgacctcaaaatgcatcaaagaacataaatgcagcttgccagtgctgccccactcggtgaaaatgtgtttggagcggcccgcaggccgcgacaaacacaaacaataaaaataaaattccgctgaaaatgcccagagcgcaagcggagggcgttttaaatggggttcttacccgttatatttgctctgtgccagactcagcttgccgtccatgatgagctttgcagcggcttccagatcagggtagcggccgctcagagccttggcatcctctgccgggaacttgcccagcacccacgcggcaaggtcgtagtccgggtggggcttggcacccacgccgatgcggatgcgggggaagttctccccgcccaagcgggcaatgatgctcttcaggccgttatgtccgcctgcggagccggagggccggatgcgcagcttgccggggttctgggtgatatcgtcgcacagaacaatgacgtggtcggcagggatcttgaaaaagcccgccgtgggggcgatggagtcgcccgaaaggttcatgtaggtcaggggcttcagcagcaccaccttgtggccgtccacctcgccctgtccccacaggccctgaaatttggtcttgccaacagagatgttccacttgtcggccagatagtccagcgcggcatagcccgcattgtggcgggtgccgtcgtattttgtttccgggttgccaagaccggcgatcagccagatgtcatttgtattcatgagtgttatattttcctttttgtgataaattgtccgatgcaagtcctaagtataacatacgcgcgtgcaaaaagatatacattataagcgaaaaagatgcacctgcaaacaaaaaccgccgcgcagggccatcctgtgcagcggtctgtacgcgaaaaacggacagcttacttgctctgctcgtcttccagcttctttttcttggcaatgtaggcttccatcttgggctctgcccagccctccagattggtctggcggtcacgggcgatgcccagtgcctgtgcgggcacgtccttggtgatagtgctgccggcggcggtgtaggcaccatcgcccaccttcacgggggctacaaggttcgtgttgcagccgatgaagcagtaatcgccgatctgggtgcggaacttatccttgccgtcgtagttgcaggtgacggtgccgcagccgaagttgcagtacttgcccacatcgctgtcgccgatgtaggtcaggtggctcaccgtgttgccccgggcaaagttggagttcttggtttctacataggcacccagatgcacgccgtagtcagtgacggtgttcacccgcacatgggtgaaggggccgatgttgttgtgagggccgatgtggctgctgtatacctgactggcgttgacggtgctgccctcgtctacgatgctgtcctcaatgagggtgttggggccgatgatgcagcccgcaccgatgaccgttctgccgcgcaggatggtaccggccagaatgacggcacccggggcgatgaccacgtccggtgcgatctgcacggtgcggctgtcgatgatcacgccgtttgcaatgtgctgcagcagaatgacctcgcgggcggcttcggcggcatccagctgctcacgcgctgcattcagcgcagcagaagaaacagaattttccatacgatagatctcccttccggcacggcggctcccggcgggtggatgataaggcctgacccggaaaaatgatgcatccatatccaaagatggatacaacagaagctttgcgccgacaaaaaagaaaaagctgaaattacagggatagaaagttgtatccaacagacggataatccgcgtcagaaaacgaaaaacctctcgaactttctcccattctatactaccttaaaacttggcaaatttcaagggatttgcataaaaaataacagacaaattcgggattttgcatggtggaaaggaatggattttctggtataatagtttagcattcacaaacaatgttcatcggtcgagtttttaagacaaggcaaacgatgagactgcggtgcggctgtgctgcagtcacgaatgggaggtaaacaacgcatgagcaaaaagtatctgtactacttcagcgaaggcaatgatgctttcggcggcgacaaagtcaccatgaagaatactctgggcggcaagggtgctggtctggcagaaatgaccgcagccggtatgccggtgccgcagggtttcaccatcaccaccgacgcctgcacccagtattatgcagacggccgtcagatcaatgacgagatcactgctgatatctttgagcacctcaagggtctggaagagatcaccggcaagaagttcggcgataaccagaaccccctgctggtctccgtccgttccggcgcacgtcagtccatgcccggcatgatggacaccatcctgaacctgggcctgaacgacgaggctgttgaaggtctggcaaagaagaccggcaacgcccgttttgcatacgactgctaccgccgctttgtgcagatgttcgcggatgtcgttatgatggtcccgaagagcctgttcgaggtcgagatcgacaagatgaaggaagccaagggcgtcaagaacgacgtggacctgactgctgatgacctgaaggaactggtcggtgtcttcaagaagatctacgaagagaacgagggcaagccgttcccccaggatccccgtgatcagctgatcgaggctgtcaaggccgtcttccgcagctgggacaacccccgcgcaaatgtctatcgtaagatgaacgagatcccctacgagtggggcaccgcagtcaacgttcagcagatggcattcggcaactctggcgaccgctccggcaccggcgttgcattcacccgtgatcccgccaccggcgctaagaagctgatgggcgagtacctgatcaatgcacagggcgaggacgttgtggccggcgtgcgcactccttctcccatcagccacctgaaggatcagatgcctgaggtgtacgatcagttcgttgagatcgcaacccgtctggagaactacttccgcgatatgcaggatatggagttcaccatcgaggacggccacctgtacatgctgcagacccgtaacggcaagcgtaccgctcaggctgctctgcagatcgcatgtgatctggtggacgagggcatgatcaccgaacaggaagctgtcctgcgcgtggagcccaagcagctggataccctgctgcatccccagttcgacgccgctgccctgaaggccgccgaggtcgtcggcaagggtctggcagcttctcccggttctgcctgcggccagatcgtctttactgctgaagaggcagaggagatggtcaagtccggcaagatgaagaaggtcgttctggtccgtctggagacttctcccgaggatatcgtgggcatgcaggtttctcagggcatcctgaccgtccgcggcggcatgaccagccacgcagctgttgttgcccgtggtatgggcacctgctgtgtctccggctgcggcaatgacaacgaggtcaagatcgacgaggaagcaaagaccttcgaaatcaatggccacaagttcgccgagggcgactggatctccatcgatggttccaccggcaacatctacggcgagcaggtcgctaccgtggccgctaccggcaataagaacttcaaccgcttcatgggctgggcagacgctgctcgtcagctgctggtcatgaccaacgctgataacccgcgcgacgcacagcaggcagtggatctgggtgctgagggcatcggcctgtgccgtaccgagcacatgttcttcgcagaggatcgcatcaaggctgtccgtgagatgatctgcgcacgtaccgtggaagagcgcgaagctgctctggccaaggtcgagccgttccagcagggtgacttcgaggccatgtaccgcatcatgggtgagcgcccgatgaccattcgttatctggatccgcctctgcacgagttcctgcccaccaaggacgaggacatcaaggagctggctgccgatatgggcatgacctttgatgacctgaagaacgtggttacttctctgcacgagttcaaccccatgatgggccaccgtggctgccgtctggctgttacctaccctgagatcgcagctatgcagacccgcgctgtgatcaaggctgctctgaacgtctctgctgagaccggccatgtgatcaccccgcacatcatgatcccgctggtcggcgaggtcaaggagctgaagttcgtcaaggacgttgtggtcaaggtcgcagacgagctgatcgctgctgcaggcgttgagatgaagtatcaggtcggtaccatgatcgagatcccccgtgcagccctgactgccggcgaaatcgccaaggaagccgagttcttcagcttcggcaccaacgacctgacccagatgaccttcggcttcagccgtgatgatgccgccaagttcctgggcgcatactacgagaacaagatctacgagagcgatccgttccagcatctggatcagatcggcgttggcaagctggtcaagatggctgcccacgacggccgcgagactcgtcccgatctgggtctgggcatctgcggcgagcacggcggcgaccccacgagcgtggagttctgccacaatgtcggtctggactacgtcagctgctctcccttccgtgtgcctatcgcacgtctggctgccgcccaggctgcaatcaagaaccctcgcaagtgattgcgtaagggcttaaaaaagcacaaataaagcaaacgaaccgccccggtttccgtaacaggaagccggggcggtttttgtgttgactggcag

SEQ ID NO: 1114 - DNA, 24103 bp, Unknown
  gut microbiota DNA sequence
atcacgcagaaacacataccagagcttgtgctcctgtggggtcagattacggcgtaatgtgcgcgctgtgccaagcattttattgtttttatttacagttgcatgtttcatggacggcttcctctacggcagcggcctcgccctctcaggcgcattcgcgccagctcccccaaaggggggagcccttggcaaaaccggaaactttgccgtactgccaaggcctctccctttgggagaggtggcatcgcgtagcgatgacggagagggctagcccgctgcccttgttcatccttttacatcacgatatgcgccttgctggagccgtcggtgcgcagcagctgggccagatagatgcaggcgtgcaggtagccctgcgggccttcgccgatgaagtggccctgacagccaaaggacaccacgtccgtcttgcggaaaggctcccgctcgtccggggcgtgcagcatcacttccacggcgggtacgccgcacaggcgcagcgcatccagaatggccacgctgtagtgggcgtaggcaccagggtttagcacgatgccgtccacccggcccgctgcggcctgaatttcgtccacgagatcgccctcgtggttggactggcagcagtcggtctcaatgcccagctgttcgcagcctgcctgcacatagtccatgatggcgttataatccagctcaccgggtacgcccggctccgaccagcgcatgatgttgaggttcgggccgttaagaatcaaaaatttcatccagtgcctccatggcggcatgcagggcatcgtccagcgtgccgttgttgggaatgacggcatctgccgctgccagatacagcggacggcgctgtgcttccatctggcgcagtgcgtccatgctggaagaaagcggcctgccgccgcccacggccagtgcatccaccggccggtcgatgaacagaatgatgccgttctggtgcagagcacgcagattctccggcttttttacaatgccgccgccgcaggaaatgagctgtcggccctctttgccaaagcgctgtgtttcggcagtttcctttgtgcgaaagccgtcctcgccctcggctgcaaagatatccgggatgctgcggccatcggtctttacgatctcctcatccaggtccacaaaggtacggccaaggctctttgccagcatcctgccgagggtggtcttgccggaagagggcatcccgatcagggcaatgttcagcatatcccggcgcagtgcggcggtgatgcgccgaatttcaaccggcgcatcctcgaacttgcggtccagaaaatattctgcggcatacaccgcctgcgccaccagcatttcaaggccgcccacagccaccggcacgcccgcttcctcggcgcggagaatgagctcggtcttgtcggggttgtacaccacatccaccacagcttcaaggcctggcatggcggcaacgtccagattgcacacccccacattcgggtacatgcccgccggggtggtgtttaccacgatctgtgccccgctggaaacggcctcggcatagctcagttcgcccttttccgggtccggatggcggctgacggtgagcacctttgccgcgcccttgtcccgggccacagcgctggtggtgttgtgggtgccgccggtgcccagaataaccaccgttttgcctgcaaagctcacgccgtgggcgtcgcacaggtgggcaaagcccatataatcggtgttatagccgtagagcaggccgtttttgttcaccaccgtgttcaccgccccgatggccttggcccgcgggtcgatgtaggagcagtattccatcaccagctttttataggggatggtcacattgatggccttgaactgccgctttgccagaaaggcccgggcctcttcctcggtgggcagagggcacaggtcgtagtggtagccgcagagcatctcgtggatgatcttggagtaggagtggccgagttttgcgccgatgagtccgtattccattttactcgtcctccttccggaagctggtggggtgggtcatccatgccgcgccgtagcgtgccgtgagcaggtcgcccacagccagtgcggcggcgcaggtctgcacgatggcggctctgggcacgatgcagggatcgtgacggccctgaatggacagctgtgcgtcctttttggcaagatagtccactgtgtcctgctgcttgtagatgctgggtgtgggcttgaccacggtgcggaacaccaccggcatcccgttggcgatgccgccgttgatgcccgcattgtggttggtggcggtcaccaccgcaccctccggtgtcatgcggaaagcgtcgtttgcttcggagccgcgcatcccggcaaagccgaagccggtgccgaactcgatgcccttgacggcggggacggagaacaccagatgtgcgatctcgctttccacgctgtcaaaatagggctcaccgatgcctgccggcaggccgaggatggcagtttccagcatcccgcccacgctgtcgccctcggctccggcggcacggatggcggctttcatgggttcttctacgctctcgtccagcaccgcaaagccctcgggcttgctggcaagggcttccacctgcgcagccagctgtgcggcatcatcctgtgcaaagcgggtgtccgcaatgccagcgcactctgcgatatgggtggtgatgtcgatgcccgcacggtgcagtgcgctcagcacaatggcaccgcccgccacaagggcggccgtcacccggccggagaagtgcccgccgccgcgcgcatcctgaaagccgtggtacttggcgtaggcggtgtagtctgcatggccggggcgcagaaggtctgcggtcttggcgtaatcgccgctgcgggtgttggtattttcgatcatcagggcaatggcggtgccggtggtgcggccgttcaccacgccggacagcagctgcacggcatctgcctccacccggggagtggacaggccgtcgccccgggcacggcgcttgtccatgcaggcggcaagaaatgcctcgtccaccggcaggcctgcggccatgccgtccaacaccgcgccgatggcgcggccatggctctcgccaaaaatggtcagcgaaaggtcgctgccgaatgtatttttcatggcttactcctcaatgcccagcaggggacgcaggccctccaccgggatggtctcggcgcgccagcagcccagacccggcaccttgataatggtgatctggccgctctgtgcctttttgtcgtgcagcatctctgccagcaccttttccttatcgtaagtagtgcgggtgggcaggccgaggcggcggtacaccgcgcgcacccgcttctgcagtgccttggattcgatcatgggcagcatgcccagcgccacgcactcgccgtggtaaaggcccacggtgcggcggcccttgatgcccttgacggcctcgatgccgtggccgatagtgtggccgaagttgagcgccttgcgcatgccctgctcggtctcgtcctgctccacgatgttcttcttgaaccgcaggctgcggcagatgatctcgccgatctgggcatccacgtcgccattttcaaagatcgcgaacagctcggggtctgccagcaggcttgccttgacggcttctgccagaccgttgatgaagtgacggcggggtagagtggcaagggtgtccggatccacgatgacgagcttgggctgccagaaagcgcccacgatgtttttggtatcgcccagatccacggcggtcttgccgccgatggaggaatcaatcatggaaagggtggtggtggggcagttgatgaagtcgatgccccgcatgtagatggaagcggcaaaaccggccagatcgcccaccacgccgccgcccacggcgatcaccagatcgccgcggcccatgccgaactccagcatctgcttgaggacggattccagaattttaaagctcttgctggcttcgccctgcggcaccgtgatgatgtgggcatccttgcactggtcggccaccatctgggcgtactgtgcgggcacaccgctgtcggtcacaacggccacacggcggtccagccgggcgaactggtacaggttttccagcgagccgctcttgacgatgatgtcatagctgcgctcgcccagattcatggtcagcttggttccgataaattcactcatttggtatacactcctaacagccgcacggtacggcaggtgcggtcaagctcacgcagcagcgcggcggtctcgtcggcggtggggtcacccaccagctccacgtaaaaataatattcaaacggcacatgaggcatgggccggctcttgatggactccatattgaagccgctggcaccgatgatctggatcacctcgcccagcttgccgggcttgttgtccaccgtgaacagcagcgagaaccggttgccgccggtgggcttttcgcggctgagcacgataaagcgggtggtgttgtcaccgtcggtgttgatgctgggcaccagcacctccagcccgtacagtgccgccgtctccacgcttgcaatggccgctttggaggagtcgccgctttcggccacgaactttgcggccatggcggtgttggccatggcggtggcgggcaggccgaactgccttaaaaaggtctcgctctgggcgatggcctgctggtggctgtagacgcttttgatctggtcgagttttgtgcccggcagcaccagaagattctgggagatgggcagatcgtacacatccaccacccacagcgccggatggttatagcacagatccagcacggcggaaacatcgcccgcatggctgttctcaaagggaacgacgccccgggcagcatcgccgcgttccaccgcgtcaaacacctcgtcccaggtggggtagctcacagcctcggcgtgggggaacagcgcccggagggcaatgtgggcaaaagcgccttccacgccctgataggcggcgcggttttggctcagcaccacggcttcgtactgctttgccacgtccatcaggttctgcacgtggtctttatagtagggccgcagggccgggtcctgaatgcgggccgcagccttttccagcactgccgtctcgcgggcggcatcgtaaacgggcaggccatgggctcttttgtattcggccacctgcagcacagcggccatccgccgttcaaacagcgcagccagctgggcatccaccgtgtcgatctcggcgcgcgcctgttccagtgcgtccatgggttcacatccttttgtatgtatgataaataccatcaagataatagatacccagtaagtataccataactgggacggagaaacaacaaaacctccggcgtttcaaaggggagaatatttcaaatcagatatgtgtaaaaagaacaaaatagaaaacgaactccctcagtcaaacccttgcgggtttgccagctccctcaaagagggagcctttgacaaagcggaaaagtttccggttctgccaaaggccccatccccgagggggctgtcgccgaaggcgactgggggagttttatttgcacattatctgtttttcagcagttcttccctgctgcgggctttgccgtaatatctcccatagggattatccagcgcctgtgcaagggagaccggcttttccggctctggcctttgcaccggctttgctgtgcggtcaaatgtgaacccggcggcaggcccgccgcgctttacccggaaccgcatgactcagccctctgcactggcggtagaaacagccccggcggtcagcttgttccacagttcttcgccgccctcaagcaggtcggcggagtccttgttccacgcgccgcggatgccgatatagtaccggctcatcagttcctgactggagccgctttcgctctgcacagcatcagaagcgtaatcgcccagatcaaggcccgccagcaccgggcagtcggtccagcggtagaccatgttccaccagtcactgtctgcatcggactgcggcaggctgccgtcgaggtagcgcagggtgccggtggtctgctggaacccggctgggtcgtacaggatgaagatggaactcagcgcgccctgaatgtcggtggaaagcttggtggtgcctgccatgtcaaggtaggcgtccgagtcctcgttgccaaagtccatggtgtagaggttcagctttaccaccaccttgccgtcgccgttccggtcttcgccgtaggcggcaagggcatcctgcagggcggtctgggtggcttccggcaggtagtggggtgccacaacggccacgttatagtctgcatggacggtaaagaaatactgcccgatgaagttgtaaccgaagaacaccacgatgatgccgatgatgatgacccacttgaggttataatcccaccagttggcccagcgttccttgcgggtgtactggcgctgtttgcggggctggaggtctttggggtcaatatcgcgttcgtaacggtagcttgccatggggcagtttcctccaagttctgatttacagctgtgccagaatggcctgacgcacagcgtccggcagctgcttctgctcggccttgctcatgcctgcagtccggatgggcggcagcaccttgatatgcacgctgcccggatggcacaggttgccattgttctcgaacagggcacgtgcaccggtaatggccaccggaaccaccggtgcgccggtcttgacggcaatgcggaatgcaccggccttgaactcaccggcaccgccctcttctcccttgtagcgggtgccctccgggaaaatgacgaagctcttgccgctctccacaatggcagtggcgtcgttcagggcgcgcacggatgcccgcaggtcgtcgcgctgcacgaacacgcagcccagcagcttcatccagcggttcagcagcgggatcttttccagctcttccttggcaaggatgccgtggggcttatccagactggccagcaaaagcgggatgtcgtagtagctgcggtggttgcccacgaacacgcaggccgtatctttggggatattctcaaggccctccacgctcaggaaaacgccggtcacctttaaaatgccccggctccagtgcgggatatgcttgttgacaagctcttccaccagctgcatgtcgcctgcagccagagcgcgttccgcccggcgcagcacgccataatggacgatcatataaccaaataagtaaataaacatcgcaatcgtgcgaaaaatactcattgtgttttcctcccttcggcaaaatatgccattgtcattgtatcacactttttgtaaaaaggggagaaataacactttttttacaaatcggaggatctgcggtcttgcaaaattgacaaaatgcaggtatatttatagttgtaaagccagcacaatggcactttctgcacgaaatgctttctgccggcccaatggatgaagagagaggtaccatacgaacatgggtttatttccttccgcaaatgacttcaaggccggtaagggcgttgaaaaggatgctccccgcaagaccggcgtgggccgtttttttgagcttgtgggccgtgatatgaacggcatgttccttgcaaacctgctggcctgcatcggctttctgccggtgatctgtctggtgtacatcggctttctggcaaacagcctgccggtcatgctggcaagcgcggtggtaggcggcattctggccgggcctgcgctggctggcatgtacgataccgtgctgcgtgccctgcgtgacgaagccggttactggtgggtgacctatcgccgtgccttcaagcgcaacttcaaggccagcattgcgccgggcatcttctactgtgtggtggtcacggcacagatcttccttgtgtatttctgcttcaatatgctgagcaagggcaccaatgtgggcgtgccgctgtgggtggccacggtgctgaacctgctcatcttccagatgctgttcgcctatatgtggccgcaggtggtgctgctggatcagcccttcagcctgaccgtgaaaaacagcatcaactgcatgatcgcgttcctgccccacgcactggcggcggccatcgtgcagatcctgttctggggcgtggtgatcctgtgcatgccgctgggcctgctgctcatgctgatcttcggcttctggttcgtgaccgaagtatcctgccagatcatctacggcgatattgaaaaggtgttccacattgaggagagcatccgcaaaatgaaggatgccgagctggaagccgccctcaaagaggactacggcgaaagaaccgacgacaccgaagagtaaatttgaacttccgcaaaggaggggtgctccatggaacaacggaataatctggttttgcagggcaccgagaccttctcccgcgggcagctggacaatgtggcactggacggcggtgcactggtgctggacagcgtggcgggccgctgcctgcaatacggcagctacaccacgccggaatttgccatgccggccttctgcaacctgaatgtcagctggaacgcctttgcgccccacaacaccatggtggaggtgcgctgccgggtatatgccggaggaaactggaccggctggatgagctttggcaagtgggcaccgggctacccccgctgcagctgcaattcccagagtgacgacggcatgatcttcctcatgggagataccgtgaccgtggcaacgcccggcggcggcaccggcgtgcagctgcaggtgaacctttccaccaacgatgacaaggtctcgcccgcagtgcgcctgctggccgcggcagtgcggccgctggcgtgggagaagcacaacggccacccgctgaaccggcagctctatctgccggaatactgcctttccgcccacgatcccagctttggccgcaccatggatctgccgctggtcatggcggcactgatgaactgctggggcgaggatgtcctgcccgaagaagtggcttatgtgatggaggacatggcccacagcaccaccgccaatgcggcctttgcggctgctgccgccggctgctgcggctacccctgctggcaggcatggatggatcttgccgacctgcgtgcccagatccacgatgactgctgtgtggcagtgcaggtggagcggcgcatccgcggccagcgggacccggtgcgggtctggatgggcctgcgcggctttggccacgacgatgccgtaatggcagattatgtgctgctgaacgaccccaccgcagattccaacggcgcagtgaactgcaccatggcactggtggactttatgcgttactttaccgggcgcgccatcgccctgcgggcaaaaccccgcgatgttgccgccaaccgtccgctgcggatgcgctgcgagctggtacccggcgagacggcagacgtttactattttgagcagcgcggcgtgaaggacccgctgccggaaggcttttccggctgggtggcctgtgcgtgccacgacggtgtggcccacgccaccaccgcccaccgcagcttctgccggatggagcgcacgccggagggcggcatccgcttcccggaaaagatcatggccgcaggctgccgctgcagcgtgtatgcagtggaccagaccggtgccatgcgcgtggcggaggtgcggctgccaaagccgcgccccacgccggagcaacctgtttcccaggcacaggaaaagccggcggaatgaccggcccgacccaaagcctttgggctatagatcaagacataggaggaacacattatggcaaagacgatcatcactttgggacgtgaatactgcacgggcggccgctacatcgctgaagatgtggcaaatgcgctgggcatcaagctttacgacaaagagctgatcaccatggcagcaaagcactccggtctttcggaagaagctgttgccgccagtgaaaaacggcatactcacagcctgctgtacagtctgtacaccatgggcaatgagctgccgctgggcgatcaggtgttcattcttcagagccgcatcatcaagcagctggccgaggaaggcccctgcgtgatcctgggccgctgcggcgactatgtgctgcgtgagcgcaaggatgtgctgcgcgtgttcgtgtacgcccccaaggagtggcggctggaatacgcaaagaccaatcctctggtcaaggccaaggacgaaaagggcatcaaggacgaggtggaaaagaccgaccgcaaccgttctgcctactacaactactacacccagaaccgctggggtgatgcccacaactatgatctggccatcaacgctgctctgggccgcgagacctgcgtgaagatgatcctggacgcagccgccgccaaggagaagaaccttggctgaccgcccgggcacttcaaaataaaacaacgatgattcgtgggtagggtgcttttgcatcctgcccacgtttcgggcaacggcgactgttttactccttcagtcacggctcccgccgtgccagctccctcgaagagggagcctttggcagtatgatggagttcctgattttgccaatgcctccctcattgagaaagacttcccccggccggggggaagatgtcacgcaagtgacaaaaaggggagcggtggcatcgcgcagcgatgacggaaggagttattcggcagcagccttgccatattccctgtaacctcaacatcaaaaaggagcaaacgtggaaacaaagcaaccccaaacctctcccgcccaaacgcgggaaaacattatgggcaccatggagatcaaccctctgctggtcaagctgagcgtgcccatgatgatctccatgctggtgcaggcgctttacaacgtggtggactcggtgttcgtgtcccatgtgagtgaaagcgccctcaccgctgtgtccctcgccttctcgctgcagaatgtgatgatcgctgtgggcgtgggcaccggcgtaggcgtgaacgccatgctgtccaaaagtctgggcgaaaagaaccagcaccgcgccaacgccacggcgaaaaacggcatctttctttcgctgtgcagcttcgtggtgttcctcgtcattggccttacctgcatgaagccctatttctatgcacagaccagtgatgcggctattgcgcagcagggcatccggtatctttcggtgtgctgcatcttcagtctgggccttttcacccagaccatgggcgaaaagctgctggccgctaccggccgcacccacctgagcatgatcagtcagctggtgggtgccgtggtgaacatcattctggaccccatcttcatctttggctactgcggtgaggccctcagtggtaccaccggcgcagctgtggcaacggtcatcggccagttctgcggcgcaggcatgaccctgttcttcaacctgaacaaaaacccagatatccagatcagcttcaagggcttccgccccagtgcagagaccattggccgcatctacacggtgggcctgcccagcattgccatgcagtgcgtgggcagcctgatgacctttggcatgaacctgatcctcatgagcttctcggccacggcggtggcggtgttcggtgtgtacttcaagctgcagagcttcgtgttcatgcccatctttggcttgaacaacggcatggtgcccatcatcagctacaactacggtgcccgcagaccgggccgcgtgaaaaaaaccatcaagctggcagtctgctatgccgagtgcatcatgctcattggtttctgcatcttccagttcgcgccggataaggtgctgggcatctttgcggccagtgatgccatgctggccattggcatcccggccatgcgcatcatctgcctgcacttcctgctggcgggtgccagcatcgtgctcagctcggtgtttcaggcactgggcaacggtgtgttcagcctgatcgtttcggtctgccggcagctgttcgtgctgctgccggccgcatggctgctggcacagaccggcaatgtcaacaatgtctggtgggccttcctcatcgctgagatcgtcagtgtcctgctgagccttggcttctacgcccgcatcaacaaaaacatcattgcccccatgtattcccctgccgaatgaggggcgtgaaaaactgtccctgcaaaggaaaggaacgtgatctctatggtaaaaaagctcaaatggaatctggtgctcatgagtgcgctgtatctgggtctgggcgtttttctgctcatgaagcccaccacggccctgaacatcgtgtgctatgcgctgggcgctgtggtgctggcctgcgcggcggtgcagctcatccgctattttgtggtggaacgcggtgtgttccagagccagctcaccctgatctccggtatcatctgtctggcattgggtgcgttcctgatcctgcgcagcgacatcgtggtgagtatcctgcccatcgtgttcggcctgttcgtgatctttgacagcatcagtcgtgtgcagaacgcactggatctgcgccgctgcggctattccagctggaagagctttctgctgctgccggtgctcagcgtggtgctgggcgttatcatgatcctgaaccccttcggcaccatggaaacgctggtcatggccattggcatcatcctgatcgtggagggctccatcaacctgctcagcgccctgtacacggtgctggccgtgcgccgttttgccaagctgcacccggagactcagtccatgctggagtccctgaccggtgaagacctgaacggcgacggcgtggtcgccccggatgtgacccgcaccgatgccgaggccactgccgtggaactggatgaggtggacgagagcgccactgtggaacaggaaaacgagaaataaggaaactcctccagtctgcttcgcagacagccccctctgggatggggcctctggccaaaccggagacttttccgtttccgcggaagtttgccggaatgccaaaggctccctcaatgagggagctggcaaacccgaagggtttgacggaaggagttcgcaatcaaaacagcaaaggataaaagagaaatggaaaagtatgatctgattattgtcggtgccggcccggctggcatttttaccgctgtggagctgctgcgccacggcagcaaaaagaagatgctgctggtggaaaagggcaagcccgtggaaaagcgccactgccccaaagccgaagtgggccactgcgtcaactgccgccccacctgcgccatcaccaccggcttttccggtgcaggtgccttctcggatggcaagctgagcctctcctatgaggtgggcggcgacctgcccaccctgatcggagaggagtttgcacagaagcttatcgactacaccgacaagatctatcttgagttcggcgcagacccccatgtggagggcatctacaccggcgaggagatcaaggagatccgcaagaacgccatccatgccggcctgaagctggtggactgcccgatccgccatctgggcacagagaaggcgcagcagctgtatctggccatccagaactatctggccgacaacggcgtggagatgctgttcaataccgagtgcgagaacatcatccttgagaacgaggagtgcaagggcgtgctgctgaaggacggcgatcaggtccggcctgtgtatgcggataccgtggtcattggcaccggccgccgcggtgcggactggctggaaaagatctgcgccgagcaccacattgcccacaagcccggcaccgtggacatcggtgtgcgcgtggagtgccgcaacgaggtcatggaaaaggtgaacaaggtgctgtatgagtccaagctcatcggctaccccaagccctggaagaacaaggtgcgcaccttctgccagaaccccggcggctttgtggcgcaggaaaactacgacaacgaccttgccgtggtcaacggccacagcttcaaggagaaaaagagcgagaacaccaaccttgcgattctggtctcccacaactttaccgagccgttcaaccagcccattgcctacgcacagaaggtgggcgagctgaccaacatgctgggcgcaggccacatcatggtgcagcgctacggcgacattctggacggcaagcgcacatggcagaaggagctggcccagtccaacgtgaagcccaccctgaaggatgccgtggcaggcgacatcaccgccgccatgccctaccgcgccatgaccaacatcattgagttcatcaagatgctggatatggtggtgcccggctttgccgccaacgagaccctgctgtacagcccggagctgaagttctactccaacaaggtgaagatggacgagaaccttgacaccaacatcaagggcctgcactgtctgggtgactcctccggctggacccgcggcctgatgatggcttcggtcatgggcgtgctcatgggccgcaagctggccgaaaaggaaggctgctaaaaacaagcatcaacaaaaaaatcccggcaccgcaaggtgtcgggatttttttaggtttgaaattcagccctcaatgagctccacagtcttcatcttgaccggggtggtgggcttatcgttccagtcggtgcggacagctgcgatcttatccacaacatccatgcctgcaactaccttgccaaaggcagcgtactggccgtccagatgaggtgcatcctgatgcatgatgaagaactggctgccggcgctgttggggttcatggcgcgtgccatgctgatcacgccgcgggtgtgcttgagcggattgttcacgccgtttgcagcaaactcgcccttgatgttccagccggggccgccggtgccgttgcccagcgggcagccgccctggatcataaagccgggaatcacgcggtggaaggtcaggccgttgtaaaagccctcgctgaccagcttcttgaaattctcacaggtgataggagcggcttcttcgttcagctcgatatcgatgatgccgccgtcttccatagtaatgcgaaccataacgctacaatactccttttgtgttgccccgcagcagtgcgggagtgttcggcagaaggcctgccggatatctcttatagtataccataggttttgggggttgcaacgccgcagatgcaacgtttttgttaaaattcatctttcatctccaccatatcggcccaaaagcgcttggggcagtgggtcatgcggcatttttcgttgtggcgggccttgatctccagcgtctggtagaactgcttccacaatgcctgaaactgctgctcccgctcgctgggcggcggcagctccagcggtgcagccagctccagcagccgggccttgtggtcctcctgcagcagcacagcctgatgcaccgcatcgtagatcataaagttctcttccgggaaccgtccgcaaaagtggggccgcagcagcggcaggatgtagtttttggggtggatgacggcgcccagcatcccgtcgtgctcctcaaaccgcacaaagccctgaaacttgtccacttcccagtcaaggcttttcttcatctcatacagcggggccacgtccgggtggccggtgcgcttcacggtgccggggccgagggcgaaggccagatgcagaaagcggatgagcagcagctctttgttctcccgcccggagaggaaatcccggctgacgaggtactctgtctcgggaccaagctttctgccaaagctggcaaacacccgctgagccttggcgtggtcggtggggatgtccttgaccgggtacagggtggaagtttcccgctggggtgtccacaccgcaaaggggatctcgtgctgggcaaagctctcgaacacgcagcacagaaagccttcaaagctgctgtcgtagaggtacaccacatccgcatcgtggagcctgcgggttttctgaacttgaacatttacagcgccttcgccagacattgcactgcctcctcccgcaccatgcgcatggctgcgcgcggtgccacgccctgcgtgatcagatcgtccaccgcaggcggcgtgaacagactgagctgttcgcagctgccgccgaacacgttggggtcgatgagcgcctgcgtgatgcgctcccgcccggcggtgccgcggcccgggtgcgcacccgcaaaacccttgcaggtgatgaaatactgtgcccgcttgagcaccacgcccatgcgcttcagctcgtccaacccaaggctggaaagcttgcgcgcgtgccagatgcgccgggcgcttttggggccgatgcccggcacacgcagcaacatttcaaagggcgcgcggttcacatctaccggaaaaagcccgtagtgctgcacggcccagttgcattttgggtcgaggtagggattgaagctctggttggcttcatccagaatttcgtctgccttgaactggtaaaaccgcagcagccagtcagcctgatacagccggtgctcccgcaaaagcgggggtttggtgtccagcgcaggcaggcgggtgtcctcggctaccgggatgtaggcggagtagaacacccgtttcagactgtacttctggtacatgccctcagtgagctttaaaatgtggtagtctgtctccggcgaagcacctacgatcatctgggtgctctgcccggcgggtgcgaactttggcgcatggcggtagacggtcagctcctgtttgctctgcgcgccggaaactgcaatctgcttcatgggccggaaaatggagtgccgtcctttgtccggggccagcaggttcaggctctgctcactgggcagctccacattcacgctcaggcggtcggccagatatcccagctgctgcagcagttccgggctggtgccggggatggccttggcgtggatgtagcccccaaagcggtattcgccccgcagcagccgcagggcggccagcatccgttcggtggtgtagtccggcgtgcccagcaccgcgctggaaaggaacaacccttcaatgtagttgcggcggtaaaactccacagtcagctcagccaattcccggggcgtgaaggtggcacgggggatatcgttggacttgcggttgacgcaatagctgcagtcgaaggcacagcagttggtcatgagcacctttaaaaggctcacgcagcggccatcagcggtaaaggcgtggcagcagcccggtgcatagcagctgccaagaatgcctgcccgcgcggtgcgggatgcgccgctggaggtgcaggccacatcatatttggcgctgtcggccagaatggtaagcttgtccatcagggtctgttccatgcagaatacacctccaaagtgggaaaaagggtcaaaaaataaagccatgcgcaaaattgcagatggcttttatggtttcacggttagcgtcctcgccctctcagtctcactttgttcgacagctctcccaaaggaggagcctttggcagtacgggaaagtttccggttttgccaaggcctccctccatgagggaggtggctgcgaacagcgtgagcagacggaaggagctattaccacttcgccttggtctctaccacgcggccggcgatgtgcagatgattcaggtcttcgcccttgatgaccatttcgctgtaggccgggttgaagggctgcagcaccacgcagttgccgcgctggatatagcgcttcagggtgccctcgccctcatcgccgtagatcagcacgccaaggtcgccgttttccagtgtgtcctgcttgtgcacaagggcaaggtcgccgtcctgaatgcggggctccatgctgtcgccgcgcaccaccagataaaaatagttggaggggtccttcacacgggcatactcctgaccgtagtcctcctcaaaggcgagggcaccgtaaccggcctttaccgtgccgatcaccgggatcaggctttcagaatagctgccaaagaaccgctcttccggggcggaaacattgcttaccgggcggtacaggcccagcagataatctgctgtggtgttcaaaagctcggcaatgcgggccacggtagacggatcgggagaggacttgccgctttcccatttgccgacagcctgctgtgtcacgcccagtttggaagccagctcagcctggctgatgccctgctttttgcggcactgtttcaaaagttctgaaaacgacatggtatatttctcctttacaccgcgaggaaattttcttgtgtttattatacaacaaaaaggtgtacttgtaaagacctgaaacaggccaagacccaaaaaggttgtggtaaattttgtttttaagggctgaaagaaaaaaattgccccaaaggcttgacaccggcgtgcaaatctggtaaattaaataggcattcgacacggcgtaaggcggatgtccacaaggagagatgtccgagtggtttaaggaagcagtcttgaaaactgccgtacggcaacgtaccgtgggttcgaatcccactctctccgccattttttattgaataagtgtaacacactttgctctggagtagtactcaagaggtcgaagaggcgcccctgctaagggcgtaggtcgtctaaacaacggcgcgagggttcaaatccctcctactccgccaagaaaaagctcgttgattcgttgaaatcaatgggctttttcctttgtaaaggaaaaatgcggcttgcggaacaaaaaaggaggaaccaatggcgtttggcgttttggcgggtcagatcacggtgatctttctggaagtgctgctgggctatgtaggtgcacgcagcggcatcatcaaggatcgtgacagcaagtttttgtcggattttatcatgaagcttctgctgccctgtaccatgctggctggtgcagccgtggacggtgagccggagctgctcacgcaggcaggggtgctgttcgtgctgctgctggcactgtttgtggtgaccaccggcctgtgccggttgagcagctggctgcaccacgacacgccgggcaagtatgcggtgctggtgggcacggcggctatgcccaactgcggcttcatcggcctgccgctgtgcagcgccctgctgggcaccgcgcgcggcactgtgtttgcaggcatggccatggcctcttataatgtatggttctttacctatgtggtgtgcctgttccgccccggcgagaagatccggctcaagaccttcatcacccccaccaacattgccacagtggctatgctggtgctgctggccaccggctggcggctgcccgcaccggtgcagcagttctgcagtgcggtgggcggctgcaccaccccgctggcgctcatgatcgtaggtgtgctgctggcagacagcgacatctgtgcgctgctgcacaccggtttcctgtaccgggtcaccctgctgcgcggcatcctgttcccgctgctgttcatgctgctgctgtggctgctgccgctggacaatgtgctgcgcaccggcctgtccatcatcgcatgctgcccggccggcagccttgccgctgtgctggccaagcagaccggcaccgaagcgacccttgccagtcaggcggtggcccactccaccgtgtgtatgctggtcacagtgcctgccatgctgctgctgaccggtgcgatgttcccgatgtgagaagctgtaaaaagcccgctgtctttggacggcgggctttctgctgttatagcataaggttcgtgatacctgctagcaccagcaggtgcaccgggtagaaccagtaaaaggcttttttctgcagcggactgcacgcgccgcgctgcccgttgtagaaccagaccagcacaaaggccagcggcgcggtcacctcgaacaaaaacagcagcgcacctgcaaggcactgccgcttgcggtctgcgcgggtcaggtacagggtgcagatgatgagcacgccgatggcgtggtagtcggtgttggcagccagcgccagcgcggcgcagccgcccgcccacacaagcccctgccagccgggcaggccgttttccttttcaaagcgcttgagccctgccatagccagcacgcccagcgccagcgtccagtaaacgttctggtgctgcggggcgaacggtgtgcggaaaaaggcaaggtcaaaaggcacctcgctcagaaggccgaacagcagaagccgcccaaggtagcctttgacgttgtgggtgtgcagaaagccctccacggccagaaagcagaagatgggaaaggccagccgcccgatataccgcagcacacggtctgccgccagcagggtgctgaccgggatgccaccgcagctggcagcaccggcggcgagggccggcagcaggataccggcttcgatgcaggaagcgccgatgtgatcaatgagcatggtgatgcaggcgatgtatttgagcgctgtgccgctgagtccgcagcggacaggggctttggcagtctcggtcataaggaatccctcacttgataaaaaatctactttttgtgcttttttaatgatacggcgcaggctggcaggctcctgcgtcatctttgacaaaatacgccggaaaggcgcataaatcgggcaaaaatgcttgacagaaaaggcacgggatagtacaatcaagaagataattgaactatctcaaatgaaagatgaaaaagattcacagagaatcgggcgtctccgaaccagtaaaaacggaaggaggctttgggcatgacgcttttttcctacgagatttttgatgctgtggcccggcagggcagcttcaacaaggcggcacagcagctgcacctgaccccatcggccatcagtcacgccattgccgtaatggaggaggaactgggctttgctctgttcaaccgcggcaaaaacggcgtatccatgaccagctacggcgcatccctgtatccctctattcgcgatgtgctcaacagcgatgaggccctcaagcagagcatcgcccgcctgaacggcctggaaaagggcaaggtgaagctgggcgtattcaactcggtgtgtgcttcgctgctgccgggcctgctcaaaagctttatgacccactacccgcagatcgagatcgaggtgtatcagggcacctacgacgatgtgaaggaatggctgcgaaccggtcaggtggatatcgcgttcctttcctccacctgccgtgaagagttcaacctcaccgagctgttccgcgagccgctgctgtgcatcgtgccgcaggactggcccgaaccggaaaacggcgtgatgactcccgccctgatgaacggccaaagcttcgttgtgcagtgcgatgccaccgatgctgaaatgcgccagttcctgaaaaaatataagatcggcaccgagcgccgctgccatgtcatcgacgaccagtccaacatcgccatggtggaagcaggtctgggcatttccatcatgccgcagatgctgctgcgcgactgcaaggccgcgatcaagatctatcccatcgagccagaggaagaccgtgtggtgggcctggctgtgcagcgccccgccgcaatggccccggcagtggaacagatgttccaccacatcgtagactactgcaggcagatcgagctgagatgagccggacacctttatactataccataaaacagtctgtgtgtggagcatggactgtttttttattaagaaagagcgattgtatcagcgtgcaaaatccgctatacttagaaaaacaggctggttttatgcagaagccttgattggagcaggaagatgaagaccataaaacgacgtgccttttgcaaggcggcagcagctgccgtggcaggcgtgctgtccccgcacgcggcggcagaggctttgctgccgcaggccgcacaggctgtggtgggcagtgcggtgccggaggattactactcctttgctttccgcagcgaccacagcgaaacagatctctcccacgatttttattatacagatgccttttttgagaacacggcgctgcagtacagccacaagctggcactggcaacgctgggccttgtggcggcaagcggcaacacctaccagagcgatgcgctttactgggtggagggtgaagcgggccgtgaggacagcattgcggatgcctaccagaagcttggctttgccaatgcggtctatgcgggctaccagtgcagcctgaacaccccggtggataccgcgggctgtgcttttgcgcagaaaacactggtacaggatggccagcgcaccaccattattgcagccatgctgcgcggtgtcggctatggtgccgagtgggccagcaacctgcatgtgggcgaaggcggcgggcactatggctttgtgacagcagcagagcatttttttgaggatctgcaggactacctgaaaaaagccgaggctgcagcgggaacgctgggcaccatcaagctctggctgggcggctacagccgcggcgcggctgtggcaaacctgacggcggcgcgcatccggcagcagctgccgcagatcgcgcaggaaaatacctttgtttacacctttgccgcaccggcggcactgacggcagcagaccgcccggatctgcaggcggactacgacaacgaccacactgcagacggaggactgaaaacggattgggatgtaagcaatatcttcaacatcatttccagcggcgacatcgtggcccgcgtgatgccggaagagtggggctaccaccgcaacggaaacgaccgctttctgccctccacggcgtaccagaacgagctggatgatctgagcatcatcgagagccggatgggcggcgtgccgctgcggttcgaccagctggccacaaaggaagatgtggattcggtgatcgcggcggctcttgcgttctgcaaaagtgccgcaaattaccacgaaaaatatgaagctgcctttatggatatgctgcagtgtgcctttaccctctcggagaaagaggcagccgagggcgtgatcctggacgatgaagctgtgatggaacggctgcgcagcatggagaacatccgtaaaatgtcgtggacgaaggtgctgcgctgcgtgatgacggcttcggccatgagcagacccattctggagcaggtgggggccatcgtgccgctgcgggcgcagcaggtggtggtgccggtgctggcggtgggtctgtgctacgaggtggagagcgatgtgctgaggatgctggtgtactacatcctcagcctgatgagcgtgaacagcccggcagacagcgttctgcgtgcggcattctgccactacccggaaaactacatcaccctgatggaatattacgaccccgccgagcacggcatggaagcctatacccgaaaataaaaaagaggggctgttgcaaaataaaaatgcgatagcagcttgcacaaaggaatagcgcaaaatcagaaacccggaaccctttctgagccgttggccctgaaaaggttccgggttttgtgctatttgctggcgcaggaccgttctgctgccccgcctgcgacggtgccgtgctgttcgagtcctgtaccgcccaccaaaactcttcaactcttgcgagtttccgaagcgctcttgttggggcgtgcggagccacaaaccctgcttcataatatcgatcatgaccgatcaacgactgatttatagtaattgccaaagtctgcaagtgcattgacaattggcaacatttccgttccgagatcggtcaacccatattctactttgggaggattctcgtgataatcacggcggtaggcaagtccatcatcaatcatctgtcttaagctctcggtcaaaactttctgcgagatcccgtcgatgcttctttgcaactcattgaatctccatggacgctctttcagattgcgcagaagcaagagtttccattttccgccaatcagggatactgctgttgcaaccggacattccggcagttcttcttttgtgcgcatatcagtcacctctgtgtatagtatagcacattcatttttgagtgtacagttacaaaaaggtgcgtacttgtttttgaatgtgtgagcttctatacttagctcaggcaatgaaagattgcgaatcaaattggaggtgcttacaatggcatgctacacaaaaatgacagttggaaaagaaaatcggacggagcttcatgaaaagctcgccctgactggtgcggagatcagcctgaatacgcttcctgcgggagcaaatg

SEQ ID NO: 1115 - DNA, 33678 bp, Unknown
  gut microbiota DNA sequence
gtcggtattgtagttgtcaaatccgccctgcgtttcctgaatattatagatgcagccccacaccgcagcttcgcgcagagtcaggtcgtcgatgttctcaatgccgtcaaatggcatggggtcaaacagcacaagcccttccagcttatcttcatattcctgcttttgggcggtatcatcgaacaggttcgccaccgcgcccacaccggcccgcagcacggtaacaaagcccacgatcaccagaatggcaaccagaaggcccagtgcctgccgcccgcggcggcgctgcatccgggcatgttcttcaggggtaatataatgtttcatagttgttttatctcccagggttctcaaatgctacagtgtccagtataccacataccggcccattgtgcaaaactatgcccgtggtttttttgtgaaaagcgcattccttattcccatgtcttccacacatcgggctggtagcccacggtggccttgcggccattgcgtacaatgggcgttaaaaacagctgctggttctcaaacagcttgtcctccttctgccagtccaccagtgcgtccagaagtgcaagggtctgcttgtccttcgcattggggtccaccagcttttcccagccgccaagagcgcgggccacgttctcgaactcgccgcggctcatctctttttccttgaggtcgatcatctggaacttgatgccgcgctccttgaaatagcgctgggcctttttggtatcaaagcacttgcttgtgccaaagatctgaatattcatggtctgtaccctcctgaatttttattgtaccacatcctgtgccctctgcataggcataattcgcagccggatgggccatactgcccgcagggcattatcagaaggaggtttttctatgaacgcatatgttgaccctgatctgtgcattggctgcacccagtgcgccgggctttgccccgccgtattccagatggaaggcacgctggccgtggcccagcccgggccgatcccaccggaggaggtgccgcaggctgtggacgcagccaacgcctgcccggtaagcgcgatccgcatcgaggagtaagagggaaggccgtcaaccatgttggcggctttctctcttttttacgcaaaaatcccccgctgggcacggttttgtggtataatgcagaatgtgtaataatgcaatggaggaacacgactatgcgtttactggtcattgacggcaacagcattgccaaccgtgctttttttggcatcaagctgctgaccaccaaggacggacgatacaccaacgccatctatggctttctgaatatcctgctctccctgcttaaggagtgcgaacccgacgaggtggctgttgcctttgacctgaaggctcccaccttccgccacaaaatgtacgatggctacaaggccacccgccatggcatgcccgaagagctggcccagcagatgccggtgctcaaggaacttctggcagacctcggctaccgcaccgtcaccgccgaaggctgggaagcggatgatatccttggcacgctggccgctgcctgcgccgcccggaaggacgactgcttccttgctacgggagaccgggacagcctgcagctggtcagtgacaccaccactgtgctgcttgccgccactgtcatgggacgcagcaagacggtgacgatggacgtggacgccattcaggaaaaatacggcatccagcccagacagctcattgaggtgaagagcctgatgggcgatgcttcggataatattccgggcgttaagggcattggtgaaaagaccgccctgacccttgtgcagaactttggcacgctggaaggcgtgtacgagcacatcgacgataagctcatcaagcccaaacagcgggaacatttgctggaatgccgcgagatggcccagctgagccacacccttggcaccatccgcaccgatgcccccatcgacacggccgagggcacctatgccgtgggcgagggcaacaaagccgaggccgtgcgccttttgcaggaattggagatccactccctgatccctcgctttgggctggacggcattgcacctgccgccccagaagaagaggacggcatcgagctggctgaagcagggctggaagctctgccgctgaccccttccggcacctatctggtggcatcgcgcccggccgtgatgggcaagcagggcacccgcaacgtggtgctgcagccggagagctggtacgccgtgcaggactgcaccgtttacccgctggaggatgacgaccttatgcgcctgctggacaacgcagacgtaacgctggaagtgttcaatgcagcgcccctctatgccaaggccatggccgcaggcggctggggcagcagcatcgtgtgggatggcaagcttgccgcctacctgctggacgcttctgcttccaagtatcagatcagcgagctgaccgccagctaccgcgccgctgctgcctttacctgtgccgattacccggatgcaggccgccttgcagacctgttctgcaagatgaaggccgagatcactgcctgcggagaggacagcctttacaatgagatcgagttcccgctggcacaggtgctggccgatatgacccgcaccggtgtgctggtggataaggacggcatcgagcagttcggcgtaaagctgcgcaccgagctggagcaggtgctcacccgcatccacatggagaccggcagcgccagcttcaaccccaacagccccaagcagttgggcgaaatgctgtttgacaccatgggcctgccccacggcaaaaagacccagcgcggctggtccacggatgccgaaacactggaaagcctgcgggattacccgctggtggaggacattctgcagtaccgcgcctaccagaagctgaactccacctacgtggagggccttttgaaggtgattggcgaggacggccgcatccactccaccttcaaccagaccgaagcacgcaccggacggctctcgtccgataaccccaacctgcagaacatccccatccgcaccgagctgggcagccagctgcgcgcctactttattgcaaagccgggctgtgtgctggtggatgccgactacagccagatcgagctgcgcattctggcccacattaccggtgatgagcacatgcagcaggcatttttgaacggtgaggacatccaccgcagcaccgccgcaaaaatttacggcatcccgcaggaagaagtcacctcccggctgcgctcttctgccaaggccatcaactttggcatcatgtacggcaagggcgcttacagccttgccaaggacatcggcgtgagtgtgaaggaggcagatgccttcctcaagaactatctggccgcgttccccaaggtgagcggctacatggataagaccattgccgatgccaaggccgtgggctatgtttccaccctgttcggccgccgccgtgctttgccggagctggcaagcagcaacttcaatgtgcgttccagcggcgaacgcatggcccgcaacacccccattcagggcactgcggccgacgtgatcaagctggccatggtgcgggtatggaagcggctgcggaacgaaaagatggaaagccgcctgatcctgaccgtccacgatgaactgatcgtggaggcaccgcaggctgaagccgaaaaggctgcgcagatcctgcgggaggaaatggaaggctgcgtgcagtatgccgtgcccctgagcaccgatgtgcacgcaggcaaaaactggctggaggcccactaaaacatgattattttgggaattgaatccacctgcgacgagaccgccgcagctctggtggaggacggccggcacctgctgagcaacgtcatttccaccagcgtaaaagaacaggctctttacggcggcgttgtgccggagatcgccagccgccgccactgcgaatttatcagtgctaccgtcaaaaaagccctgctggatgcaggcaagaccatcgacgatgtggatgccgtggccgtcacctttgcgccgggcctcatcggtgcagtgctggtgggcgtgaattttgccaagggtctggcctactcggccaataagcctttggtgccggtgcaccacctgcgcggacacattgccgcactgtacctcacccacccggagctgaagccgcccttcctctgccttgtggcctccggcgggcacagccacattgtggaggtgcaggactacacccattaccacatccttggtcacacggtggacgatgccgccggtgaagcctttgacaaggtggcccgcacgctgggtctgccctatcccggcggccccagcgtggccaatgccgccaagaccggcaaccccaaggcctatcgcctgccggtgccccatgtggacggcaagtacaacgtgagcttttccggcctgaaaaccgccgtgctcaatgaggtgaacaaggcccagatgaagggcgaagaaatcaatgtgcccgaccttgccgccagctttcaggaccgcattgcgggcattctggccgaaaagctgctgctggccgcagcggacaccggcgcaaagcaggtgtgtctggcaggcggcgttgccgccaacggacggctgcgccagctggtgaacgacggtgcccagaagctgggtgcaaaagtttatctgccggagctgaaattctgcggtgacaacggcgctatgatcgcggcgcaggggtattaccagtacattgcaggccacacagcgggccttgaactgaacggtctgcccactttacccatcgactacgaataagcagtataaaaagacctgcctttccgggatctccggaaggacaggtctttttcttatgcaaaatattcctgtgcacgctttgcagcgttgttgatgcaggcccgcagctcgtccagcgtatcaaactttttgctggggctgaggtaggcgtggaactccaccaccgggtcggtgccgtagaggtcgccggaaaagcccgggataaaggtctcgcaggtcaccttggtggcatcatcgttgacggtagggcggctgccaaggccggtggccgaaggataccacaccccgccaatgtgggtgcgggtgatataaatgccgctgcggggcagctgaaagccctcgggatacagctggttgatggtgggcacccccagcgtgtggcccagacctgcaccgtgctgcacctcgaaccggatggcgtagggcatccccagcatggcgtttgctgccgggatgtcgccgccttccagcgcggtgcggatgcgggtggaagacaccggcttttcctcaaactgcgccatgggcaccacgatcacctccacgcccaacggagcgcagagggtgcgcagcagctccgggttgccggccgctttggcaccaaaggtaaagttttcgccgcagaccagcgcacgggcattgcagtcccgcacgatgcccagcacgaactgctccggggtcaggcccttgatctcctcaaagtccggcgtgaggtaatactccacgccaaggcttgcgatcagagcatgcttatccgctgtggaaagcaggcgcttgcccttcatcttattcaccatcggcagcttgaaggtaaacaccgccggggcggcatcgtgttctttggcccactgcacggcgctttcgatcaccgcacggtggccgatgtggatgccgtcaaaaaagcccattgccactgcggtgcctctttccggctgcgccagcggcagcggtgcaaattgtgaaatgatctgcatgggttttgtttcctttttcaattacgttctacgaacagtttttccacccgcagcacaccctgtacgatattggcaaggcccaaaaactgtccggcggcattgcgcacccggtagcggccatctgctgccggataccggctggtggggcagccgttgtacaaatgctgttccacccaaggctccaccaccagcagcggcaggctttcaaacacgctttccaccggcagcatcagcgcttccagtgcgtccatgccctgctcttttgcggcaagaatttcctccagcgtgtgggcatcggcttcggtgtacacgcccgccgaggtgcggcgcagtgcgctcatggtgcccttctggcccatggcggcggcaatgtcttccagcaatgtgcggatataggtgcccttggagcacgttacatccagcacatactcattttcggcagggctgccgccgtaggtgatgctgtaaatttcaatggggcgcgccttgcgctccacggtcacgccctcacgggccagcttatacagcggctgaccgttcagcttgatggccgagtacatgggcggcacctgcatctgcgggccgatgaattgcggcagcacggccagcagttccccttcgcccgccgtgaccggagccgtttccagcacagtgccggtcacatcgccggtgtcggtgcgcgcgcccagttttaaaaccgcacggtagcttttattgtggttcagctgcaggtccactgccttgctggcaccgccgcagaacaccggcagcacgccggtggccatggggtccagcgtgccgctgtggcccagcttgcgggtgcccagcacgccgcgcagctttgccaccacatcaaagctggtccagtccatgggcttgtcaacgatcaggatgccctgcatttatgcttcctcctgcggtgcgtccagctcggcttccacctctgccagaattgcattttttgcgttttccagattgcccagcagctcacagcctgcagcgcggctgtgaccgcctccgcccagacgccgggcgatggcgcaggcgtccacgccctttgcggtgcgcacgctgatgcggtagctgccgccgggctgctgccgcagggtcaggcccacctttacgccctcaatgctcacaggcaggctggtcagttcttccagatcggccgggtccaccccgctctgctcgatctcgtcccgggtgaggtagatgagcgcgcaccggccatccagatagtattccagatggttgcgggcaatgcgctcggcctccatgcgctcacggggcttggtatcgaacagcagggtgttcagctcctccacatggcagcccgcctcaatgagctttgccgccacgatgtgggtgtttgccgtggtggaagagaaccggaagcagccggtgtcggttgcaaggccggtgtaaaggcagtctgcaatatgcggcgtaatggcaacgcccatggcgttgatcacctcgtacagcagctctgccgccgctgcggcgctgccattgagcagggtgaagtcggcatagccgctgttgcctgcatggtggtcgatgcacaggtccacatggcgtgagaactgcgtcataccgttgttttctccaaacagctgcacgctggcgacatccaccgctaccaccgtctgcggctcaaactcacctttgaacatatgtgcgttggtaaacgcataccggttgggaatggcatcggagcagagcactgccacgtttttatccagtgctttcagtgcacaatatagcgcgctgccgcagccaatggtatcgccatccgggtttttgtgacacagaatcaaaatgttgtccgccgtcatcaggcgctgggccatctgctgcacattcaactgttctgtcattccatgatccatcctttccgcaggcggaattattcttcggtctcctccggtgcgctggcttcggtgtcagcgtcgccgttcacgttcagcgtgcggagcagctcgttgatgtgggctgcataggcggcaccgtcatcctctacgaagatgaagcggggagccttgcggatgtgcattttcttgctcacttcagtgcgcacatggcctgccgcgcggttcagtgcctcgatggcgggctttgggccgtcctcgcggcccatcacgctcacatacaccttggccacatccagatcaggggtcacatccaaacgggtgacggtgagcaggccgccctccagacgcgggtccttcagcctgccgatgatggcaatgatctcgcgcttcatatcctgcgccagacggcccatattcttctgagacatagtatttctccctataaaagaaaaccctctcagcctcgcttcgctcggcagctctcccgaggggcgagctttttgcgtggatacggcaaacgttccgtttctctgcaaacctcccacctcgggggaggtggcattgcgccagcaatgacggagagggatatttcagatcttaatcgcggtactcttccatcttgaaggcttcgtacacgtcgccttccttaacgtcggcaaactttgccagagtaacgccgcactcgtagccctcggccacttccttggcatcatccttgaagcgcttcagggatgcgatctcgtcctcggtgatcacgatgccgtcacgcaccacgcgcaccttgctgtcgcgggtgatcttgccgctggtcacgcggcagcctgcaacggtgcccacattggagatcttgtacacctgacggacctgcagctcgcccagagacacctcgcggaacttgggagccagcatgcccttcatagcgtcggtgacatcgttgatggcatcatagatgacgcggtacatacgcatttccaccttggtggcagcagcttcttccttggccacattgtccgggcggacgttgaagccgatgatgatggcgttggaggcatcggccagatccacgtcggacttgctgatggcaccgacaccggcatggatgacacgcacgcgcacctcttcgttggagatcttctccagactctgcttcacagcctcggcagagccctgcacatcggccttgaccacgatggccagttccttcatgtcgttctgagccatctggctgaacaggttatccagcgtgaccttctggaaggaggagaactgcttttccttggcggcagcaatgcgctgttcggccagctcacgggccagacgctcgtcctcaacagcctcgaacaggtcgcctgcttccggcactgcggtcaggccggtgatctccacaggggtagaggggccggcatcgctcagcagctggcccttgtcgctgcgcatggtgcgcacgcggcccacagcggtaccggcaatgatgacgtcgccggagtgcagggtgccgttctgcaccagaatggtggcaatggggccctggcccttgtccagacgggcctcgacgaccgcacccttggcgcggcggttggggtttgccttcagctccatgacctcagcttccagagcaatgcgctccagcaggtcgttgatgcccatgccggtcagggcagacaccgggatgcaggccacatcgccgccccagtcctcggtgatgatgccgtacttggtcaggccttccatcacgcgctcggggtttgcggtgggcttatccatcttgttcattgccacgataatcttgacatttgcagccttggcgtggttgatggactcgatggtctggggcatgatgccgtcgtcggcagcaaccaccagaacggcgatatcggtcatgttggcaccgcgggcacgcatggaggtgaatgcctcatggcccggggtatccaggaaggtgatgaggctgtcgttgaccttgacctgatatgcaccgatggcctgcgtgatgccgccggcctcgcctgcggtaacgttggtcttgcggatggcatccagaatactggtcttgccgtggtcaacgtggcccatgacgcagaccaccgggggacgctccaccagatcctcctgcgaatcctcttcctgcgtgaacaggcgctcctcgatggtcacatgcacctcgtgctcgacctttgcgtggaactcctctgccagcagagaagcggtatcaaaatcgatcacatcgttgatggcgtgcatctcgcccatctgcatgaacttggcaatgaccttgccggcctgctgcttcaggcgggcagccagctcgcccacggtgatctcgtcggggatcatcaccttcagctgtgcgctgcgggccttttccagctggatgcgctgcagacgctcgaactcggtctcgcgcttgcccttctggaactgctggcgctggcgctgaccgcgctgggtgaacttttgcttgttgccctgcggggtgggcttgcggcggttctcggtgttcttggtggaagccagatcatcgtaacgggcatcgaagcggtccacgttcatatccacagtgcgggtatccacggtgacctgattgtcctcgcggcgcacggacacagcctgtgccggagcagcggatgccttggcaccggtctcacgagccagttcgctgagagaaacggtcttttcctcgcgcttcttgtgctgctcgttcttcttttcgttatgcttattgccgtttttatcctgctgggcaggctctgcctttttggcggcaggctgctccggcttcttttctgccttgggagcttcgggctttttctcggccttcttctcggccttcttctcggccttcttctcagtgggcttcggctcttcctttgcggccttggcgctgttcaggaattcgtccagatttgccacgctgttatccttgctgaacttttccagcaggtagttcagctcgttctcttccagattggagctgttcttcttgccggtgctgcccatggcgttcagctcatccaggaccttcttggcggaaaggttcaggtcctttgcaaaatcactcactttatattttacgatcattcggtcatatcctcctcatttttgattgctccgcagtccgacaggcggtcaaagcagagctttgcgaggttgcggtcagtcaccgcgtaaacagccacaggcttgcggctgatatcggccagtttatcctgcgtaagcggcatggtgatcacatccaccagatcgcccacagaatagtcgaggcgctgcacggtcttggtgctggcatcgcttgccaccatcaccagccatgccttgctcttgacgcaggcatcttccacggcatcaaagcccatggtcagtgcgcccgccttgcggcacaggctcagcgcctgatacagcgcttcctccggcggcagcttgggctttgcgggggtgttattcttctttgccatttgctgctgcctcctttgcggcttcggccagctgtgcggccagagcctcgtaaacttcggcgggaaccggctgctcaaagcagcgctccagcgcctttttcttttttgccttggtcaggcagtcggggttcgggcagagatacgcgccgcggcccggctttttgccgaccagatcaatgctgatctctccgctgggtgcacgcaccacacgcaccagctcctttttggggcggctggtcatgcagccgatgcactggcgggaagggatctttttctgtgccatccggtttccctcctttggccatctgcgccggaattactcggcgtcggtctcggcttccttcttcggctcttcctcgccataatagccgctctcggggcggatatcaatgttgtagccggtcaggcgtgcgcacaggcgtgcgttctggcccttgttgccaatggcaaggctcagctgctggtcgggcacggtcacacggcaggaacgggtctcgccgggcagcagttccaccttgaccaccttggccgggctgagtgctgcggagatgaactcggagatatcctcgctccacttcacaatgtcgatcttttcgccgcccagcttttccacaacagcagccacacgggcaccgtgctcgccgatgcaggcggaaacagggttcacgttggggtccttgctccaaacagccatcttggtgcgggcaccggcctcgcggctgatggccttgacctccacagtgccgtcaaaaatttcgggcacttccagctcaaacaggcgcttgacaaggccggggtgggtgcggctgatcataacgcgggggccgcgctcagtgctgaccacgtccacaacgtagacctgcagggtctggccctcggtgtacacctcgccgggcacctgctcgttgtggggcaggatagcctcgccgcccttgcccagatccagagcaacgatgcccttctccgggtccacgcgggtaacggtggcctgcacgatgtcgtgtgcacgggactggatctcgctcagctgctggctgcgctcagcctcgcggatgccctgacggatcacgtgctttgcggtctgggctgcaatgcggccgaagtccttggtcttgaggggggtcacgatgcggtcgcccacttcgtaactcttgcggatcttctgtgcctcggtaatgccgatctcagagtgctcgtcgtaccagtcctcgtcggccacaacgtcctggatcagggccacatcaaagcggcctgcggcggggtcgatatccaccttcacgtggtcctcttccacctcatagttcttcttgacggcaatgatgatcgcagccttgatcttttcgatcaggtattccgcggtgatgccgcgctcgtgctccagcatggagagagcttcaaaaaattcattgttcgctgctgccatttttcgggttcctcctgtaatttactctctatctatgttagtcaaacaggtcttcatcgtcgcacaggttcacgctggatgcggcgttcacctcaaaggtgacagcgcccgcatcggtgttcaccgtaacggtgctgccctcgcggcctgtcaggataccggaaaactcacgcacgccgtctgcattcgggcggatgagctttacccggatcttctggcccttgagggcttcatagtgctccgggcgggtcagcttacggccaaggccggggctgcccacttccagataatagctctggtcgatggggtctgcctcgtcaaggatggggtccagcgcatgggaaacatccgcgcaggtgtcggtatccatggtgccgtccttgtcgatgagcacgcgaagataccagtctggaccttccttttcaaaaaccacatcccacaggcgcaggcccatgccctccacggtggggcggacaagcgcttcgactctctgggcggtgttgccgccagactgcttcgccataaaaaacctccaaacaaacaagaaacgcggaccttgcggcccacgtttcaggttaaactatatcgtactactagaatataccatacatcccgcgattatgcaagcattttcgcagatttttttcgccgcagggtcttttacagcacccacacgccgtcccggaacagctccacggtgcggccatcgcggcatttgccggtgatatggctgtcctctgcaccgatcatcacatcctcatgcaggcgggactggttcatgccgcgggccagcagctcttccttcgtcagcgccgtgccacccttcgtggtgccggggtagctggcaccaaaagcgatgtggcaggcggcattttcgtcaaacaacgtgctgtagaacagcttgccgctgcgattgatggggctgcttgccggcaccagtgccacttcgccaatgctgcgggagccttcgtcgccgtccagcagacggcccagcagcacctgtccctgctcggcgtggtagtccacaacccggcccttctcaaaggtgacacggaagttcttgatgagctggccgttgaacacatagggctttgtgccgtagacgatgccctctaccctgtccttgtggggcgcagtgaacacttcctccgtggggatgttgggcaggaacaccacgcccttttcgctcttgctggcggcgctttcccacacagcctgatccgcaagacccacggtcaggtccgtgccattgctgctctcaaaatgcacgctttccaagtccagcgcgttcattttatcccgcagagtgctgagccgctccatatgggcctgccactcgttcaccgggtcgccaccggtgacccggcacacgtcaaagatcagcttccacaaagcctccattgcggcatccgcgtccagctccgggaagaccttctttgcccacggcacactgggcagggccgcaatggaccactgcacccggtcgttcatggtgtactcctgccactcctccataaaggcgcggcgggcggcattcacccggctgatcttattgccgtcaatgcccgcatacagctccgggtcgtccgcaatgagatgcagtacacacacgccgccctcgctttcggcatagtcaagatagcggcgcagttgccatggcttgaggtcgatcagggcctcctcgctgcccagctccatgcgggcgcgggacacagcgtcatcgctccagttcacctgcacatcccgggcaccggcttcgtaggcactgcgcacgcacagccgcgccagcggcgcgccctccagcgggcagttgatgatgagggtctgtccgggctgcgggttcacccccacccggacgatgaaatcggcatattttttcagcagttcgtcaaagttttccacggtagaacctcctgcggtgtaaaaatcatgtttttctgtttttcagtatacccggtacaagccgttctgtccagtaaaaagaaaacagacacctcccgctgttgaaaaagcaggaaacgtctgttatactgtcttttgagagtgctgtctacatacggcaggcggtctatgccttttcggccctgcgtcgggaaggcgaacatttttgtcgtaccccgacgctttgcagcgaagggggtgatgcttcatgacgcttttagaaactctggctctgctcacattgcttgcaaccgtgagctttggcattttcgatatcgcgtggaagatcttcaacaacaaaaaatgaccgcccagctaccaactcgtgcggtcatcttttgattaaccaaccggaaaggtactgaccgtttgccagacagcactttctttatttgtattatagcacagccccgccgaaattgcaacggcggggctgttttttatcgcctgaaagcgaatttttctcagaactcgatcttgctctcgatataagccttcagctcggagatgggcatacgcacctgctccatggtgtcgcggtcacggacggtgacgcagttgtcggcagcaatgcccttggcctcgtcgcccacggtgtcaaagtccacagtgatgcagtacggggtgccgatctcgtcctcgcggcggtaacgcttgccgatggaaccggtatcgtcgtaatccaccatgaagtacttgctcagctcgttgcggatctccatggccttctcgcccagcttcttgctcaagggcagcacagcgcacttgtagggagccagagccggatgcagatgcagcacggtgcggatatcctccttgcccttgctgtcggtcaggtgctcctcgtcgtatgcttcgcacaggaaagccagagccacacggtcacagcccagagacggctcaatgacgtaggggatgtagtgctcgttggtctcgctgtcgaagtactccaggctcttgccggaagcttcctgatggcgggtcaggtcatagttggtacgatccgcgatgccccacagctcaccccagtcggtgaacgggaaggcgtactcgatatcggtggtagcgcggctgtagaaggccagctctgcaggctcgtggtcacgcaggcgcaggtgctccttcttgatgccaaggctcagcagccagttctcgcaatagtccttccagtaagcgaaccattccagatcggtgccgggcttgcagaagaactcgcactccatctgctcgaactcacgggtgcggaaggtgaagttgcccggggtgatctcgttgcggaaagccttgcccacctggcacacgccgaagggcagcttgcggcgggtggtgcgctggatgttggcaaagttgacaaagatgccctgtgcggtctcaggacgcagatagcaggtggaagagctgtcctcggtaacgccgatggcagtcttgaacatcaggttgaacttgcggatgggggtaaaatcgtgcttgccgcagacggggcagacgatgtcctcatgctctgcgatgaaagcatccatctcgtcaaagctcatggcgtccacgttcacctcagggtgctcctcaccgatcagcttgtcggcgcggtggcgtgccttgcaggcgcggcagtccagcagggggtccgagaagctggagacatggccggtggtcacccatgtctgagggttcataatgatggccgcatccagacccacattgtaggggctctcctgcacgaatttcttcagccatgcctttttgacattgttcttgaactcgacgcccagcgggccgtagtcccagctgttggccagaccgccgtagatctcggaaccggggaacacataaccacggttcttgcagagattgacgatcatatcaagggtcttttcgctctgttccattgtagtacatcctttccgtccgcggctggtttgccgtgtcgttgttgtatcgttccggcagctttccccactgccgggcgtgcttttcaaagggaaagcacagtatctttactgtaccatgttttgcgccgcttgtaaagccgaaaaccggcctgctttggggaacagaccggtttttgcacttatttatggtatttcattcctgcattgatggtgcatgcacggtagatctgttccgtgagcacaaggcgggccagctggtggggcatggtgatgcgtcccatgctgaacttgagtgcagcggcctttttcacctcatcggacaggccgtgggacgagccgatcacaaaggccacgtctcctgccccactgtttgcgcggtcggcaaggaactgcgccagctcgtcggaggagatctgcctgccttcaatgcacatggccacgatggcagcacccttgcgtacattggacaggatggccttgccctccttgtccagtgccttttttaccacggcatccgaggcgttcttctcctcgatcttttcctccggcagctcgatgatgcggaaggacgcgaaggcggcaaggcgcttctggtactcggccacgccctcggcgaaatattttgcattcagcttgcccacacagatcaggtcgatgttttgcattgcagtttcctcttttatatagaaacgatttaaaattgtctccgcttcgctctgacaataatagcggaaattccatttttattttcgtgtttgtcgcggcctgcgggccgctccaaacacattttcacgggtggggtcgctgccggaaaatgcatttttccgctgcgcgacggctgcaagccgacagcagcaagatgccgtttgccgttgcggcctttcttgtgaaaaggcaaattggaaaaatccgcagatttttccaatttgcaatccttaaaatcaacttccgctaaggatggcagagcgaagcggagccatttctcaataaaaagcgttttacagcagactcatctgctcgccctcgtcctcggcgcggagcagcgcgccggtggcgggcaggctgcgcacacggtagcggtgggggttcgccagctccagcgtgtccgcaggcaccaccgaagcgatggtctggttctttttcaaagtaaccactgccacgccctgactgtcgcgggtggccttggccgcgatctgcgccgtgccaaccagcagcatccggctggcgctggtgcggatggcaagttcggtctcctccggcaggaagaagagctttgccagcggttccttgtcgcagtaggccttcagcagcttgcggcggttctgcttggtggcataggagctgagcggaattttcgcgcacttgccgctggcaaagaagaacagcatatagccgctgtagtcgctggtgatcaccatggagagcacgttctcgccctcgtccatgcccagacggcccgggatgaaaatgcccatctgggccaccttgccgtcctccagctctgccagacgcaccttgtacacctgctgcttgtcggtaaagaacagcgcttccacgttgttgcgggtctcgatctgctgcacgatctcgtcgccttctttcagcttgtgggcaccggcggtgcgcagaccttgcggcgggatctttttgaagtagccctcgcgggtaaagaacaccgtcacggggtaatccggcgcttcttcctcctcggagccgttttcttcctcaggcagatcgtacaggatctcgctgcggcggggctggccgtacttcttggcaacatcgttcagctcattgatgatgatgcggcggaggcgggcgggctttgcaaggatatcgttcaagtcggcaatgtccttctccagctgttcgatctcgctggtgcgcttgaggatatattcccggttcaaatgacgcagcttgatctcggccacatagtcggcctgtacttcatcgatgccaaaaccgatcatcaggttgggcaccacttcggtctcttcctcggtggtgcggataattttgattgccttgtcaatgtccagcaggatagcagcaagacccttgagcaggtgcaggcgcttttccttgccgtgcaggtcgtagtaggtgcggcggcgcacgcactccacgcggaaggccgtccactccttgagaatttcgcgcacgcccatcacgcggggctggccggacaccagaatattgaagttagcgctgaagctgtcttccagaggggtagccttaaacagctttgccatcagcttgtcggcatccacgccgcgcttgaggtccagtgtcagcttcagaccgttcaggtcggtctcgtcacgcatgtcgctgatctccttgaccttgccggccttgaccaactctgcgatcttgtccatgatggcctccaccgtggtggttggcgggatctgggtgacctcgatcatgttctcgcccggcaccacattgtagcgggcgcgtaccttcacgctgccgcggccgttctcgtaaatttcacgcatctgcgcttcatcgtacaaaatctgaccgccgcccacgaagtccggggcgggcatggtggtggagatgtcgtggtgctcgtccttcatcagggccacggtggtggcgcacagctctgccagattgaacgagcagatgttgcaggccatgcccaccgcgatgcccagcgtgttgttggccagaatggtggggaaggtgaccggcagcagggtaggctcggtggtggtgctgtcgtagttgggcacaaagtccacggtctccttgtcgatatcccggaacagctcctcgcacacaccctcgagctttgcctccgtgtaacgggcagcagcgcaggacatatcccggctgtaggccttgccaaagttgcccttgctgtccacaaagggcaccagcaggctctcgttgccgcggcccatgcgcaccatggtgtcgtagatggcggcatcgccgtgggggttcaggtgcatggtgctgcccacgatgttggcagacttggtgcgtgcgcccttgagcaggcccatctcgtacatggtgtacagcagcttgcggtgcgccggcttgaagccgtcgatctctggcagcgcgcggctgacgatgacgctcatggcgtagggcatatagttggtttccagcgtgcgggtgatggggtcctccagcacactgccggcatttaaaatttcaacgccgtcgcccagctgcgggcgcaccggcttgagtgttttcttggtcgattttctaggcatcttctaacctcttgacgattttaaatgggcgccgctctcgctctgcccatattcagcggaaaatattttttatttttgcagttcaggatggcctgcgggccatcctgagctgctctttcacagatggagccgttccggttttctgcatttttcccttaaaatgccgtgacccgttggggccttcttcgtgaaaacgtgatttggagcagcccgcaggctgcgacaaatcaccaaattaaaataacgttacctctgtcattgccagagcgcaagcggaggcaatttaaaatcatcagctcacatccagatcgtccagatattctgcgccgtgctgcgcgatatgctccttgcggcctgccagattgtcgcccagcaggatatcaaacacctgcgcagtctgcaccacatcggtgggcatcactttaataaggcggcggctctccgggttcatggtggtcagccacatcatctcggggtcgttctcacccagacctttggagcgctggatggtgtattttttctcgccgatctcttccagaaacgctgtcttttccggctcggtgtatgcaaaataagtgcggtctttcgttgtaatttcatacaacggcgactctgcgatatacacatagcccttctcgatcagggtcggggtcaggcggtagagcatggtgagcaccagcgtgcggatctggtagccgtccacatcggcatcggtacaaatgacgattttattgaaccgcagattatcgagattgaaggtggccagctccttgttgtgtttgccgcccagttccacgccgcagcccatcaccttgatgagatccacgatgacatccgatttaaagatgcgggcatagtcggccttcaggcagttcaaaattttgccgcggatgggcatgatggcctgatattcactgtcgcggctggacttgaccgcacccatagcggaatcgccctccacgatatacagctcgcggcgggatgcatccttggtgcggcagtccacgaatttctgcacccggttggcaaggtcgatctgggtggacagcgtttttttgatgctctggcgcgttttttccgcatgctcacggctctgcttgttcaccagcacctgctggcagatcttctgggcctcgtccggcttttccagaaaatacacttccagataatgcttgaggaagtcggtcatagcctgcgagacgaatttgttggtgatggcctttttggtctggttctcgtagctggtgcgggtggaaaagctggacgagacatacaccaagcagtcctgcacatcctgaaagctgatggcgctctcaccttttttatagaggttcttttccttcaggtacttgttgatctgatagacaaaggcggtgcgcaccgcgtgctccgggctgccgccgtgctccagccaggaagagttgtggtaatattccagcatctgcaccttattggagaagcagaacgccgcgctcatgcgcaccttgtaatccggctggtcctcgcggtctcggccggatgcctcactctcgcagctgaacaccggggtcagggtatcctcccctgccacctcggccacatagtccgcgatgccgtgctcatagcaccagctctcgtaccacgccttgccagtggcagggtctttctctttttcatcggtaaagttcagggtcaggcctgcgttgaccactgcttgacggcgcagggtatccttatagtagctgccgggcacatcgatgtcggtgaacacctcgtcgtccggcttccagtgaatgatgctgccggtgcggcggcccttgtagacttccttctgcaggccgcccacattctcgccctttttaaaatcaaggtgatagtggtatccgtcacggtagatatcggcggtcatccatgcagaagcatactgggtagcgcacaggcccagaccgttcaagccaaggctgaactcgtagttatcctcaccctcgccatacttgccgcctgcatacatctcgcagaacaacagctcccaattgtagcgcccctcgccgttgttccagtccacgggcataccgcggccaaagtcctcaacgataacgctgccatccttacagcgggtcacgttgatggtatcgccgtggccgtcgcgggcttcgtcgatggagttggagacgatctcaaagatggagtgggcgcagccctccacgccgtctgagccaaagataacggccgggcgcttacgcacacggtcggcacccttcaaagaagtaatgctctcgttgccatattcctgtttttttgccatgctgctcctcccggcccggcctttcttgcaaaaagcaggccgtctgtagtcaaatcataaaacgccactgcccttttttactataatataggtatatgcagagaaaaagggcaaaagtgcctgaattatttcattttcattaaaccataggttgttgaatttgtcaatttctgtttggcacgcccgcacacagcacgtcctgtgccggatgtgccgaaagcaggttgaaaaaagtcattcttattttacgcgctggagcgaccaaaatcaagaaagtttcaattttctgaaaaaattttggatttacccctttacaaaatcgaaatttcaggtataataatcatcgtccggtgcgcctctgtagctcagtcggtagagcaggggactgaaaatccccgtgtcattggttcgattccgatcggaggcaccagtcaaggaaacccagcagggtttccaatatgcggccgtagctcatctggtagagcgccaccttgccaaggtggaggtagcgagttcgagcctcgtcggccgctccataacggagcagcaacagttgctccaatatggcccggtagctcagttggttagagcaccagcctgtcacgctgggggtcgtcggttcgagcccgatccgggtcgccaccaagaaagcgcaagctttcacctactttgaaacttgttttcagggcatcagaaatgatgggtgcaaggtaaaatgcaccgaatatgcggccgtagctcatctggtagagcgccaccttgccaaggtggaggtagcgagttcgagcctcgtcggccgctccaacaggagtggaaattcactcctaaatatggtgacgtggccaagtggtaaggcaagggtctgcaaaaccctcatccaccagttcaaatctggtcgtcacctccaaaagattcccggaagcttcggcttccgggatttttttgttttgcgttgttccctatcagcctcctcgccctctccgtcacctacggtgacagactcccccttttgtcacctgcggtgacatcttcccccggagcgggagaagtctttcctcaaagggagagcctctggcgaaaccggtcactttgcagttaagccgaaaagtctgccgcagtgccgcactttcgcagaaagcggcactgcaaatgccgtctacctttacgccccctccagtgaaaatgcaatgccggagcttccgcggacgctccggcattgctctcttaaaaattattcttccgctgaatacggccggagcaaggcgtaggccattccagatcgtccccctcagaacttcagccgcatctggtaccacaccacgcccccgtgggtggagccggaaacgccctcgttcacaaagccgaactttgcatagtagtgcactagggcctccttgcaggtcagtaccagccccttccggccttgggcccgggcgtcggcaatggcctgctgcagcagctgcccggcgtacccctgtctgcggcaggccgggatggtgtttaccccaaagatcatctgccaggcaccattctcccggtggagggaggcgtcggcgtacatctcatcggtcaggtccggccagtcggtgcaaaagccgtccacaaaggccagcagcctttccccctcccacagcagccaaaaatgatcgccgtactgctgcagccgcccggcaaactcctctgccgtagccgcctctgccgccgggaagcaggccgcctccaccgctgcaatggcctccaagtcctttaaggtccccttacggatctccataaatattctcccctctttttcttccgagtgtaccacagttcctgcccaaaggcaaaggtcctgccggtttttcctttttgggccatttgcatccgctgccgctccgtgttacaatggctatattgcatccaggaaaggagctgacacgccatgcccgccgaaaaccataccaccctcaccccggatacgccggtgcgctacctgaagggcgttggccccaagaccgctgagcggttcgagaagctgggcatcgtgacgctggccgacctgctgtgccactacccgcgcagatatatcgacttcaccaaaccctattccatcgccgaagcgcccaccgatgtggagtgcgtcgtcagggccgaggtgttcgccaaacccggcgggcgtatcctgccgggcgggcggcggatggagcgcatcactgccggggacgatgtgtccagtctggagatcacatggttcaataatccgtatgccgcccagaagctgcagcttgggcaggaatattattttcagggcatcgttaccggcgggatgctgcgccgccagatggtcaacccgcaggtgcgcaccgccgagcagatcaaggcttctccctttgaagcggtctacccccagaccgagggcctgaccagcaatgccatcgccaagtgcgtgcggcagctgctgccccatgcagagcttctgcccgaccctcttccgccggaaatgctggcaaaataccgtctgctctccaaggcagatgcggtgcgggccatccactgccctgccaccgaagagcaggcctatgcagcccggcggcggctgatctatgaagaacttctggttttgcagctgggcattggccggatgaaaaaccggggtgccgctgccaccggtgcgcccatgcagcttgccgacccgtccctgttctgggccagcctgcccttttcccccaccggagcccagcgccgggccgtgagcgagattctggccgacatggcgggcgagacttccatgaaccgccttttgcagggcgatgtgggcagcggcaaaacgctggtggcggctgccgccatctgggcctgcatccgagcggggtatcaggccgcgctgctggccccgacagaaattctggccacccagcacgccgaaggcctgaaccggatgcttgcccccttcggaatgcgggtggccctgctgaccggcggcatgaaggccgctgcacgccgcaccacccttgccgccatccggaacgacgaagccgaccttgtggtgggcacccacgccatcctcagcgaaggcgtagagtttgcccggcttggtcttgccgtgatcgacgagcagcaccgctttggggtacggcagcgcggaatgctggccgaaaaggccgcgaatccgcacctgctggtgatgagcgcaacgcccattccccgcacgctgggcctgctcatctacggcgatttggacatctccattctggacgagctgccgccgggccgcacaccggtcaagacccgctgcatcaccggcaaaaagcggcgcgacctctaccattttctcgatcaggagatcgggcgcgggcggcaggtgtatctggtctgccccgccatcgagaacacaccggatggcgggctgaacgccgttaagagctactacgaggacattgccaaagccctgctgccggagcgccgggtaggcctgatgcacggcaagctcaaacccaaggagaaagctgccgtgatggaggacttcaaagccggacggctggacgcactggtgtccaccaccgtcattgaggtgggtgtggatgtgcccaatgccagcgtaatggtgatcgaaaacgcagagcgctacggtctgagcgccctgcaccagctgcgcggccgcgtgggacgcggtgcagcggagagctggtgctttcttgtcagcgacaaccaaagcgaaaacgtacaaaagcggctgaaatttttgtgcagcaccacggacggctttgcggtggcgcagtacgatctggagacccgcggccccggcgactttttcggcagccgccagcacggcctgcccaccctgcagatcgccgacctgatgaacgacacccgcaccctgcacgctgcgcaggcggaagccgttgccatgctggccgacgacccgctgctggaagcgccggagcacgcactgctggaacagcaggtgcagcagatgttcgagaaagccggagccatgaactgatccggagtttttttgcgcacaagcaacagcaaatgcaaaagccgctgcacggctggtgcagcggcccctgttatcgaacggaacgctttgcgtgccgttcgcccatgcttatcacatcgcagaacacgcagcggcttttggtggaaagctgggtatccttatggtagcagccaaaaaaccacttgtcgtaggtcagcttcaacaaaattttatccagaaagctgtgcagctggttggtctcgccgctggcaagggcggtaaaatccaaaaatctgcttggcgcatcgtgggtcagcacataatccactttgtaatcgcacgctgcaaggttctcctcacaaaaggcgtattcctcctccgaaggcatttcttccctccaccagttcacgccgggttcccgatcctccacatcctggctttccgcaccgccgaagcacaggtattttttattctccaattccagcacgctgccgcggcacacatggtacacattgccgcccagtgcctgcaccttgccgccaaagcgttcctcggtgggatactgctttaaaaggtcgtagttttcgtggctgccgtccagaaacagcagggtatacgggcgcttgcgcagccaatccagctttttctgttcctccttgctgccgtcccacacaaagccaaagtcgcccagtaccaccacggtatcccgtttgcccagccagcgcagcttgccgtgcttgaagcggtcgatgtcgccgtgggtgtcccctgtcagatataccattcctgtcctccctgaccggatgtgaaatcggcacaataagccttgtcacaccccgccaaacctgttattataaagaatacagccttccgctgtgatctcgttcttacccggcgcacggcgcttgtgccgtgctgcctgttgttttatattatcgctttttaaaggaattgtccacatgaaacgtatttttgcgctggttttgtcgttcgctgtcctgttcagctgccttgtgctgcccgccggggctatgttcgaccccaccccggtctatcaggtgcaggcacagagtgcctatatcgtcaacactgataccaatatcattgtctatgataaggacagcacaaagcaggtatccgccggtggtctgacaaagtacatgaccattgccctgctgctgaccaactatgccgaccatctggacgacaccttccagatgccctttgccatctcggattacgtttataacaccaacaacgctgatatgcgctccaacgagacctttacctaccgcgaagccatgtacgccatgctgacccgcaacgccaacgaagccgccatgggccttgcctatgccctttccggcggcgacctcgcgggctgggtgagccagatgaacaccctgtcccagcgcatcggcaccaccggcagcacctggacggatgcctgcggcatcgacagcggcaacgtgacctgtgccgtggatatgtacctgatcctgcgctatctgatgagctttgatgcctttgtggaggtttccggtgcgcccagctttaccatgcccgccaaagaaaaacaccgttcttcgtctgttctggtcagccagaatgccgcgctgagcaaatccagcggcggcaaatactaccgcagcgccatgcagggcggcatgtgcgatgtgaccgcattcaaaagcgacagtggcaatcagagctatgtttcatgggccaataaggatggtgccacctatattttctgcgtgatgcaaagcccggacacctgcgacgatttcggctacgccaaccgtcgcccggccctgtgcgagaccgtgaagctgatggactgggtgttcgacagcttttccattcaggccgcgctggacaccgaccttacgctggccgagatcccggtgaagtattcctccgataccagctccctgcagctgtatcccgccgacagcatgatgaccctgctgccttccaccggcgacggcagcgtgacccagaaatatttccacctgccggattccgtgtgtgcccctgtccagcagggcgatgtggtgggtaccgtggagctgaagcttgccggtgagaccattggcgtggtggacctgatcgccgggcaggatgtcagccgcaacccgctgctgttcactgtggcgcgttttcaggaattcttaggcagtctgtatctcaaagttgtaataacattgagtattatttccatcatcatctactttgcgtgggtccttttgaacaactggaaccgccgcaagcccaccagaaagatccgccgccgctgagctttgcaccgttcatccgcattttgtggaaaagtgatgtaaaaagccccgtcagccttttcaggatgacggggcttttggttgcgccagcaggagtcgaacctacgatgggggagtcaaagtcccctgccttaccgcttggcgatggcgcatcgtgcaagatattataccatattctttgtttttccacaaggggaaggttccacttttccgcttttgcggcggctctgtgccgccttttgcagcctgcaatttgtgaaaaaccaatttttttcatcataacaacaaaacacgcccattttgttgcacttttgttacactatatgtggtaaatataggattgaataaacctcctcttcccggctttttcgtctactgcctcatggcggggacatcgaggtctgttctggtgtttccgttcccggcaggcaccacatcccaatttgtcaggaaagcgaggagtcatatgaaaaagatcttgaaaatgctggtcctcggtctgctcagcgctgcactgctctgctgtgcactgccctctgcctttgccgcagaagacaaggattcgcaggtctacaccattggtctggatgccatgggcggcagcagctccgctgtggcagtcaccaccaatctgagcggcaaactcagtgccctgcccgcgcagcctgcgctggaaggctacacctttgacggctggtataccgagccggtgggcggcacaaaaatcagcacctctacggtgtttaccggtgataccactgtgtacgcacactggaccgtgaaaaatgccaccacttccaccagcacatccacgcccgctcagccggaacagaccgcgcaggaatacgatgacggcccgattctgagcgttctgacggtagccggtgctctgatcaccacgctggccgtggctgcctttatttaagtcttttcacacactgtatcaattttatcaatagaaaggaaaatctccatgtctactatgaaactgcccgcaaactatgcctccatcagcgaagaggaaatggtctatctggacggtggtgcccgcgacgcttacaacagcttcctgaatgtcggtaaggtgttcaacgccattgcccgcatcttctccggtgcaagctccatcatcaacaatgtcaacgtgatctaccagtccttcctgactctgggcgatctgctgaagagcttctgatccggcttctattttcatctgtttttcaagaactgtctccgttgtggggacagttctttttgtttttaacgcattttaatcgtttacatcaaaagaaacaatttttctttggctttggcaaaaaaatgcacgaaaaaggcatttttgttacgcttttgttacgcatactgtgctaacatataaggtggaaggtcattcatcaaactggcgctttcacgccgaaaactgatatatcaaatgtggttttgtggtgcgaaaattttcgtatttgtcgaaggttttcgttcgcccaatccgaccactttttgcgggagaaatcgatcattatgccagaccgtgaactgcggcacatgcgccgcaccgaattagtcgagatcattctggcgctcaagcagagcgaggaccagctccgggcagaaaacgctgccctgtctgcccagctgcaggaacggcagatccatattgaaaacgcaggttccattgcgcaggctgcactggagctgaacaaggtgtttgaagcggcgcaggctgcggctgatgaatacgttgcatcggtgctcgcagcaaacaaaaacaccgatgccgctgccagcgctctgcgcgctcaggcggaagccgaagcccagcagatccttgcacaggcacagaccgaggctgcgaacctgaaggcccgcacccagcagcagtgcgacgcggaaacagaagccgccgcacgcaagcgcgcccagaccgaagcggactgcaaggcaatgcttgcccggacgcagcaggagatccagcagcgccgggccgcttttgaccgccgggccagcgaactgctggacggctatcacagcacggaattcctgccggaggagcgtgccaaatgaaagagcaaaagatcaggttcacgcccattccatccacagcagaggtggaagcagagcgcgaacgtctggcctaccgcagccgttatatgcgggtgctgcgcagcacggtctacacgctgctggtggtcgcggccgttgccgtgctgctggccaccctgtttctgccggtgctgcaggtctccggcgacagcatgaaccccactctgcaggaccgggacatcattctgctggtcaagggcagcgacatgaagaccggcgacctttgcggattttactggcagaacaagcttctgctcaagcgcatcatcggcctgcccggtgatgtgatcgaactggacgaggacggtgtggtcactgtgaacggccagacgctggatgagccctatgtagatgaactggctctgggcgaatgcgacatcaaatttccctatcaggtgccggaaaaccggtatttcgtactgggtgaccatcgggccacctccattgacagccgcagcagtgtgatcggctgtgtggaaaaaagtcagatcgtaggcaaggtttttttgcgggtatggcccttgtccaacttctcgttgatccactaaggaggtttaggaatcatgcgggatattgtgaaagaatatcagaaaaagttccgtcggaaccaccagcgcgccagacgctatactgcgctgctgctggcactggcgcttaccaccagcctgttcgtgaactggcagctgcacggcgtgggcattgccaaaacggccgaatatctgtgcggcgagttggagcacgagcacaccgctgcctgctatgaaaagcagctggtgtgcggctatgaggaaggcgaaccggaggactggaatgccaccatgacggacgacgacatgtcttttgatgatacatttgacatggatgatgatgcgttcggcgtggatgcggatgatcccggcattgcagcctattccgcagagccggagtacatctttgtgccccatgagcacaccgacgactgctaccaggaagtgcaggagctgacctgcctggaagaagagcacacccacgacgacagctgttttgatgaggatggtgtcaccttcatctgcgataaattcgagcacacccacgacgacagctgctacaccaccacctatgagctggtgtgcggtctggaagagggcgagcttgtagaagaagtgaaccccgattatgacccggtggccctgtttgaggagccggtggccgcaaagcccgtggtggtcgatcctgtgatcgagaccccggtgcaccaccacaccgatgcctgctacgaggaagtgctggtctgcggcctgccggagcatcaccacacggtgaactgcctgtccgacccgctggacggcacgcaggacgaggacgaatggctggcacagaccggcaccacgctgagcggcaactgggccgacgacctgctggccgtagccgagagccagctgggctatgagcagagcgagcgcaacttccagctggacgatgccgacggcgagaccgtgcgccactacacccgctacggcaacgactacggcaacgactacggcccatgggacgtgatgttcctttcctactgcctgaaatatgccgatatcccccagagcgcgatcccgcaggtttccagcgtgctgtctttgcacagccagctgcgcagcgcgctgtacaacgaagagaccggcagcggctatgccatggattttgacggtgatctgccgcctgatgccgcaatgcccggtgatatcgtcatttacaatggcaccgtgaccaaggctgtggccgcggaaagccagccattgcaggtgcaggatgattccgccgatgccgacattgccctgctctccatggatgctgcggccaccactgacaccgcgccccacattgaggaatacaccgtggatgccagcaccgttggcatcgtgagcgatgtggacgaagatttcggcaccctgaccgtgatctccggcgatgtggatggcaaggtggctgaagtcacgctgaatgcttcgcaggtgacaacgctggtgtctgtggcaaatgcgcagcaggctgattacggcgtgtctacgccgtatttcaaagtcgaagatgacacaggtgccattaccaccatcaaaggtctggatgcactgaattacctcactgctctgaaggtgcagcgcaagaatggcactgaatacgaggataccaacgtcaccaccatttcggagcttctgcacagcagcctgaccgtcacagatatcccggccaaagagattcaggacaacgactactgtgtccatgttaagctgcccaagagctttgatgtgctgaacgatgagcttatctccggcaaactggaagataccggcaattatgacacctgcggcagctaccagctgctcaaggggaatgacggctgctggtacgccgtgctgcggtacgaccaaaactatatcaagcagaaagaggaagcagccgcaggcgcggatacttccgatgccaaggtcaccagcaacattgccttcaatttccagtggaaccagagcgaggtcaccagcagcggctttaatcagatcgaggtcaacaaagattacgcccttgatatcaccatcaacccggatgaaacccccgatgaggataaaaaagacgataagaactatgaccttaaccagagcgtgaaggacccgcgctacaatggcagcgatgcctacctggattacactgttacgcttgtggtcaaaaacgaacaggccggcccgctgacgcttgtggacagcatgaccctgcccaccggcgtaaccgccgaatatgtcgaaaactcgctccagctcagcatggaaaacggcaatacaacgctcggcatcacttggaaagatgttagtgatgagcgcaagatcaccttgggttctgccgattcccccattgccgcaggcacctattctatccgctacaccgtcaagctgaaggactttgacaaaacggctgttgacggtgaagtaatcaataacatcaggattctggacacgaccatcagcgatgatgccgagaagtcggtaaaaaccgacagccttgtgatcaccagtcaggccgatccgtccgactacgaacttccctctaccggcggggccggtaccaaactgtatacagcaggtggcggcgcgctgatgcttgccgctctggtgtgcggggtttgcagaaagcgcagacgcgaaaggagggcacgttaaaaaacctgcatccttcctgacacggcggcaaaattgattctgcgccggaagcagaccctgaaaataggaatcagaaaaacttgaaaggagattttcgcaaatcatgatgaagaaagtaatcaaaaagctgctggccgcactgctggcagttgccatggtgtgcgccatggcgatcccggcgtttgcatacgacactaaggaggacctcgacacaaaacacgagtacgacgccttccagatcttcaagggtgatgttagtgatgaca

SEQ ID NO: 1116 - DNA, 18856 bp, Unknown
  gut microbiota DNA sequence
tatccgtaaacatcacactttgttccggtgccgcttgggaatgggcacgctgagcaccagcgtgatgccgatggccagcgcaacggctactttaaaggtgctgatgccgttggaaagggccagcgcattgttgccctgtataaaatagtaggcggtgtagtagatgcccgcaccgggcaccagcgggaagatgccggacagcaggaacaccgttaccggcattttaagcacaatggcaaacacgcgggtgagcagggtgagcggaatgaccgccagcagggaggctgcggcactgtctgcccccagcatcacggccagctcgtagacaaaccagcccacggcacccaccagcccgcagaagaacaggcttttgcgcggacagccgaacagaacggcaaaactcagggtgcctgcgccggcaataaagaactgcgcggccagctccccaatttgtgtactggtcaacatcatgccacgaccacccccgtaaagaatgtataaaggctcagcacaaggccggtgccaatggcaatgctggctgcaatgagcagcgcatcgatcatgcggatggtgccggagaggtaatctccgtgcacaaagtcgcggatgcccatggtaaaggcgatgccgggggtcaggatcatcagcgaaccgataatagaatgactggccggtgtgcccagcattcggcaggccagaatgcacaccagcgtgataagcgcagcacagctgatcttgcaaaagccgccgggcagctcgtgctgctcacacagcagcaaatagccgctggcaagaaagcctgccagtgccgccgccagcgcactgcgcagtgtgccgccgaagatcagcgcaaagcagaatgcaccgcacatgccgctgaccagctgcacccagtccttgggaaaagggatgcgccgcgccagcaccagacggctctcagcttcgtccagcgacatgctgccctctgcgatctcgcgggagagggcgttcactgccgccactcggcccagatgagtggtgcgggtaggcacattgcgcacctcgctgatctcggcggtgcccgcactggcaaagatgccgttggtcagcacgtaaacatggaactcccgcaggtggaatgaccgggccatgatctccatggtctgctccacccggaacacctcggcaccgttttccagcaatgtctggcccgccgccatggtaaaatccatgatgcggcggcgcagttcttcatccgggaaaacctcgcggctgttcattgccgcacctcctttataaataatgctgtcttattctaccatgtccgcggctggcgcacaagataaaaaaacgcaatttcctactaaaaaacttcgttgtaggtgttgacaaatccggtcgattggattattataaatgcaatatcacaaaaatggctgtgaagagaagagtaggccttcgcattgatccttaccagaaagcccgggcgatggaaaagggcaggaaacaggaagctgaaaatggtctcggagctgtgcgggcgaggtgcatgagcgctaagttcgcaacgggatgcgcccgttacagcgtccggctgtaagcagcaaagctgccgcagcattgaggctgtgcccgcaagggtgcggtaaaccaaggtggtaccacggaagtatgttatgctcccgtccttgtctgagcgttggctcaaggtcaaggacgggagcttttttcatgcatccgtcaaaggcccttagcacggaactgtgccgtgcgggccgctgtacattataataagcaaatagagagggaacaaaactatgattactcgtcgtgattttctgaaagttaccggagctgcagctgctgcagctgccctgaccgcatgcggcggttcttcttccaccgcatcttctgctgcttccggcactgcttcttccgcagcttcttctgctgtggctaagctggacaaggtgaaggtggctgtgcccaacgacaccaccaacgaggcacgcgccctgaccctgctggagaagaacggcttctttaagctgaaggctgatgcaggcctgaccgcaaccgcaaaggacatcgaggagaaccccctgaatgtttccgtcgatgaggtcgaggctgctcaggtgcccaacgtcctgcaggacgaggactacgccgtcatcaactccaactacgccatctccgctggtctggaccccatgaccgatgctctggcaatggaggacggcacctctgcttacgtcaacattctggtctgcaaggacggcaatcaggaagagccgaagatcaaggctctggccgctgctctgcagagccagaaggtgaaggacttcatggatgaaaactacaagggcgctgtggtgtccgttgtggagaaccccaccgacggctatgactcctccatcgactacgatgcactgaacggcgagaccgtcagctgcgctgctactccggctcctcactgcgaggttctggagatctgcaaggacattctggccgaaaagggcatcacgctggatattcaggagtacgacgactacatcattcccaacaacatcgttgaggacggccagtgcgataccaactatttccagcatcagccgtatctggacgacttcaatgcagagcacggcacccatctggtgacggttgccggcatccacgtggagcctatgggcatctacggcggcaagcaggacagtctggcaccgatcgagggctaagcaaactcccccagtcaccttgcggtgacagccccctcggggagggggtctttgcctgaccgttctgtttcaggctccctccatgagggagctggcaaacccgcaagggtttgactgaaggagtttattcaacagcaaggagcaatttctgtgatcgagatcaaacatctttccaagaccttccagatgaaggacggcgcggtgaatgcgctgaaggacatcaacctcaccatcccggatggttccatttatggcatcatcggcatgtccggtgcgggcaaatccacgctggtgcgctgcatcaacctgctggaacgccccaccgagggcagcgttgtgatcgacggtaccgctatggagactttaaacgcagcccagctgcgtgagcgccgccgcgatatcaccatgatcttccagcagttcaacctgctgatgcagcgcagctgcctgaagaacatctgcttccccatggagctggccggtgtgaaaaaggcggatgccgaaaagcgtgccagagagctgctggaagtggtgggcctgcccgataaggccaacgcctacccggcacagctgtccggcggccagaagcagcgcattgccattgcccgcgcactggcaacggaccccaaagttctgctctgcgatgaagccaccagcgcactggaccccaacaccacccatgctatcctgaccctgatcaaggacatcaacaagaagctgggcatcacggttgtggtcatcacccatcagatgagcgttgtggaagagatctgcgatcacgttgccattctggacggcggcgttgtggtggaggaaggctccgtgcaggagatcttctcgaaccccaaaacgcccgcagcaaagcgtctggtggcacccaacggcggcagcgccgcacgggatctgtccagctttgcaccggacgaccatgtggtgcgcgtcaccttcaacggttcgtccacggcaaagccgctggtggcaagccttgccgcagaaaaaggcattctggtgtcggtgctcagcgccgatacccgtgatctgagcggccagtgctacggctccatgctgctcaagctgcccgctgatgtggagcaggcaaagcaggctgcggcctatatgcgcgcccagcccggcattacggtagaggaggtgaccggcgaatgagtattgcagattacggttttgctatctgggagaccttttatgtgacggtcctttccaccgcgtttgcgctggtgctgggcctgccgctgggtgtgctgctggtggccggtgataaggacggcattctgccgctgcccggctggctgatgcacattctcaacatcgttatcaacatcctgcgcagtgttccgttcctgatcctgatgatctgtgtattcccgcttacccgtgccatcgtgggcaccacggtgggtaccaaagccaccatcgttccgctggtggtggcagccttcccgttcgtggcacgtctggtggagaccagcctgcgcgagctggacgagggcgtggtggaagccgcccagagcatgggcgcaacgccgttccagatcattaccaaggtgatgatcccggaatgcctgcccggcctgatctccagcatgaccaccgcactgaccaccattctgggctactcggccatgtccggtgtcattggcggcggcggtctgggcaagatcgcgttgtcctacggctattaccgctaccagaccgatatcatgatcgtgtgtgtcattttgctggtgctgatggttcaggtgttccagactttgggcactgcttgggccaccagaagcgataagcggctgcggaagtaactccttcagtcgcacttcgcgcgccagctcccccggagagggagcctctggcgaagaggaaaactttccggtattgccaaagccgaaaggctttgacggaaggagtcctctcctcattttgcccccgaacgggaactaaaatttaacgtttcaattccccgccggaggctgcagcactcctgcggggaattgtgctatatggacaaacccagtaaaggagtatgtagtatgaatcgcgataccatctgtgtgcagggcggttacacccccggcaacggcgaaccccgccagatccccattatccagtccaccaccttcaagtatgccaccagcgaggatatgggcaagctgttcgatctggaagctgacggctacttctattctcgtctgcagaaccccacctgcgaccttgtggctaagaagatctgcgagctggaaggcggcacggccgcaatgctgaccagcagcggtcaggctgcaaacttctttgccctgttcaacctctgcgaagcaggcgaccacatcgtggcatccagtaccatctacggcggcaccttcaacctgatctccgtcaccatgaagaagatgggaatcgatgccaccttcgttgatccgctgtgcaccgaggaagaattgaacgccgcattccggcccaacaccaaggtggtgttcggcgagaccatcgcaaacccggctctgaccgtgctggacattgagaagtttgccaaggctgctcacgcccacggtgtaccgctgatcgtggacaacacctttcccacgccggtcaactgccgcccctttgagtggggcgcggatatcgtgacccactccaccaccaagtacatggacggtcatggcgcggtgctgggcggtgctatcgtggacggcggcaagttcgactggatggcccatgccgagaagttccccggcctgtgcaccccggacgacagctaccacggcatcacctacgccgagcgtttcggcaaagagggtgcctttatcaccaaggctaccgcacagctgatgcgtgactttggctccatgcagtcgcccatgaacgcctacatgctgaacctcggtctggaaagcctgcatgtccggatgcagcgccactgcgccaacggcatggctgtggcagagttccttgagagccatcccaaggtggcctacgtgaactactgcggcctggagtccagcccgtaccatgcactggcggagaagtatctgccgaatggcagctgcggcgtggtcagctttggtctggccggcggccgtgaggctgcaagcatctttatgaagaacctgaagctggcagccatcgagacccatgtggccgatgcccgcacctgctgcctgaaccctgcatccagcactcaccgccagatgaacgatgagcagctgaaagccgccggtgtgcccgcagagctggtgcgcatgagctgcggtctggaaagcagcgaagacctcatcgcagatattgcacaggcgctggataaaatctaaaaggtgagttcagcagcatctatcggttccggcccttctcgtaaaaacgcgtttggagcgccccgcagggcgcgacaaacgcaaaatataaaaataaattccgctgaagatagccagaacgtcagcggaggctattctaaatcgttaggagtacgaactatgccgctgatcatccccaagaccctgcctgcttacgatgccctctacaacgaaaatatcttcgtcatgcatcgtgagcgcgcccttgcccagcacatccgcccgctggagatcctgatcctgaacctgatgcccaccaagatcaccaccgagacccagatcgcccgtctgttggcaaataccccgctgcaggtgcacatgaccctgctgcagacggccagccatgcggcgacccacgtttcggcagcacacctcgaatcgttctataagaacttcaacgaggtgaagaacaaccgctacgacggcatgattatcaccggcgcaccggtggagaccatggactttgagcaggtggattactggccggagctgtgcgagatcatggacttcagcgagacgaatgtctactccaccctgcatgtgtgctggggtgcacaggctggcctgtactaccactacggcgtgcacaagcagctgctgccggaaaagatgttcggcgtgttcgagcaccgggtcacccgcccgtcgaaccctttggtgcgcggctttgacgaggtgttctatgcgccccacagccgccacaccggcatcagccgcgaggatgtggacaactgtaaggctctgcgcatccttgccgagagcgatgcggccgggcctttccttatgagcaccgagaacggacggcagatttttgtcaccggccacccggagtacgacaagtacacgctggattcagagtaccgccgcgatgtggacaagggcctgcccatccatgtgccggtgaattactacccggacgatgatcccacaaagccgccgctgttccgctggcgtgcccacgcccacctgctgtatgagaactggctgaactactacgtctaccagaacaccccctacgatctgggcgagatccagcgcgtaaagcacgaataaatgcacaaaaaccggtattgcgtcaaaattgcgcgataccggtttttatgctatactgttcctgcggcccttctccattcccctaaccgcggaaaggaggtgaaccccttggaaactctctctacatttatccaaaccgttgccgcgcaggtagttgcctactatctgtgcacatggatcgacggtaagatcggcaagggcagcaaacactaaaagaagcccccggtactgacactaccgggggcttcgtgtttcggcatgaacccgatggattcaatctctctacattgcctatctttagtatatgcagttttgggcaaaagtcaagcgatgaaatgcaaattattttttacgccttaccggctttttcttgcgcacactgtagccaaaggtgcccagctttttgcccagtgccagatattcgccgtggctgtagacgatgagctttgccttttcgagacacagcttgccgttttcgtccagcaggctttcgtccacatcgcaggctgccacttcggcaaggaacaggtcgtggctgcccagcgggatcacctgagttaccttgcattccagattgaccgggctttcttccagaatggggcagtcggtcagcacgctgccgggggcagaatgcaggccgcaggcggcaaatttatccacatcacggccgcttttcacgccgcaccagtccaccgaacgcaccagcgcttcggtgggcagattgatggcaaactgtccgctttcctgaatgaggtggtggctgtagcgctccggccgaacgctgatggacaccatgctgggctgggtgcagatggtgcccgtccagccgatggtgatgagattgggcttttccagcccgccgcaggacaccaataccggcggttccgggttcagcagggtgctgccccgccagctctgtttgctcatccgtgatacttcctttcgtagggtgcccaggtgcgctcgctgatgatgtagcgcgggcgggctttcgtctccatataaattttgccgatatactcgccaatcacgcctaagcacaccagctgcacgccgctcatgaagcagacgatgcacacgatggaggcccagccggccacgctgctgcccatggcggcgcacacgatggcccagatgactccgataaagctgatcaggctcacaaagatgccagatccggtaataaggcggatgggcttgttggaaaggctggtgatgccgtcaaaggcaagggccagcatcttgctcagggggtagtggctctcaccggcaaggcgctcatggcgctcgtaggtgactacctcgctcttgaagccaaccagcggcaccatgccgcgcaggaaaatgttcacttccctgtagtcggcaaagctttccagcacacgggtgctgatgaggcggtagtctgcgtggttgaacacgatgtctgcgcccagagcgttcatcacatggtaaaagccctcggcggtgaagcgcttgaagaaggtgtctgtatcgcggcggctgcgcacgccgtagaccacctcggcaccgtccagatactttttaaccatctcgtccatggcgttgatgtcgtcctgaccatcacagtcgatggaaatggtaacatcgcaggtgccgctgtgcagtgcctccatcaagcctgccagcacggcgttctggtggccgcggttgcggctctgggaaatgccgatgtagtgctcgtcctgtgcggcaaaactctggatcagttcccatgtcttgtctttggagccgtcgttcacgaacagcacccggctcttctcgctcacaaggccctgtgcggcaaggccgctgatcttttccagaaacatgggagctgtaatgggcagcacctgctcctcgttgtagcaggggatcacgatccataaaatcggttttgacatatttaaaaatactcctatattaaaaataacaagatgatgccgctgacggttacggccttccagtgaaaaagagttttagaaaaatccgtagatttttctaaaactcaaatataaaaataaaatttcagctgaatacagccaaagcgcacgcggcggctattcaaatggtcactgcaccatttgcttcagtacctcaggctccagcagcttgaagctgcttttgtaggtgtccagcaggccgtcccgctgcatctgactcagctcgcggctgagggcgctgcggtcgcagttcaggtaatctgccagctggatgcgggagaacgggatgctgaaggtcaggctgccagcccgctcggcttcactgagcagataggcgcacactttggcccgcaggcttttgagcaccagcaggtcgatgcggcgggagagggaaaaatatttatcgctgatggtgcgcaccagattgcgcaatgtctgctggtgcgccggactgccatccgaaagcagcagccgctcgtagggaatcagcagcacctcgcagggcaccgaagccatcaccgtgaccgggcttgccagactggaaccgctcagcacatcgccgaacacgccgcccggttccatgtgagtgatgggaatgcgcgcaccctgcggcccgggacggtaggcttccagctcaccggacagtacgatgcccaccctgcggttgggttcgcccgccagaacaagcgcttcgcctttgccatagctgcgcataacggcacccagctgagccagcagggtctgcagctcttcaggggtcagaccattgaataaagaggtggagcataacagcggaagaaagtttttcatcacaattccgtgggaaagatccggcttcccacagccctcctgcaattccgttgcacacgcaacggtatttttgactctattatagtaaacttagacccgcaaagcaaatgattttgcaaatttgccttgtaaaaaatatgaaaagaccgacccatggttctgtgcaaaattttcaggcacaaaatggcgcggtcttgtgaggaaagagggaaccccgcatgaaaaaactgacatccatgctgctggctctggcccttgtgctgagccttgccgcctgcggcggcgcggcatccagctctgttgcatccagtgcagcttccagtgaagctgtcccagaggctgcttcggaagccgcttccagtgaggaagcaaagaaactgtccaccaccgatgctctgcgcattgccggcctgaaaggccccaccaccatgggccttgtcaacctgctgagcatggaagaggatggcaccgcttccatggattacgacctgcagctttacggcgctgccgatgagatcgtgccgctgctgatgaagggcgagctggacatggctgccatcccggcaaatctggccgccaccctgtatcagaagacggagggcggcattcaggctgtggccgtcaacacgctgggcgtgctgtacgtagtggaaaaaggcggcgatacgatccagtccatggcagaccttgcaggccgtaccatcctgtccaccggcaagggcaccacgccggagtacgtgctgcgctatcttctgaacgccaacggcatcgacccggacaaggacgtgaccattgaatactacagcgaggccaccgaggtcacggcccagatggccaataccgaggatgccattgcagttctgccccagccctatgtgactgcagccggcctgcaggacgacaccctgcgtgtggccctcgacctgaccgaggaatggaacaaggtcgcggatacgcagctcatcaccggcgtgaccgtggtgcgcaaggagtatgccgaggaacacccggatgttgtggccgcattcctgaccgactacgccaagagcgtggaagctgccaacgccgatttggacggcactgccgctctgtgcgaggagcagggtgttgtggccaaggctgccattgccaagaaggccctgcccaactgcaacatcgtctgcctgaccggcgacgagctcaagaccaacgcatccgcttatctgcaggtgctgtttgatgccgaccccaaggcagtgggcggcgcaatgcccggcgacgatttctactggactgccgagtgatttctcaataagccatctctccggccgctgtgcgattggtacgcacggcggcttttttgtttgcacaaaatgcttgtatcccagcttttgtgctccctgcacaaatttaaagacaaatttctgtgaacgaaaatgaatgaaattgactgaaagcgattgattctggcgctgtatttgctataataaagatgcaatcaaccaaaacaacgcacaaacggtcataaaccatcaaagataagatcaaaccaaaggagaggatgccgatgctggcagaagaacgcttcagcctgatcatggaacagctgaaccgcaagcgcaccgtgacggtgcaggaactgtgcgaggcgctgagcaccagcgaatccaccatccggcgcgacctgaccgaactggaccggctgggcaagctgaacaaggtgcacggcggtgccaccctgccggacagccgttttctggcggatgaacccaccatggaggccaaggagtcgcaggctgtggagcagaagcgcagcatcgcgcaggcggcggcaaagctcatcaacgccgatgattttgtgttcatcgatgcaggctccaccacgctggagctggtgcgtgcactggcgggggatgccctcaaagccagctatgtgaccaacggcgtggcccatgcccgggcactggcccgaaagggctgcagggtgtatctgcccggaggactgctgcggcccgagaccgaagccattgtaggtgcacccacagtcaccagcctgcagcgctacaattttaccaaggcgttcatgggtgccaacggtgtggcgctggatgccggttttaccacgccggaccccgaggaagctgccgtgaaagcagcggcagtgcaccgtgcacgggaagcctggttccttgtggatgatgccaagttttcccgcatctacccggcagccattgccgacctgcagggcggtgccattctcaccaaccgctgccccaatcccaaatacaaacaattcacgctggtaaaggagacggaagtatgatttataccgtaacattcaacccggccattgactatgtggtgcgtttggatgcaccgctggaagtaggcgaggtgaaccgcgccaaaggcgaggactgcgtgctgggcggcaagggcatcaatgtgtccggtgtgctggcacagctgggctgcgagagcgtggcgctgggctttgtggccggtgagaccggcgcatggctggaacgcggtcttgctgcacagggcttaaagaccgattttgtgcatctggaacagggcatgacccgcatcaatgtcaagatcaaggcagggcaggagaccgagctgaacggcgcgggccccgacatcccggagagcgccatgcaggagctggaaaagaagctggacagcctgaacgaggatgatatcctcattctggcgggcagcatcccgacaagcctttcgcaggatacctacgagcggctgctggcccggctgcagggcagggacgtgcgtgctgtggtggatgccacccgcgacctgctggtgaacgtgctgcagtaccaccccttcctcatcaagcccaataaccacgagctgggcgagatcgtgggcagggtgctgactacggacgaagagatcattgctgcggcccgcaccctgcagcaaaagggcgctcgcaacgtgctggtaagcatggcgggcgacggtgccctgctggtggacgaaaatggcgaggtgcaccgcatcggctgccccaagggcaaggtcgtaaacagcgtgggcgcaggcgacagcatggtggccggctttgtggctggctggatgcagacccggagctattcctttgcactgcgtctgggcacagcctgcggcagtgcaacggcgttcagccttggccttgccaccaaagaaaaaatcgacgaactgatgaaggaaatctgaccctctgtgacggagaaggttgcagttatacaggaagggagaaaaatcatgcgtattacggaattattcaccgcgcagtccatcgcactggatgaggctctgaccgatcaggagcagatcatcagccgtctggtggagctgcaggccacccatggcaacatcacggacaaggaagcctacaaaaaggccctttatgcccgcgaggcggagggctccacctatgtggacaacggcatcacggtgccccacgccaagaccaatgtagtcacccggcccagtctggcggcgctgcggctgagcagccctgtgcagtacaatgccgaggacgacggtaccaccgacctgctgtttgccattgcggctccggaaaacggcagcctgcatgtggacatgctggcccgtatgatgcagatgctgatgaacgaggactttgtagaaaagctgaaggccgcaaagacacctgcagagttccttgactgcatcgatgcacaggaggaggctcagttcggcgcggagagcttcacccagcaggagatcccccagagcggctaccgcattctggccgtgaccgcctgcgtcaacggcatcgcccacacctatatggcagcggaagccctgaccaaggccggtgacaagctgggtctgcccaccaaggtggagaccaatggctcggatggagcaaagaacatcctcaccagagaagagattgcaaactgcgacggcatcatcgtggcagcagaaaagaaggtagagaccgcacgcttcgacggcaagccggtgctgttcacccgggtggacgatggcatccacaagccggaggagctcatcaagaagatcgtgcacggcgaggtgcctgtttaccacgccgagggcggcgcacaggccgccgaggatgcttccggcaaggacagctttggccgcgctctgtacaagaacctgatgaacggtgtctcccacatgctgcccttcgtggtgggcggcggcatcatgatcgcgctggcgttcctgctggacgattacaccatcgatccctccaactttggcatgaacaccccggtcgctgccttctttaagacggtgggcagcgcagccttcggttacatgctgccaatcctgtctgccttcattgccatgtccatcgcggaccgtccgggtctggcggtcggttttgtgggcggtgtgctggccatgaacggcaccaactttgcaggcattgcagcgggtgagaccaccggtgtttccggcggcttccttgctgcactgctggccggttttgctgcaggctacatcgtcgagctactgaaaaagatcaccgaaaagctgcctgccagcctgaacggcatccgtcccatgctcatctacccgctgggcggtatgctcatcctcggcgcggtgatgtgcggcatcaacccggtcatgggcatgatcaacactgccatgaccgattgcctgaacgccatgggcggcacctccaaggtgctgctgggtgccatcgtggccggtatgatgagcattgatatgggcggcccgttcaacaaagcagcttacgtctttggcacggcagcccttgcctccggcaactatgaggtgatggccgctgtcatggtgggcggcatggttcctcccatcgccatcgccctgtccaccaccttctgccccaagaagtggactgccgacgagcgccgcaacggcatcgtgaactacgtcatgggcctgtgcttcgtcaccgagggcgcgatcccttatgcagcagcagatccgctgcgcgtcctgcccagctgcgtggccggtgcagcggtggccggtgcgctctccatgaccttcggctgcgctctgcgtgcaccgcacggcggcatcttcgtgttcccagtcgtggaccataccgctctgtactgtgtggcgctggctgtgggcagcgtactgggtgctgtgatcctgagcctgctcaagaaaaaccgtaccgacgcagaataaacgccattccctccatattcgagatacttcataaagccgcagcaagcccccggggagacccgggggcttgctgtattacgcaggatcgcgcgaaggatcagaaggataaaaagaaaaagtaaccgcccacgacttccaatccaatcagatataacatgatacacccgctgtcaaaaacgcggcaagaaccattttcacaaaaaatgcagcaaagaacagcgcgaaacaccgcatttgctggaaaaagctttgcagccgcccttttggattgcacccggtttttgagtgtggtatactgtttctgttatggaaaagttccggtgcggtgtgccgggcacagcaaagaggaaaaaggaaacgaacgatgaaaattggatttgacaacgacaaatatctctcgatgcagtcagaacatatccgcgagcgcatcaagaaatttgacaacaagctctatctggaattcggcggcaagctgttcgatgattaccacgcgtcccgcgtactgccgggcttccagcccgattccaagctgcagatgctgctgcagctgaaggatcaggccgaggtggtcatcgttatcagcgccgaggacatcatcagcaacaagatccgcggcgactacggcatcacctacgatctggatgtgctgcgcctgatcgatgccttccaggaagtaggcctgtatgtgggcagcgtgtgcgtgaccaagtacgccgctgcaccggaggtggaggcctttgaaaagcggctgaacggtctgggcatccgcaccttccgccactacaaaattcccggctaccccaacgatgtggcccgcatcgtcagcgacgagggctacggcaagaacgattacatcgagacccagcgcccgctggtggtcatcacagcccccggccccggcagcggaaaaatggcgacctgcctttcccagctgtaccacgagtacaagcgcggcgtcaaggccggttacgccaagttcgagaccttccccatctggaacattcccctcaagcacccggtgaatctggcctacgaggccgccacggccgatctgaacgatgtgaacatgatcgacccgttccatctggaagcctacggcgtgaccaccgtcaactacaaccgcgatattgagatcttcccggtggtgaacgccatgtttgagctgatcgctggcaaaagcccgtataagtcccccacggacatgggcgtgaacatggcaggcaactgcatcgtggacgatgcggtctgccgcgaagcctcccgcaaggagatcctgcgccgctacttcaagtgcctgtgtgagcagaagatcaccggcacggtcaaggagaccgagcgctacaagctggaactgctgatgaatcaggccgacctgaccgtgggccagcgcgaagtggaaaagcaggctcatgcccgcagcgagagcaccggcggggcccctgctgccgccattgagctgccggacggcaccgttgttaccggcaagaccggtccgctgctgggtgcagcagcatctgctctgatgaatgctctcaaggtgctggccggtatcccgcaggagaccgaccttgtgagtgcggcttccattgagcccatccagaccctcaagaccaactatctgggcggcaagaatccccgcctgcacaccgacgagatcctgatcgcgctttccagctcggctgcttccaacgagcaggctgcagcggccatgcatcagctgcccaacctcaagggctgcgatgtgcactccaccgtgctgctctcgggtgtggataccagcaccctgaaccggctgggaatgtacctgacctgtgaccctgtttacgaggaagaggaccgcaagtaccacaagcagtaaattatacaaaaaacaaaacaggcgcatccaaaggccgaaaggctggcggatgcgcctgttttttattggttcagatgccggtaaaataaggtctgtacttttctgcgtacagctgggtgcccatgcggcgcaggccgccgtacaggtgccgccggatcagcggttcaatggaatccaggtctttttcccggatcacccgcaaaatttcccggtgctcgctcagcacatccggcacattgttggcccgcaccacatccagacgggtaaagcgggaataatccggctgcggctttgtcaggttctgccagatataccatttgttcatgctgcaaaaccagatggcgtgcatttccagatccagcgtcaggaaggcattgatatccacattgtccgggtcggtcatggtctgggccatctcttccagtaggtcatacttatgcttgatctcaatgtactctttgggcgaacagacctgaatgaaatcgcgcagcaccgtgctttcaacggctgtgcgctggtatacgatctgatccacgatatccagattgatgggggtgacgatggtgcccttgcagggaatgatctgcacaaagccgttctgttccagccgctgcagggcagcgcgcaccggtgtgcgcgaaatgccgaaccgtttgcacagctgattttcgctgatggtctctccgggcttgatcttcagcgtgacgatctcatattccagcgtctggtagatgtcctccggatgcagctgttcagccatgtgctcacactccatttacatagttgatgataagacatttctattttagcctgccaaaaagagattgtcaacgtatgagaatgaagtatacaatagcctgtatacaagtacaggaaaagctccgaaatttatcatatctgacaaaaattgatatatcagatgaaaatgaaccaaatagtgtcgccggattgtaacagtttccacgagaaacggataagattgttagttatgcacaaagaaactttacgaagttggtgaagtttggctcttgtgcggatgtgaattttctattacgattagcgtgcaatgaaaatgctgtatacaggggtcgccaaaaactttgctagcgtataaggcaaaaaggcacccctgaaacaaggaggaagaagattatgaaaaaggtctctcgtcgcaatttcctgaaggtgtctggtgcaatggcagctgcaggtgctctggcagcctgcggcggttccggtgcatccactccggctgcttccggcgcagcatccaccagcactgcagcaagtgccgcagcagccggtgaggacaagtttgcatctctgggcgacttcaccatgaccgtgggtcatgcacagcccgaaggcaacccccgctttgtttccatggagcagtttgccgccgatgtggcagaggccaccaacggccatgtgaagatcgaggtttacggcaacggccagctgggcaccgagaaggagatgctggagcaggtcgtggccggcaccgtgcagggcatgcgcggcggtcagttcgacttcagcccccgtctgctgatgttcaccctgcccttcctgaccaacacccgtgcgcaggtcacggctctgctgcagagcgatctggcacagaaggtgtgcgctgaggccgaaggcgagacgggcaccgtcatcattaacctgtgcgatgcaggcggctaccgccagttctccaactccaagcaccccatcaaggctcccgcagacctaaagggcctgaagatgcgcaccaacggcatgaagaccattgacatgaccttccaggcaatgggtgctaccaccaccaccatcccgtactccgacctgtacatgggcctgaagaccggcgttgcagacggtcaggagaacccttgggtcaatgctcatgtacggtagagaagcacaaagcaaaacaaagacagccag

SEQ ID NO: 1117 - DNA, 18448 bp, Unknown
  gut microbiota DNA sequence
gacaaatcggaaataccgtcttcacaaaattccccgtattgctgcaccccatgccagcgcaaagccgcttgccacatacatcatgcggttggcgcgcaggatgtcctgcggctcaatggggcgcagggcatcaccgatggtaggcttggggtaatattcgccaaaatagtaagccgggccggccagctgcacgcccagtgcaccggcgcaggcgctttcggtctgggcgctgttggggctggcgtggttgcgccggtcccgccgccagatgcgccatgcgcccttggcatcgttgccggtaaaggccgcagcggccacccacaaaagggcggcaatgcggctggggatgtagttggccacatcgtccagcttcgcggctgcacggccaaaataaaggtacttctcgttcttgtagcccagcatgctgtccatggtattgatagccttgtaggtcagcgccagcggtgccccgccgatgagcatatacagcagcggcgcaatgacaccgtcgctggcattttcggccaccgtttccaccgcggccttggtcacgccctcggcggtcaggtcctgggtgtcgcggcccacgatgcggctcacggctttgcgagcggcgggcaagtcgtttttaataagctgagcgtacacatttgtgctctcctgtgcaaggccccttgccgccagcgcctgcccgcaccagaacatctgcaccgcaaggcccagccacgggctgagctttgccgccgccagacacacaaggctcgtgaccagaaaggtgcccaccggcaggcagaacgccgtcacggcaccgcccagcagctcgccctgcggggtgccgggcaggcgggcacgcaggaatttttccagccgggagatgcatcttcccataagcaccaccgggtgcggcagccacgccgggtcgccgaagagcgcgtccagcacaaaaccgccgacaactgcctgaaggatcatgccctgctctcctttgtgtactggacggtcttcacgagatacagcagatgcttttccgtccagtcctttgcatccagcacaaagccgcccgcgttaggtccgcaccatgcgtaatagtccctgtgggggacggcaaacctctccatggcggccatctgggtgccgccgtgggccagaatgaccagccgttcttcgcctgcggcaagagctttatcgatcagctctgccacggtgcggcagatgcggtctgaaaaatccgtcttgcgctctccgtccgggcaggggctttcgcagttggccttcacccatgcctgatactcggggtccttttccatctcgatgaaattgcggccctcaaagctgccaaagcacatctctttcaggccgtccaccggcacaagctttgcctccgggaacaggatgcgcgccgtctggctggtgcgctgcagggtggaaacatagaccacatcggggtcaaaatctgcccggcgcagctgagcagcgccttcgggtgagagcgggatgtcgcgctggccctgataacgcttctgggcgttgtattccgtctggccatgacgcagaagatagatcagcattgagacaattctcctttcaaaaccgtggggatgccgcagaacatctgcaccacgcactctgcccgtgcggccagcaggcaggcaagcctgcccgccgcctcgcggtctgcgcgctgtttgacatccatcggcacaacaccgccgcctacctcggtggcgatgaggatatcgtattcatgggcaagcttgtctgccaaggcaggcaggtcgacggcatcggcagccaatacctgcacgtccgaaagacgcttgccgggaagtgtttgcgcaaaggtgcgcttgccgctgtagagcggcccggtaataaagatcatagcagccctccccactggcaggcacacagcgccgccagcatccagagctcggccttttgcaaaaaccacccggcaaggtcgccggtgatgccgccgaactgcttccggctcacagcatggtagcgccagagcaccgccagcgctgccagcaccagcgcccagccgcccagcgccgccatgcccacgcacagcactgcggccagcaccgctagcacccggcgcaccacagttttgtctgctgcagtggaaaaggtgtgtgcaagaccggtgttttttgccatggggaacgatgccaccgcaaggcccgaaagcgcccgttccagcaccagtgccagaacccacagcacacccacgctgggtgtaaaactcacacaggtgcacagggcaaaataggccagaaaatagctgcacagtcggatgaccgcaaaggcaccgcaatgggggtcttttaatatttccagcttcttttctcggtcgccgtagctggaaagggcatcgcaggtgtcggcatagccgtccagatggatgccgccggtgatccataccgggatcagcgcaaagcccgccgccttggcaaagcctggcaggggcagcgcgccacacacacaccacgccgcaccaataacgacaccaatgagcgggaaggcgcacatggcgtagcgcatatttttttcgttccagtcgaactgcggcaccgggatggccgaaaacatggcaaaagccaccgcgatggtctgcaaaacgatcatttttccactcctttatagtacacagggatgccgcataccacccgcaccaccgcatctgcccgggcggcaaaggcattgtttacctgcgccagtgccagcagatagcggcctgtgtcaccggcatagtcggccccgccgctgaacacctcgttggaaacaacgatgaggtttttgcactgggctgcaaggctttccagcccgtgcaggatggctttggccgcgttttcccctgctcccgccgggtcgtacagctcgttggcggcaaggttgccaaggtcttccagcaaggcggtgccccgcgcaggcaggcgcacattgtccagatgcaagggacactccaccgtttcaaactgctttgcggcccgcattttgcggtgcttttctacccgggcggcacactcggcatcccacacctgcatggtggcaagatagtagcgggggccggtggttttcagcacaaggctctcggcgtattcacttttgccgctggccgcgccgcccagaaccagcgtcaacattggggcgtatacggcgcaatgccgccctccgcaaaggagtagcacccgccgtatacggccagcgccatatcccacagcgggatgctggccaccgcgccggtgccctcgcccagatgcagccccgccgtaatgatgggtgccttgcccagtgcttccagcacgatgcgcgcggcaggctctgccgagcagtggcttgcaaacacagcctttaccgccgccgggcacagccgcacggcgcacagcgcggccactccgctgataaagccatctgccagcaccggcacaccggccagtgcaccgcccaaaaacacaccgcacaggcccgcgatatcaaagccgccaagcttggaaagcacatccagcgggtcctccgggtccggctcgttcttcaggatgccgcggcagatggcatccaccttgcgggcaagcccttcgtccgagaggcccgcaccgcgcccggtcataagctccacgggctggcccagcagcaccgccgccaccgcgctggaggtggtggtattgccaatgcccatttcaccggtggcgatgagcctgtagccatcctctgccagttcccgggcaagggcaatgccctccccaacggcctgcacggcctcggcccggctcatggcagggccttgggtaaaatccgccgtgcctgcggcaatgcggcagctgcgcacgccgggcaccggttcgcctgccatgcccatatccacgggcagaacatcgcagtgggccgtgcgggccatctggcacacactggtgcgccgcatagcaaggttttcggccacggcacgggtcacttcctgcccggtctggctcacgccctgcgccaccacgccgttatccgcgcagagcaccaccaccacccggcgggaaagatcaagctccgcactgccggtaagggcagcggcatcctccagcatggtctccagccggcccaacccgcccagaggctttgcaaggctggcccagtgggcgtgtgccgccgcgcgggcagcttcgttggcaggggtgatacccgccaaaagtgcattcagttcagtttcggtcatttaggtcatccttttgttttgctgtatcgttctgccgcgcgcacaaagcggcccggcaggggcgtgcccgcccagtataaatgcgggaaccccgcatagaaattctcgtttgcatagccgcattcccactgcattttttcgtttttgcaggcagtaaatgcagtgccgtttgcggtggaatcccagtggtggaattcgtggatgggcagcgtttctccggcgcagaagagcatactatccgccttggcggtcatttcggcatagccaaagcgcaccagccttcccacccggatgccatcgcccggcagaacgtctgccatgggccacgccttaccgtcggcatcctcaaggctccggcccagatacaaaaagccgccgcattcggctgctgtgggcaggcccgcctgcacggcctgccggatggaagccagcatggttttgttttcactcagagttttggcgtacagctccgggtagccgccgggcagatacagcccgcctatattttccggcaaaaccgcatcctgcaccgggctgaaaagcacaagctccgccccggcatcccgcagtgcgtccagcgtttcggcataggtaaagcagaacgcctcgtcctttgccaccgcaatgcggacggatgtgggtgcagctgctcccggcaaagcttccggcgcaggcttttcggtcagcacggcaaggcgctgccaatccagcaccagtgcatcggccagcagagcgatcttttcctgcaggtcggcaatttcatctgcagtcttcaggccgaggtgtcggctttctaccgctgcctgcggcaaatggggcagatagcccagcaccggcaggccggtctccctttccagcagggccttgagcattttatacagcttttcggaacaatcattgagcaggatgcccgaaacatggctgtttttgcggaagttcacaaggccctgaatttgcgcggccagcgtcacgctggcacccttgggctgtaccaccagcagcaccggcaggcccagcatatccgccagttcccaagcgctggcacgggtggtcaggccctgaccatcataaaagcccatagcgccctcgcacacggcggcaccatgcccggcggcatagcgggcaaaaatggcccgcaccatctccctgttggaaagaaacagatccagattgtggctgtccacctgcagagccgagcggtggaacatggggtcgatgtagtccggcccgcttttgaacgcacaggggtcggccccgcgctttttcagcgccgccagcactgcacaggcaacagtggtcttgccgctgccggaagaaggcgctgcgatgaggaattgcatcatttgcgtgtacccgtaatgaggaagatggggttattggccatgagcaggtgcagtcggcccgccggttttgtgcggctgacagcgatctgcgttacctctgcggtcaggccccgggccgtgagggcggcaatggcagcgcccagcgtttccagcgcaatggccgaaatgcagatgcgtgcgttcggattcttgccgagcacttcatccagcacggcttccatgccgcctttggtgccgccgatgaacacggcatccggcgcaggcaggtctgccagcacatccggtgcgcggccctcgatgaggatgaggttgcaagcatggaactttgcccggtttttacggatcagttcacaggcatccggttcacactccacggcgtaaacgcggcctttgggtgccgccagcgcaagctccacgctcacactgccggtgcctgcgcccacatcccacagagtgtcggtgggcattaccgccagctttgccagcgcagcagcgcgcacctcctgcttggtcatgggcacctcgctccggatgaagctttcgtccgggaagcccggcgcacgcagctgcggcagatcaaagttttccaccagaagcacgctgagtggtgcaaagctctgccccgccagctctgcagcagagccgtagcggatggcttccgcctcggtgccaaggttttcgcccaccacgccgtgggcttcgcccataccggcatcggtcagcttctggcacagagaggcgggcgtttcagtgccgccggtgaggaagaacaccgaacggttcatcatgcactcggccaccgggtcgcaggcacagccatgggccgagaccagcctccagtcctgccacggtcggcccagcgccgctgaaagcagctggatgctggaaacgcccggatacacccgcgcggggatgcccagcgcccgcagcggcgtgagcagaccggacgcaccggagtaaaatccggtatcgccgctgtaaagcacggcagcatcctgcccggggttttgtgccagtgtttccagaatgtcagcgggctggtagagcgcgaactgccgggccgtgcagtctgcaggcaggcccgccagcagccgctttgcaccgaacacaaggcccgcgctgcgcacagcctgctgcgcctgcgccgaaagggcttcccattttccgctgcccatgccgatcagtgtgaccattgcaaaatctccttgcaatacgctaaaatttgtgtttccgtctcgccagtttccggcgggcggcgcagcaccaccagctgtgcgccggtatcggcagcggcctgcaccttttcggcaaagccgcccgccgcgccgccgtccttggtgacgaggtaccggatctggaactgtgttatcaacgccttattcagcgccagactgaacggcccctgcatggcaatgatgttccggtgcgggacattggccgcttcacaggcggcaatgccctccggcgtgggcaggacgcgcgggtaaagccgcgccggttccagcccggcaaacacagccagctccttggcaccggtggcaagcaggatattgccctctgtcccggccagatattctgcagtctgcgctgctgtttcaaacaccgcacagccgggcggcaaggggctttgcgcacgcagcaggcggcggtattccacgcccgcctgcaccgctgcagcgcggatgttcctggtggcatccactgcgtaagggtgggtggcatccacgcagagatcagctcccgccagcaatgccgccatggcatccggctgcagccgcccggcgtgcaccgtgatgcccgccatttcgccctgctcctcggcacccagcggcgttgccacgcacaccgttaccgcaacgccaagctctgccagctttttggaaaagcgacggccctcggtggtgccgctgaacacgaccgccttcacttacggtacccccgcggcgtgaccatccggcccgaaagggcgcgggtattgctgttgccgatatacacggtggtgaacatatccaccggcgtgttttccagctcggccagcgtcagcacccgggcgctctggccctcgcggccaatgttgcgcacaaggccgcagacggtatcatccgccttgccgtttgcgcgcaggatgcgcactgccttttgcaggtagtccggtctgcccttggaggaaggattatagagtgcagcgcagaaatcgccctgcgctgcgcaggccagccgcttttcgatgacctcccacggggtaagccggtcggaaagggagatcacgcagaaatcatgggccagcggcgcgcccagcacagccccgccgctgagggcggccgtaaggccgggcaccacttctacggcaacgtccgggtaatcctgcgccagttccagcacagggctggccatgccgtaaacgcctgcgtcgccgctgcacaccatcaccacgcgcctgccggtatccgccttttccagcgcccagcggcagcggtcgatctccttggtcatgccggtggaataatattcctcacatgggaactccggctcgatcaggtcaagataaagtttatagccgcagatggcatctgcgtgttccagaacgttctgggcttcctgcgtcaggtagtaaacatctccggggccaatgcccaccacgtagactaccttttccggttcgtcgatctcaaatttcatcgggtcaaacattctgccacctccagtccggggcatagggccgcacggccagcgcaaaggtcacgccggtatgggcatatttgtgaaaaacgagtgtcccgcctgcggccagcactgccgaccgttcacagacattgtccacgccggtaacgctctgcacaaaggccgaaggcgtaaagctgccgggggcggcacgcagctgttccgctgtgaaaaactgcaccggccagctgtggctcttacagaaggtcagcaggcccgcctcgttttgttttaagtcgatgcttgccgccgccgtgatgcattgcggcgcaaggcggttctgggcacagaaagctgcaaaggcttcggccagcgtttcggtgctggtgccgcgtttgcagcccacgcccagcacgccgatgcgcggcaccagatgcagcgcatcccccgtcgggcagagggtgagagcaaagtccggggcatctcccgccgtgatcccatcaggcggtgcacccgcaatgggccagtcggatgcaaactgcaccgttttgcccgccagcagtgcaccgctgacaagcttgatgcgctccggctccagcacagtgcagttctggtgctttgcccactcgtccaccgcaaacacaccgtttgcgtcggtggctgtggtgatcaccggcaccgcaccgcacacagcggcaagcgcccgggcaaggtcgttggcaccgcccaggtggcctgagaggatgggcacggcaaagcggccgcactcgtccagcaccacaacggcagggtcctgcgccttgctttggctgtggggcgcaatggcccgcaccgcaatgcccacagcacctacaaaaacaagggcatcgctcccggcaaactggcgagccgtccaatcggcaaggtgcacctgcccggcttcatggccgcagcgggtcacgctgccgggatatgccgccgccagtttttgggccagtgcaaggccctttgccgtaaaggccagataggcgcgggtcactggtctgtccccttgcggaactcggtggtaaaggccgggtcgtagagcttgctgcgctcataatttcgacccagaaagccgcctgccacaatgagcgccgttttggtgatgcccgctgcatgaacgctttccgccagcgtacctacggtgcagcgcaccgttttttcctccggccatgtggccttatacaccaccgctgccggggtatccggcgtataggcaccgcctgccagaagcgcctgctgtactttgtccacaaggccgatggataggaaaatgaccatcgttgccccgtgggcggcaaggcttgccagcttttctttttccggcaccggggtgcggccctccatgcgggtaatgatgacggtctggctgacggtgggcagcgtgtactctgcattcagtgccgccgctgcgccgcagaagctggacacaccgggggtatcatcgtagggaatgccctcggcatccagcacatccatctgctcccggatggcaccgtaaaggcaggggtcgccggtgtgcaggcgcacggtgatcttacccgcagcttccatctgccgcatcacatccagcacctgctccagcgtcatttcagcgctgttataaatggcgcagtctgcctttgcaaggcccagcagggccgggttcaccagactgcccgcatagatgatgcagtcggccttctgaagcagggccgcgccccgccgggtgatgaggtccggtgcgccggggcctgcaccaacaaaatgtaccataacgttactcctttaccaaaacggtggcaaaataaccggcctgttcctgcggccgctcaagggaaagatccgggtagacccgctcgtccggcagaccgcagttgcacacaagtgcgctttttttcagcttatctgcctgctgcagggtatccaataagacaggcaattgcctgccggctttcatcaataccttggtgccgggcatttccagcacgcggtctgtccagccgccgggcgcaatggtaagcggcgtatccatgccgccggtcagcggcacattcagccgcgccgccgctgcacaaaagctgggcacgcctgccgccatggcggtggcataacccccggcctgcaagatctcctgcaggtaaccaaaggtggcatagatggaaacatcaccgatgttcagcatggcaacgtcctgcccggcatccagatactgctgcaccgcggcggctgctttttcgtgcgaagccgccagcgcagccgggtcacggctcatggcaaagtacagcgggacgatggtcttgccgtccagcgcttctcccagcgcactgcgggcgatgtccagcgccagcatctggccggaagcagtctgcggcgcggccagcaccgggcactgccggatgagccgcacagcctgcagcgtcatcagctccgggtcgccggggccgacgctgacaccgtaaaatgtacctttcagttctgccattcctgcatcagctcctttgccgtttttgtctcgcccagcgggccgtgctggttggagaacagcaccgcgcccacccggaacgccccgcctgcccgtcggtccagatgcatctggatggcggaaaggatgctttccagcaccggtgcacgcagctgtgcgccgtccagaatgtcaaggcaggcatccgtggtggcggcatccatcagggcagcgcacacttcgcgccgggccccgcacagcgccgcatgggcacagaacacctcggcacggccatccgccgtgtgggaatgggtgttcatgacccctgccgccagcttgcagagcttgcccacatggcctaccagaagcacttcctcaaatttggccgtggcagccatatccagcgtatccccgatgaagttggaagttttgaccaccgggaaccgctcgaactgcggcagagcgctggccagataatccagcccgtagttgccgggggccaacaccagccgccgggggccgggggcattttttgtgcacagtgcggcctgattcatttccagctggatggtatccagaatggcctgctggctcatgggttccacgatgccgctggtgcccagaatggaaagcccgccctccaccccgatgtgcgggttgaaggtgcgctttgccgtctcggcaccgccttccacagagatggtcaccgcaaagccgccggtgtaggcagcattttcagcttcccgttccagcgcctcggcgatcatccggcggggcacatggttgatggcggcttcgcctacgggctggtcaaggccgggcttcgtcacccggcccaccccctcgccgccaaagatgcgcacgccgggggcatccggttccagtaccactgatgcaatcaccggcagacccgtggtcacgtccacatcgtcgccgccgtccttgcggatggcacatgcggcacctgtgtccgtgctgcggcagtaaatgggagccacctccaccacaatgcccttgggcgtgcgcagagccaccgtttccggttcgcggccggtcagcagcagacgcgccgccccggcagcccccagcgcggcacaagtgccggtggtatagccgcagcgcagcagcttctgcccgctgcggacgtaatgctcaaactgcggctttccggcgggtgccttttcggcttccggctccggtgtgccgaacagagccgtgtactgctgttcggtcaggccgtacagggtgcggatgttctccggctgaaacgcctgttccggggtcagcacgccggaaacaccgccgggcgaaacgcacaccaccgtgtccgctattttttcggccaattccagctcgtgcaggctcaggatcaccgccagctgaccggtatgggccagctcctttaaaatggtgagcagctcgatcttgcccttgatatccagaaaagaggtcggctcgtccagcaggatcacttccggctgctggcacagtgcccgggccagcaggatgcgctggcgctggccgtcactgatgcggttaaaatcccggtctgccagctgcgccgcacccaccagctccaaagctctgtgcacctgctgcctgtcctcggcagacaaaatgcccagccgtccggtgtagggatagcgcccagccgaaacaaagtcaaagcaggtggtcagctccatccggcggctatgcggggccatgagggccagcttctgcgcccgctgggtaccggtgtaatcggcaaggtttctgccttccagcagcactgtgccgcccatgggggccagctggcccgccagtgtgcgcagtaaggtggatttgcctgcgccgttggggccaatgagagtcaggatctggcccggctgcaccccgaggcaaatatccgagagcagcggtgtcttgccgtagccgatggcaagctcccgcgcaatgcaaagtgctttttcgttcatcatgcgccctcccgctctgaattgcgccgcaccagcagccagatgaccaccggtgcgccgaacacggccgtgaccgagctgatggacagctccgtgggcgcgaacagactgcgggccagcaggtcgcagaacaggcagaaagccgcaccgcccaagcagcaccccggcagcacatacagcggctttgcgctgcccagcagctgcttgacaaggtgcggcaccgcgatgcctacaaaggagatcggccccgcaaaggcggtgacacaggccgccagcaggctggatagcagcaccagcgctgccgagaaaggcttgacattcacgcccacgctgcgggcatatgcttcgcccatctggtaggcggccatgggcttggaaagcagaaaggatgccgccagcgcaggcagcaccaccagtgccgcagcctgcacattggcccatgtcacgccggaaaaactgccctgcgaccagttgtgcagattgacgatgttggaatcctgcgcaaaggccaccacgatatcggtgatggcggagcagatatagccgatcatcacaccgcagatgaccagaatgctcatgcgctgcacccgccgggccaccgccagcacaaaggccatggaagccatggcacccgcaaaggcagccgcgatcatcatggccgagctggtcagcatcccgtggtccagaaacaccaccatggtcagggccaccgccagctttgcgccgctggaaacgcccataacaaatggcccggcaatggggtttgcaaaaaaagtctgcagcaggtagcctgccgcactgagggctgcccccaacagcgccgccatgaccgcgcggggcaggcgcagctgcaggatgatgttccccgcaagcgcatcgctgcccttgcccagcagcgccgtcagcaccgcacccggtgcaagggatacgctgccccagaacaggttcagcgcaaaaagcacagccacggctgccgcaagggcaatataggcggctgcaaggcgtctggtacgggtcataggctttcctttctgtaaaattttccttctttagtccacatgggtgaggaatttcagggtactggcggcaggtgtgcccttggtaaacacccggttcatatccacgatcaggtctgccagctccatgctctgctggaacaggctctgggtggtgcaccacacctgaccgttctgcaccgctttgaactcgttcaacagtgggaaacgctcggtcagctggctcaccgatgcgatcatgccctcgatggcgctgttgtagatgagcacatcggcatcctttgcacctgcatagaagtcctcaagcggcaggttcatggtagcaaggctgttgccattgtccgtcaggtccgcaaagacatagctgccgcccgccatctcgatcatgcgggccacatagtcactgcccttgcgcacagtggcaaggttgttggtggtcagcgagaagaaggcgcagcttttttccgtgggttcctgcgagaggatgggctgaacggctgtctcctgcgcggaaaacacctgctcggcctgttcttccctgcccagcaggatgccgtaaagcttgatccactccatgcgggccagcgggtcgctctcgtagctggaacgctccaccagcaccgggatgccaaagtgttccagctgttcctttacctccggcgtgtgcaggatcatggtattctcaatggcaaggcggcagtccgccgccaggatctgctcgtaatccggggcgctgtacttgcctgcatacgcgatttttccctcttccatggcctgctgcaccgcgggcagataccagccctcggccttggtgccggaaaaggccacgctgtccagtgcgtccagatgtaaaagcagatccatcaccgaggtggagaccagataaatattctccaccggctggcgcagcacagtcacatcagcaggcagaccgtccacctccgcagcatcttccggcacaacaaggaaccgtgcatccgactccgcgatggtcagcatggtatagccgccctcatagcagtccgctgtgaactgctgtgcatagtccagcttgtaatgatgggagaaaacaagactttccgtattggcaggttgagccttgctgccgcagccggtcagcgtcagcgccgcagcgggaatcagtttcagaaattggttgcgagtgattttcataggtaactccttccgtcacggcttgcgccgtgccacctccctcatagagggaggctttggcagtacggtaaagtttatctttttgccaaagaaggtgactgggggagtcacttcagacttgcggaatcaaaggtcagcgtatactcgatctcgtggggggtgctcatggcaacggtgtcggcggtgacatccagtgcggtatccagcgccgataccggaatttcaaaggtggaattgccctcggtgttggtgggcagatacttctcgccgtccacgagcatatagtcgtagttggggctgctccacacgatggtagcggtcattttgccgtctgccacggtcagggcggcggggctctccacggtggcacggccggagccgccttccagcgtcacctcacaggtgtaggtgccgtctgccggggtctcggcttccgcagccttttccacggcatcacgcacgctgacgacatgatcgtaccacttgcccttggtgcccagaatggcaaggtcaaagtccgtatccacagcagtgaccgggatgtcaaagccgtacacctcctccgaggtgccgtcggaataggtgacggtatctgtggtgggctgcagccagtcggcctcgtggtcggcggcatcggaagccttgcccagatacaggttgacgatatgggtggaagcaaggctgacatggaaggtcatctggccgttctccacggtcatggtgcccttgccgtcgcaggcttcgttggcgtggaacatgctgctgtcggtgtcaaactcggcggtatacacaccatccggcaaagcggcggtctcagcggcagaagaagccacagaggatgccgcctcggaagaagcagcactggaagctgcagaagatgccgtggaagaagcgccgcagcccaccagcagactcagtgccagagaagcagcgacaacacaggaaaaaacgcgtttcataggaaatacctctacattataagaaatcagcttttattataccattgttcagataaaaaatgaaccctctccaccggatgccgcaaagcggccgcgagacggagagggttcgtttgatcaaccgttcagagaatcgatcgccgccttggtgtgggcgacatacagcttctggacatcctcgatctcacccagaccagcgatctggcagtcgatgctgtcgaaagcaccagaagccttgaactggctcagccaggagtcggcatcctcaccggccatatcgttgttggcgtgatcgccggcgaccaccatcagcgggcgcaggatgaccttggtgtagcccgcagccttaacagcctcgatcacgttctcgcaggcagtctcttccggcttgccctcaacggtgccaatgaacacattgtcgtagcccagagtctgcatagtggtctgcatctggctgtagctcacctttgcggtgtgcgaggtgccgtggcccataaagacaaaggcgaccttgtccgcagcagcggcatccagactgtcatagccggcttccttcacggcagcagcggtgacagccttggcaacgtcttccttatcctgattgatgatggtggcatcggaaccgacctcgcccagcaggggctcagccacagcgacagattcaaacttgtcgcggtaggtgtcgatcatttccatcatctcgtcgtactcagcaccgtgcatcaggtgggtgggctggacgaccagattcttcacgccgttttccacagcgcggtccatggcctgctgcatgttgtcgatcttttcgccgtcacgagcctgcacatggttgatgatgatctgtgcggtgaatgcgcggcgcacagaccaatccgggtatgcggcctgcagagcatcctcgatgcccttgatgtccttcacgcggctgtcgttgaaggaggtgccgaaggagaccaccagcagctcgttgtcgccaatgtcgtcctgattgcgggcatcgtccttggacgcatcgccggtgtcacggccaaagtagtcggggtcggcgttctcaccttccaccagttccttctgggtgtcggtcagggcatcccatgcagccttggcggcttcgcactgggcatcggtatcctcattgcgctcctgcacatagatggcatcgatcaggtctgccacgttctttgctgccatttcgtcagcctcctcgctgctcgcttcgctggaagcggaagacgcagcggtgctggatgcagtgccggaagcagcaccgccgcagccggtgagcacgccggcgcacagagccagagccgtaacagctgcggccagctttttggtttcgatctttctcattgtcttgtcctttcctgctggataaattgcggtttgaaccaaacaaagggtacaggaaagaaagatgaaagaagaggcccttctgtcctgcggatggcatgacaaaaagacctctgttgtttcagggctttttggtacaaccaattcctcgtgatctggggtttgcacccccgtaccaacagcaggcaggtttcctgactgaaagatcgccgcccgtcatctccttcccagagcaaaagctccagtggctggtgcaaagcaccctgatgcggactcccttatcacagtgacgagatcgtgcgggatctgcacccgcttcccttttaccctttccgccgtgcagtgcatcggcaaaaggcacctgctgtttttctgttcagttcgtccggcattatatcataaaactgcgcagaatgcaataaaaaacggcatcctgcctttttataaggaaggatgccgtttggagatcgagccaaatgcggagcttactggagcgcacggatcgcattgatggtgattttgtactggcaggtcacgctgtcaaacagctccttggtaccttccagtgtgcctgtgcgcagcacctcggtcaaatcgtaggtgggctgatacaggttggtaaagcccaggttctggcacacgcccttgagcgtgtgtgccgcacggaatgcttccttcacatttccttccttcaatgcctgctccagtttcggatagctgtcgtcgttcaaaaacatcagcgtaaatctgcagatcatgccttcgttgtaaagccgcttgagcacatcctcataatttgcgcccatctgtctataacattcctgaatcgtcatggtttgtcgctatgcctttctttttctacttatcccgcctgatttgccacagagtgacaaaagcgccatccattttgttgcactttgttgcgcttttaatatatcacgtcttcctgcgtttttcaatgcagagacaaaaagtcttgcacttttcacatattgtcccgagtttttcttgcaatttgcctatcaatttcttccggctggcttttttctccgactttgccgtgcctgcatggctgcagggcttttcccgcctttgctctgccgtttctctgcacggaaaacgcatttgaagaaaaaggtaaaaaaacagttgacaaaagcctttctgcatgatagaataaacgagtcgtccggcgaaggacacaaaaagtgaatatgggcgtgttcccgagtggccaatggggacagactgtaaatctgctgctttcagcttcggtggttcgaatccacccgcgcccaccaaacaagaaaaatccga

SEQ ID NO: 1118 - DNA, 12576 bp, Unknown
  gut microbiota DNA sequence
gctggaagcccagcagaaagagcttgaagttcggattgccgaagaaaaaatcgctcggccacggttgagcgaaaatcaagttcggttctggctgacccggttccgcaaactcgacccgaacgtgaaaagccaccgtgagacgcttatcaatacattcgtgaatgctgtttatctctatgatgaaaaagttttgattacattcaactacaaagacggcacaaaaaccatcactttcgatgaaatcgccgccaaagatgccccagagggcaatggttcggatttaggttgcttcgctccaccaaaagaaccagcgtagaaattacgctggtttttgttttgcccggcatcttaagtctcactctcgagggtggattcgaacagctgcggcaccgttcagcaggacgatctccagcagtacaaggatcagcagaacaataagaaccgtagtaaccatcgtgtactgtgcatcataatattttgcaacggtattcaagttggtactctgtgcattgatttttaaatttttcttcaaaaaaatcattgacaatgctttctgtgcatgataaaatcacatttgattttgagagacaaagcatggcagagtcttttcaaagcaatttaccatggaccgcccagcggggctaaggccatacggacagccgggtccactgccgaccggcggcacagccgccattattgattgagcgtagcagctcgaattttataagttggttcctttacaaccatgaaattgcgcagtcagtgtgcagacttgtgaaacggtcaataaagagcagtaaaagcagaattgctatatagactctcataatcccgtcttttttgaatcatgcgaagcggcctttgtactctggtgtttcttccgggggtctttggcggcgcattcaaatgcttttcaaagcgcaagtctgcactttttgtgcggtacttgcgcttttttgtttgcatcgggatcagggacggaggaaaaacatgagtgagaaccgaacacggttccggctgaaccagaaccgtgcgcccatctatgaagcgctggaacagttccgcaaaatgcgggtggtgccctttgatgtgcccggccacaagcgaggccgcggcaacccggagctgaccgcctttctgggccagcagtgcgtgggcgtggatgtgaacagcatgaagccgctggataatctctgccacccggtatcggtcatccgggaagcagaggagctggccgcagatgcctttggcgctgcccacgcgttcctcatggtgggcggcaccaccagcagtgtgcagagcatggtgcttaccgcctgcaagcgcggtgatgagatcattctgccccgcaatgtgcaccgcagtgtgctgaacgcactggtactgtgcggcgcggtgccggtgtatgtgaaccccgaggtggacaagcgccttggcatctcgctgggcatgaagcgggaacaggtggaaaaggccattaaagagcatccgaatgctgtggctgtgctggtgaataaccccacctactacggcatctgctctgacctgcgcgccatcgtaaaaatggcccacgatgccgggatgctctgccttgcggacgaagcccacggcacccacttctactttggcggcggcctgccggtgtctgccatggcggcaggagctgatatggcatccgtctccatgcacaagagcggcggcagtttaacgcagtccagcctgctgctcatcggccccaatgtgcacccgggctatgtgcggcagatcatcaacctgacccagaccacctccggcagctacctgctcatgtccagtctggatatctcccgccgcaaccttgcgcagcgcgggcggcaggtattccaccaagtggccgacatggccgagtatgcccgtgaggagatcaacgccgtgggcggctactacgcctttggcaaggagctgtgcaacggcgactccgtttttgactttgataccaccaagctcagcgtccacacgctggatatcggccttgcaggcattgaggtgtacgacatcctgcgcgatgagtacgacatccagatcgagttcggcgacattggcaacatccttgcctatctttccatcggcgaccgcccgcaggaggtggagcgtctggtcagcgcgctggccgagatcaagcgccgctaccagaccgatggctccggcctgctgagtcaggaatacatcgaccccgttgtggctgccagcccgcaggaggcgttctatgcgcccaaaaagagcctgccgctccgggagaccgagggcatggtgtgcagcgagttcgtcatgtgctacccgccgggcattcccattctggccccgggcgagcgcatcaccaaggaaattttgaactacatcgagtacgccaaggccaagggctgcagcatgaccggccccgaggacccggacatcgagcggctgaacgttctggcataaggagggaatgcagatggaattttggttttctgagtttcacaccccggacgtgaagcacagcatccgggtgaacaaacagctctactccaagcagagcgattaccagcgcatcgatatttttgaaacgccggagtttggccgggtgctcacattggacggcaatgtgatgctgaccgagcgcgacgaattcatctatgacgagatgatcgtgcatgtgcccatggcggtgcacaagcaggcaaaagacattcttgtcatcggtgccggtgacggcggcgtggtgcgggagctgacccgctacgaccgggtggagcgcatcgaccttgtggagatggacccgcaggtggtggaagcctgccgcgccttcctgcccagcaacgcctgccgcatggatgaccgccgggtgcacatctattttgagaacgccctcaagtatatccgccgctgcgaggaggagtacgacctcatcatcgtggactcctccgatcccttcggcccatccgagggtctgttcacccgcgagttctacggcagctgcttcaatgccctgaaagcggacggcatcatggtgaaccagcagggcagccccttctatgccgaggatgccagcgccatgcagcgcagccacaagcgcattgcgtccaccttccccatcagccgagtgtatcaggcacatattcccacctttgcggctgggtactggctgttcggctttgccagcaaaaagtatcatcccatcgatgatctggatgcagacgcatggaaggcgctgaacatgcgcacccgctattacaccgcccggctgcatgtcggcgcattttacctgccggcattccttgaggaaatgctgcgggaagtggaggaacactgatgcaacccaacattgagaacttcatcggctgtgacagcagctaccgcgccgccagcatcgtgctgtacggtgcgccctacgattccaccaccagctaccgcccgggcgcacggttcggcccggcggccatccgacacgaaagctatggtctggagacctacagtccctaccagaatgccgacctgaccgattttgacatcttcgacagcggcgatctggagctgtgcttcggctccagcgagagcgcccttgcggacatcgaagcccgcgcagaggagatcctgcaggacggcaagttcccgttgctgctgggcggtgaacatctggtgacgctgggtgccgtgcgggctgctgtgaagaaatatccggatctgcacatcgtgcactttgatgcccacgccgacctgcgggacgactaccttggtgcaaagctgagccacgcctgcgtgctgcgccgctgccatgagctggtgggcgacggccgcatccatcagttctgcatccgcagcggcgaccgcgccgagttcgagtttgcagcccagcacaccgagatgcacaaattcgattttaccggccttgccgagctgacggaacagctgtgcgagagcaaggtgcccgtctacctgaccatcgacctcgactgtctggacccctcctgcttccccggcaccggcacgcccgaagccggcggcgtgagctttttgcagcttctggatgccatccgcaccgtgacgaaagccaacatcgtagccgcagacctcaacgagctggctcccacgctggataccaccggcgtttccaccgccaccgcctgcaaggtgctgcgcgaaacgctgatcgcgctggacaagggctggcccggctttcaggtctgaccgaatttgcatacattgacataaaggagaaaaatcatgagcaaagttctgatcatcggctgcggcggcgtggcctccgttgccatccacaagtgctgtcaggtacccgaggtattcaccgagatctgcatcgccagccgtaccaagtccaagtgcgacaagctggctgcagagctggcccctaaaaccgctaccaagatcaccaccgcacaggtggatgccgacaaggtggacgaggtgatcgccctcatcaaggcttatcagcccgacctcgtgatgaacattgccctgccctatcaggacctgaccatcatggatgcctgccttgcctgcggcgtaaactatatggacaccgccaactacgagccggagaacaccgacgacccggagtggcgtgccatctatgagaagcgctgcaaggaagcaggcttctccgcctactttgattacagctggcagtgggcctacgcaaagaagtttgaggaagccggcctgaccgccctgctgggcagcggcttcgacccgggcgtgacccaggcttactgcgcctacgccaaaaagcacgagttcgacaccattgacaccattgatattctggactgcaacggcggcgaccatggctatgcctttgccaccaactttaacccggagatcaacctgcgcgaggtgtccgctcccggcagctactgggagaacggccactgggtggagatcccggctatgagcatcaagcgggaatacaacttcgatcaggtgggcgacaaggatatgtacctgctgcaccacgaggagatcgagtcccttgccaagaacatcccggaggcaaagcgcatccgcttcttcatgacctttggccagagctatctcgaccacatgcgctgtctggaggatgtgggcatgctgtccaccaccccggtcaacttcaacgggcaggagatcgtgcccatccagttcctcaaggctctgctgccggaccccgccagccttggcccccgcaccaagggcaagaccaatatcggctgcatcttcaccggcaagaaggacggcaaggaaaagacctactatatttataatgtgtgcgaccatcaggagtgctacaaggaggtcggctctcaggccatcagctacaccaccggcgtaccggccatgtgcggcgcactgatgctgctcaccggcaagtggaccaccaagggcgtgcacactgtggaagagtttgatccggacccgtatctggacgctctggacaagtacggcctgccccgctccgagagccacagcccggcgctggtggactgatgcggctggccgatacccgcccgccctttgcgggccttgcaaacctttcttgggaagcgcttgcctctctgcccaccccctgctacctgctggacgaagggcagctgcgccgcaacggcgaacttctgctgggggtgcagcagcgcaccggctgcaaaattctgctggcgcagaaggctttttccaactttaatgtttacccggtgctggctccttatctggcgggcaccgaggccagcggcctgtacgagagccgccttggcaaagaagagctgccggaaaaagagaaccatgtgttctgcgcggcctaccgggcagacgagttcgcggagctgctgcagtacgccgaccacatcgtgttcaattcgcccagccagctggcaaagttcggcccggcagcaaaggcggcgggcaagagcgtgggcctgcggctgaacccggagtgctccacgcaggaaggccatgcaatttacgacccctgcgccccgggcagccgccttggcaccacccgcgcccagtgggatgccgccgtgcaggcagacccggccctgcccgaattactggacggactgcacttccacaccctgtgcgagcaggatgccgatgcactggccctgacgctggcggcggtggaagcaaagttcgggggtcttctgccccggatgaagtggctcaactttggcggcgggcaccatatcactcgccccggctaccgccttgccacgctggaacagtgcattaccgaaacacagaaaaagtacggcgtgcaggtgtatctggagccgggcgaagcatgggcgctgaacgccgggtatcttgttaccactgtgctggatactttgcaaaatggcgagacgagccttgccattctggacatgtctgcggcctgccacaccccggatgtgatcgagatgccctaccgcccgccgctgctggatgccggagaccccggcgaaaagccgtacctcatccgccttggcggccccacctgccttgccggggatgtggtgggcgactacagctttgcctccccgctcaccgaggggcaaaggctcattttcggcgatatggccatctacaccacctgcaagaacaacaccttcaacgggatgccgctgccgcccatctgggcaatggacgaaaacggcacctgccgggagctggtgaagttcggctacagcgatttcaagatgcggctgggacgtgcagcggattaaagtatgacccttacggcaaatctgtattcaatcaaaagacagcctgtatcaaaaccgcccaaaatgcacgctattcaaatacagtttctttttatcatctgacgaaaatttaaaaaaattcatattcagcctagacaagttccttttcatgtgctaaaacaatgctaagaaacccgcaacgatgcaggatctgaggatcactgcgccgttgcgggtttttcttgttttatctgggaaagtgtcaagaaataatagaggaggcaattcttatgaaagcattcatttcgcgtcgtgatttcctgaaagcggcaggcatcaccgcagcagcagctttggcaggctgctcttcttctggcggttccgcaagcggctcttctgcaggcggcaagaccattaagatcggcgtgtttgaaccggcttccggtgataacggcgcaggcggcaagcaggaagtgctgggtgtcgagtatgccaacagccttgctcccaccgtggagatcggcggtgagacctataacgtggagctggtggaagtggataaccagtccagcaccgataaggccgtgactgctgcacaggagctggtctccaaaaaagtctccatcgtgctgggcagctacggctccggtgtttccattgcagccgctcccaccttccagtccgcttccatcccggccattggctgctcctgcaccaaccccgccgtgactgaggccaacccctactacttccgtgtctgcttccttgacccgttccagggctcggtcatggcaaactttgcaaaggatgaattcagtgctgccaacgcctacgtgctgagcatgctgggcgaggactacggctccggtctggccacctacttcgtcaacgcttttgaggatctgggcggcactgttaccagcgagcagttccccgagggcacctcggacttctccgcctacatccagaacgccatcaacgccggtgcagatgtgatctttgctccctgcgctaccacctacgccgcccagatcatcacacaggccgcttctgcaggcttcgacaaacccattaccgcaggcgacacatgggagtccagcgttattctggatgcccagaagggcaccagcgtgcaggtgtattgctccaccttctttgatgagaacgatgattccggcgcagccaaggaattcgtgaccggctttaaggagtggctgaacgccgacagccagaagctgaccaacaacggcggcaatgacatcgtggcagctgtttctgcactgggctacgacggctacatggtggctctggaagccatcaaggcagcaggcagcaccgacggcaccgccatccgcgatgctctgtacggcgtaaactacgacggcgtgaccggcaacatcacttttgaccagaccaccggtgatgccaacaaggatatggcttacatcaagaaagctgccgacggcgcatttgagttcgtcaagactcagagcgtggaaggctgaacaaaattttaagctccctcagtcaacgcctgacggcgttgccaactcccttaatgagggagcctttttgtagccttccggcaggtttggccccctctgggagggggctgtcaccgaaggtgactgggggagtttccatcccataaaaaagataataaaagttgtaagaaatggagggtcccacttatggctgcaaagtttctgccctatttgctggcaggtatctcggtgggcggccagtatgcattgatcgccattggctacacgatggtgtacggcatcctgcgcctgatcaactttgcccacggcgatatctttaccgtagccggttttctgatggtgtacgctactgcttccctcccgctgaccatttccatcccgctggtggtggtggcaacggtactgctgggcatcgcagtggaaaagatcgcctacaagcccctgcgcactgcgccgcgcatgtcggtgatgatctccgcgatcggtatgtcctaccttttgcagaactcgatgtggtatgtcaccggcggtctggccaagcagtaccctgccctgccgtggatcagcgacaccgtcacggtgctgggctgccagaccaagcgggtgacggtggtaacgccgttcctcgtcattgtgctggtggcagcacttgttgccctgatccagaagaccaagatcggcatggccatgcgcgccgcttcccgcgattttgagaccgctcagctgatgggcatcaagatcaacaatgtcatctcctttacctttgcggtgggcagctttcttgcggccatcggctccatgatgtatttttccaactacacggcagtcacccccactgtgggtgcgatgcccggcctgaaagcctttgtggctgcggtgttcggcggcatcggctccattcccggtgcggtgatcggcggcttcatcatcggcatctgcgagagccttatcaaaggtgcaggcgctaccaccttcagtgatgcgttcacctttgcactgctgatcgtggtgctggccgtcaagcctaccggcctgttcagtgaaaacctgaccgagaaagtgtgatgaccatgaaacaagagaaaaaacgcatctatctccgggccgcactggcgctggccgctctgctggtggtgctgctggcactggataacctgagctttgtgccctccatgctgctcaccgtgctgcgcaagggtgccatctatgcactggtggctgtctccatgaacctgctgaacggctttaccggcctgttcagtctgggtcaggcaggctttatgctgctgggtgcctacacctacgccatcctcaccattcccgccgcttcgcagaagtccatctatcagcgctatgcaaacggcggcatcggcttctccatcccggaactgctctccaaacctctgggcggcttcggcctgctgctgggcgttgtcttctgtctgatcctggccggttttatcgcagcgctgttcgccttcctcatcggcctgccggtgctgaagctcaagagcgattatcttgccattgctacactgggctttgccgagatcatccgtgccgccgtggtttacgagggctttggcccgctgaccaacggctccaaccttctgtacggctttaccagctttgccagcttcaacctttcgctgggcggcacgaccctgcatctggagaccgtgatgcccttcctcttctccggcatctgcatcgccatcattctgctgctcatcaactccacctatggccgtgccttcaaagccatccgtgatgacgagatcgctgccgaagccatgggcatcaaccttgccagccacaagcgcatgagctttatcatcagcagcttctttgccggtatctccggcgcaatgcttgccatgtatcaggccagcgtgcaggccaccaccttcaaatccagcatgacctatgagatcctgctgatcgtggtcattggcggcattggctcggtgtccggttccatcatcgcgtccttcctgttcatcgccagctccgaatggctgctgcgcttcctcgacaacgagacctggatcggcggcttccgtgtgccgctgctgcgttccggcttccgcatggtggtgttcagcatcatcattatggcggtggtgctgttcttccgcaagggcatcatgggcgaccgtgaattgttccagaaaaagcccgcatccactgcaaaagctgccaaaaaggaggcgcgttccaaatgagtgaaaacgtattgaccattgaaaacgccacgatgcagtttggcggcgtggtggctgtggataatctgaacctgaaggtggataaagatcagatcgtctccctcatcggccccaacggtgccggcaagaccaccgcgttcaacgttgtcaccggcgtgtatgcgcccaccaacggcgcggtgtggttcgagggacgcaagatcattgagaacacgccccacggcaagatgaaaaagctctataagggccagaacgcgagcaggtattcccacatgatcgcccccacgcccgataagatcacccagatgggtattgcccgcaccttccagaatatccgtctatggaagagccagaccgtgtttgagaacgtgctcatcgccaagcactgccgccgctcggccaacctgctgagcgctaccttccggctgaatgcagacgaggaaaagcgccagcgcgaggagtgcgaaaacctgctgcatgtgctgggacttgaggatgtgcgcaatgaactggctactggcctgccctacggcctgcagcgccgggtggagattgcgcgcgcgcttgccaccgagccgaagctgctgctgctggatgagcctgctgccggtatgaacccgcaggagaccgaagaactgaccgcctttattgaccgcatccgcaccgatttcagactgaccgtgttcatgatcgagcaccacatggatctggtgatggatatttccgaccgggtctatgtgctggactttggccgcttgatcgccgagggtacgcccgccgaggtgcagaacgacccgcgggtgatcgacgcttatctgggggtggacgaagatgcttgagatcaaggatttacatgtttcctacggcggcattcaggccttgcgcggtgtgtcgctgaacgtgccggacggcaagatcgttaccctgatcggtgccaacggcgcaggcaagtccaccctgatgcgcaccatttccggccttgtaaaggcacagagcggctccattttgtggaacgggcaggaactgctgggcaagcccatcgaccagattgtggccagcggcattgccatgtcgccggagggccgccgggtgtttgccgacctgactgtgctggaaaatctgaagatcggcgcatacctgcgcaaggataaggccgaaaccgaaaaagaccttgagtgggtgtacagtctgttcccccgcctgaaggagcgcagctggcagagcgccggcaccctttccggcggcgagcagcagatgctggccgtgggccgcgccctgatgagcaagccgaagctgctcatgctggacgagccgagcctcggccttgcacccatcgtggtgcgggagatttttgatatcatccgcaccgtgaaccagcagggcatcaccgtgctgctgaacgagcagaacgccaacatggccctgaaggtggccgattacgcctatgtgctggagaccggtaccccgaccctttccggcacgggtgctgaactgctgaccaatgaacagatcaaggccgcatacctcggcaaaaagcgcattgaccgcacctgaaactttataagaaccgctaacggcagagaggggctgctgcaaaacagctccatgaaaaaataacgcataaaaatgcctcagtatggcaggcggaacaggctcatcacactaccaacaaagaaaaacagggcgttcccgactgctgggtatccgtaaaacagttttcgagaaatgacacggcaactgcctgtcaggattggttacggagtacccggctaggccgaggaagcatcaagtcccatgtccgcaccgttaaggtgctgggtatgggactttttgcatttcaggaacgtgtacacctctggaaaggtgtaacacactagactttgtaccaaagtcgtgtgccaagggtgctgcgcccctttggaatccctgcttacatcgcccatgggcgatgtggattcgccgcacaaaaagctctcacaaatgcacacccggctgtctgcggcgaggagaaggcacttctgcggaagtgtaataacccactataacactttcatccctgcggtctgcaaagtgtagtgggctctccgagggggaaacggctgtatagggtgcgcttcgggcaaatcgctgcgtacgtgcgtaccaatctct

SEQ ID NO: 1119 - DNA, 36854 bp, Unknown
  gut microbiota DNA sequence
cccacaaaccggtgtacagcatggcgtacacgcccttttccccgcatacgcggggcttacaaaaaagaaccacgggcgcaacgaaaaatgaaatgatatttctggaaaggagaactctgcaattttatcgcccgcccaggctgtgatcaagaatccccgcaagtaatggcgtaagggcttgacccgacacaaataaagcataacaaacacccctcggtttcctgctgcggaagccgaggggtgttttgcgtattaagggtggaacgaatgcgcactgtgattttattctgccttcaggcggagcaaggtgccggacttttcaatgcggtaaaagcctgcgctgccgtccacgccgaactgcagctgcagcttgagcgaagagtgcgacagcgcgcgcaccgaaggcgcgatccagtgcaccagtgccagcagcagcggcagggtgacgaccagctcggtggcatcctgcagcgcggtgccgcttgtcgggaacagcgcaatgaccagcagtgcggcccagcacttcacagtagagcagctggtccagatcgatgcgggagatgccggtcttgcagcgcaggatcaggctgcgctggtcggcgtggcggcactcggcgatcaccgaatccgtcagacggaaaaagctgtcctcccagatgggcttgagctggtagaaataggcacccaccacataggattccactgcaaactcggcggaagaagtgagaaagatgatcttgacgacgttatcgtactgccggatctccttggcggcggtaatgccgttttcggccggcatggtgacatccagaaacaggatatcgcaccgggtgcccttttcgatctcggccagcagatccagcgggctgtgaaaggctgtgcactggatctggacacagcgctgggcgcgatatttttccagcagggcagagagctggtccagaactgtttggtcatcgtcgcagaaggcgatctggatcataacgggtttaacacatcctttgttcgcgtcagccagaaattacagctgggccttgcccatgcagtaggtctgcagcacatcgtagttgtcgtccagcaccacaaggtcggcatccttgccgatctggatggaacccttgcggtcatccagatgcaggcagcgtgccgggttgatggtgcaggcgttcagtgcatagttgaagggcaccatggcctcctccaccagaatgcgcaggcccttgttgatgttcaaagtggaaccggccagcgtgccgttgtccagatgggcgctgccgtccgggtagatggtgatatggttgccgccaaagatgtactcgctgccaatgggggtgcccttggccatcagtgcatccgagatcatgatggcgtaatccgggcctttgctcatgaagtagttgttcagggcagcaggggtggagtggcagccgtcgcagatgatctcgccgtacatggtgcggatgcggtaggctgcgcccaccagaccgttggcgcggtgggcgaagggggacatgccgttgtacacgtgggtcatggagcgggcaccgttggcataggccatcacggcctgctcataggtggcggcactatggccgatgctgaccaccacgccgtgcccggtcaggtaatgggtcagtgcaaacccttcgtcgtgttccggtgcaagggtcacatagcggatgtggccgcgtgctgcctgctggtagtgcttgaactgctccacgctgggcttggcaatgtactccggaggctgtgcgcccttgtacttcatatcgaggtaggggccttcaaagtggatgccaaggatctcggcaccttcgtagctgccctccatcacgtcggccacattggccacggcgttggtcagcacctccacgctctgggtgacggtagtggccagaaagctggtcacaccctcagagacgatatgctttgcccagtagcgcaggccctccggctttgcgtcgttggtgtcgaactcgtaggcaccatggcagtggatatccataaaaccgggcacgatgcgcttggagccatagtccacatcggcctgcttttcaccataggggaagatgccggtgatcttgccctgctccagctcgactgcagcagaaatgaactggtcggcgatccatacttttttgctctggatgatcatataatcagccctccgatatcatcataaaacctgtatatgctgcacacgacagcacaaccattctgcagaaaagtatagcattttctggcgggaataaccagccttcgcgcgccttttcaaaaaaattaagctggaaaatgaaaaaacgatcgcagcttgcacaaagaaacagcgtaaaatcagaaacccggagcctttttgagccgttttggccgaaaataggttccgggttttgtgcatgatcttttcagagagctgttttgcaacagccccttaatatgaagtaagccccaggcttacatccaaagcctgatccacacgtttctgatcttccggcgtgatctgcccggcccgctcccgcaggcggtgtttatccagcgtgcggatctgttccagcagcaccacgctgtccttggcaaggccggtatccgctgcccggatattgatgtgggtgggcaggcgggctttgtccagccgggatgtaatggccgcagcgatcacggtagggctgtgccggttgccgatctcgttctgcacgatcagtaccgggcgcacgccgccctgctccgaccccaccaccggcgaaagatctgcgtaaaaaacttctcctctgtgtacctccatggaatctccctccctgcatttggaggatgcgccccgcttatgtgatgcgtccggcgcatcttcgtctgctctcagtatgagccggctgcgcgccggttatgcagcgcaggggatattccattgtatgcacaaaggcttacagagtttccagtgtgcagaaggccagcgccatgccgccctcgtggctcagagaaagccgggcggcaaggccatgggcctgcatccattccgccgtctggccggaaaaatgataggcaggtgcaccgctttccagccggacagcctcgatctcacacagggagaacggctcccgcaggccggtgcctgccgcctttaaaaaggcttccttggcggcaaagttggctgcggcgctggcaagccggtgggcagcgctgcgcccggcgggcagtggttcgtcaaggctcagcgcagcgcgttcggcctcgccgtacacccggcggataaaggttgcagcgtgtgcgccggtaaggcttttttcaagatgcgcgatctcacacaggtcgcagccgatgccatacagcataaaggccctccttctgccgcatttgcggcggtgcaggccgtcagcctgcaaaatcaggaccggaaattttatgcaaactgtgcaaatccggtctgtttagcttgaagtttcctcgcaattcgtgtacaatgaatgtagttcttcctaagggggtgtattccgtgagtggcgagaccgctattttttcgatccacgacaaaaaggactatgagatccatgagatcgtacagcaggtgtacgatgctttaaaggaaaaaggctataatccggtcaatcagctggtgggctatatcctgtccgaagaccccacctacatcacgacctataaaaatgcccgttccatgatccgcaaggtggaccgtgacgatctgctgcaggccatgctgcgcagttatctgaacgtctgatatcgcttgtctgcttatgccccgccgtcgctatgatggcggggctttttcataatagaatgcagatgccgtttatcgttacagcccctccggtgaaaacgcaattcagaaaaatccgcagatctttctgaattgcaactatatagaataaaattttcgctgaagatggccagagcgaaacggaggccattccaaccgttacggccggaacggcagcgtaaagatctggtttacgacgacctcatattcccacggttcccgcgccttgcgcagctgcttttccagcttttcggccccctcaaacttgtgaatgaggtagaaccagtgtcccttcatgcggctcaccgcgcacccggcgctgccgaacagttcggagtatccgtggtagaggtcgtcaaggtatccgcgcagctcttcccgtgcggccggtgcgccgccgcgtgcttcacggaagagcgccgggtccgcaatgatgccgcgccccaccatgatgccggacagctgcggatactgcgcttccaacgtgtgcaggtccgcagcggtggtcacatcgccgttgtagcacacgggcatccggcacccgggcagggaggcagcaaaagcggcacggtcggcctgcccgcggtagagctggcgcatcacacgcgggtggatggtcagctcacagatgggataccggttatagatgtccagaatggcagcaaattcttccggtctttccacgcccagccgggtcttgaccgagataggcctttccgcattggcaaatacggcggcaagaaaagcgtccagcttgacggggtcgcgcagcatcccggaacccttgcctttggcggtgacggtgccggaaggacagccgaggttcaggttcacctcggtgtagccaaggccgcgcagctcgccgatcatccatgcggcaagttcgccgtcctttgccagcagctgcgggatcaccggcgcgccggggtttgccgcaggggcaagctcggccatcttctttttaatgagcacccggttctccggcggggagatgaaaggggcatagtagcggtcggcattgccagcagggccgaaccatttctggtgtgcctgccgccacacccggtcggtcaggccctccatgggggcagcatagtaattcatgggcaaatctccaaagtgtttgatagggatattgtaacaaaaaactcccgtcctgtgaagtcacagaacgggagaagcaagctttttgaaagatcagtctgcaaacagcggggtggacaggtagcggtcgccggtatcgggcagcaggaccacgatgttcttaccggcattctccgggcgctttgccagctgcagggcagcataaacagcagcaccggaggagatacccaccagcacgccttccttgtggccgatcagacggccggtggcaaaggcatcgtcgttctccacggcgatgatttcgtcatacaccttggtgtccagtacgtccggtacaaagcccgcgccgatgccctggatcttgtgtgcgcctgcggtgcccttgctcagcacaggagaggaagcaggctctacagccaccaccttgacgttcgggttcttgctcttcaggtactggcccacgccggtcacggtgccgccggtgcccacgcctgccacaaagatatccaccttgccgtcggtgtcctcccagatctcggggccggtggtctcgatgtgggcctgagggttggccgggttcacgaactggccggggatgaaggaattcgggatctcctttgccagctcatcggccttggcaatggcacccttcatgcccttggcaccctcgctcagcaccagctctgcgccgtaagccttcatcagctggcggcgctccacgctcatggtctcgggcatcacgatgatgatgcggtagcccttggcggctgccacagcggccagaccgatgccagtattgccggaggtaggctcaatgatcacggaaccttccttcagcaggcccttttcctcggcatcatcgatcatctttttggcgatgcgatccttgacagaaccggccggattgaagtattccagcttggcaatgatgtgggcaggcagctcctgctccttttcaatgtgggtcagctccagcaacggagtatgaccgatcagctgatctgcggcagtataaatcttgctcattgtagtttcctccctgatacagttatgggcacatgtgccctgccggacgacctggttccaaaacctttataccaacattgtttgtgggtttgatggtattatagacccgttctgtgcggttgtcaatggatttttttgaaaaaagtgggattgaaatattatttaccctgttgtataataggttaaaaactcaatctataaccaacaaaggaagtacactattatgatcgtgtccaccaaagggcgctatgcactgcgcgtgatgatcgacctttccgagcatcagtctgaaaaatatgtccctctcaaggagatcgctgcccggcaggagatctcggaaaaatatctggaaaacatccttaaggtgctggtgcagaacggctttctggagggcttgcgcggcaagggcggcggctaccggctcacccgcagcccggatcagtacaccgtgggcgagatcctgatgctgaccgagggcagccttgcgccggtgagctgcctgacccccaatacgaccccctgctcccgcatggcaaactgccgcacctacgagatgtggaaggggctggacgatctgatctccaattacttcggcaatatcacactggccgatctcgcccggcctgatcaggccgggaatgactatgtgatctgacggcatttctgataacatgcaaaaaggcgcaccggcttgaccggtgcgcctttttttgcacagttctcggcgaaatgtgcaatttttcttatccagaatcacggttgatggattggggttcctgcggtatactttacccttgatgtgtccatttacgcttttgatcgaggaaaggggaactttactacgaaatatatttttcagttcgcgcgcattcttgcgttttgttttttgggcgagatccttcatgtagtgctgccgctgccggtcccggccagcgtctacggtctggtgctgctgctggcagcgctgaacttcaagctggtaaagctggacgatgtgaaagaggttggaacctatctcacaggcatctttccgctgctgttcgtgcccgctgccgccggtgtgatggaactgtgggcagagatgggcgagatgctgctgcccatcctcgttgccattatcccggtcactgtgctggtgatggtgagtgcaggcaagaccacgcaggccctgaccggccgcaagaaaaaggaggctgacaatgacgcagctgctgaatgattttttgtccggctccgcagcatggggcgttctgcttacgctggccgcgtttgcactgggcacccttatcaataaggtgacaggcaaagccatttttaacccgctgctgctgggcagtatctttgtgatcatctttctgtcggtgtgcagcatcccgtatgcggactacaaggccagcgcggcaccggtgaactatctgctgctgcccgccaccgtggcactggccattccgctgtatgaaaagatcgacctgctgaaagagaacgccgccgccatcattgcgggtatttcggtgggcacgctggtgagtcttggcagcgcactggcgctggcactggcgctggacctgacccgtgagcagtatgccaccctgctgcccaagtccgtgaccaccgccatcagcatggatgtggccgctgagctgggcggcattgctgccctgaccggtgcgatcgtcattgttaccggcatcgtgggagcgctgctggctgagacggtgtgcaagatgttccacatcaccgaccccatcgccaagggcgtgggtatcggaacttcggcccatgccgtgggcaccagcaaagccctgcagatgggcgaggtggaaggtgccatgagcggcctttccattgcggtggccggtgtgctgaccgcagtgctctgcccggtgtttgtgaacctgatccggtaaaggatttaaaatagccgctctggcttttttcagtagaatttatttattgatccgggaacctcagtttacaacaaaaatgagataggcaacccctttcgggggagtctatctcatttttttgttgaggctgtttttatacgccgctgtgttcccgttcatccttcaggatggccgtcacgctctgcatggtgcttactgcacgatgcagttcttcgtcgccaagctctgcacgcaggcgggcgtaacagcgctgcatgaacgcgcgctcctccgccatcagctccacagccttgctggaaagctccacataggtgcggcccgcttcacggtcggtcttccatgccacaaagccattgtcctgcagcttttcaacggccttggaaagctctgtcaccttcaggcccataacggcagcaaggtcagccagataaaccttactgtccgggtgctgttcggcctgcatcttgatgtaatataagatcaggtaatccgcccgctggatggtgctgaacaccttgtcgatatcaaaattgtgcaggaagaaccattcttccgggtgatgtttcagttccacgctcatcatgcatcctccctgttattcccgctcattgcggcggatatattcgtgggtgccgccaaggctcttgtaggccgggcggatgatcttgtttgcgctgagcagctcttcaatgcggtgggcgctccagcccatcacgcgggccacggcgaacagcggcgtgtacagctccatggggatgcccagcatatcgtacacaaagccgctgtagaagtccacattggggctgacacccttaaaaattttgcgctcctccgcgatcagctgcggggccatgtgctcaatcttgttgtaaagggcaaggtccttgtcgcggcctttctcgtgggccagctgttccacatagcccttgaataccacctcacgggggtcactgagggagtacaccgcgtggcccatgccgtagatcaggcctttgcggtcaaatgcttcgccgtgcagcagttttttcaggtaggcttccagctcttcatcgtcctcggtgtcgtgcaggttttcgcggatgttctgcatcatctgcatcaccatcaggttggcaccgccgtggcgcgggcctttgagggagcacagggcagccgccatggccgagtaggtatcggtgccagacgaagtgaccacgcgggtggtaaaggtggagttgttgccgccgccgtgctcggcgtgcagcagcaatgccacatccagtacgcgggcttccagttcggtgtacttcatatccgggcgcagcatccgcaaaaagttctctgcggtggaaagctccgggtccggccggtggatgtacatgctgccgtctttttcgtagtggttataggcatggtagctgtacacggccagcatggggaagatgccggccagctggatgctctggcgcagcacattggaaatttccagatcaccggccttggggtcgtaggatgccagtgtgagcacgctgcgggccatggagttcatgatatcgtggctgggggccttcatgatcacatcacgggtaaagttggtgggcatggtgcggcactcgcccagcacgcggcagaactcttccagcttttcctgcgtgggcagctcaccaaacagtagcagatagcccgcttcctcaaaggcaaagcggctgccggacgacccgcggatcaggtctttcacgtcgtagccgcggtagagcagctgaccgtcggcaggctttttcaccccatccacatactggaaggcgcggatatcggagatattggtcaggcccgccagcacgcccttgccgttttcgtcgcgcaggcccgctttaacgccaaactccttgtacaggtccttgctgatgcggtcgtgttcggcgcacagcggctgctgctggtcgaagtatcccattacgttctgcagatgatccattggtagttgctcctttcccattgccgtcagcttgcgctcacttggcaggccatcaggaagttttctctgcgaacagcccggaacttcggtcccgccctactgcctgtggcagcagggtaccacccccaggacattcgctggagaaacttcctgccgtcctgcccgaaaaaaccgtattgattcgggacggcattcacttacattcagaatactctttaagattacaaaaaggatatttcggtgtcaaggtactgtttgtaaataaaaaaagaacaaaatcggaaagctgccgggtgcgcatttgccctttagcgcagggacagtttttgagacggtaacgcacaaataaggcatcttccagccggatctcaggggactggcaacaaataaagccacgacgaaaccgcatttgtaaacggttcatcgtggctttttgtcatatcggagtggcgagactcgaactcgcggcctcctgctcccaaagcaggcgcgctaccaactgcgcaacaccccggcatccggcggcactgctgcaccgccggaatatagtatatcgtttttggagcggttcgtcaatagcggcgtggccctgccgtgcctttaattaaaggagcggaagcccttgccgatgatctcactggaattgacgatggtgataaagctccgggggtcgttctcccgcaggaagttgcgcagctgcagggcctgacggcgggtcagcaccgtcaccagcacgctcagctcgtggtgggtgtaagcaccgtaagccttttccacggtagcggaacggttcatttccttgatgatgaagtccagaatgggctgcgggttggacgtcacgatggtgcacaccttgcgcaggcggatgttctcgatggcaccgtccaccacaaagctcttgccgatcagaccaaggatgcagtaaaggccggtgcccatgccgaaccgccatgccgccgccagcacgatgaggatatcgctggccatcagggctttgccgatctccatagaggtatattttgccagaatcagggccacaatatccgtaccgccggtggatgcaccgatgtcgaacacgatcgccgcacccagagccggcaggaacacggcgaacaccagatccagcatggcatcgccgctcatggaaacgttgacgggatagagccactcgcacaccgacacaaaaaaggacagcgcaaaggaagaataaatcgtccagcccatggtcttgatgcccagaaagacaaagcccagcaccaccagaatcaggttgatgatccacataaagccgcccacgttgatcttagggaacaggtctgccagcagaatggacaggcccgaggtgccgccaaatgcaaaatgattgggatttttaaagtaaacgatgccgaccgccgtcaggatcaggccgagattcagctcaccgaagaaatttaaattcttcagcatatttttcctgctgaacgcttcttttaaactgttcatggggttcctcctattttaaacacggcaaaatgcgctgtatgccatgcaaaaatatactctccttgcacggcggtgtcaagggatagggaaaaagttgtggaaaacaacatgaattggggatttttcggatgagagaactccttcagtcaaagcctgacggctttgccagctccctcggggagggagcctttggcaaagagagaaagctttaccgtactgccaagggccccatctctgagggggctggcaccgaaggtgactggaggagttaagctccccctctcgggggagctggcgagcgtatgcgagactgagagggttttctcttgaagaaatcggcagaatagtgtattatatagtattatggaatatataggcactttgtgcctttgacagggggaaaacacatggcagataaaaactttctgaccgacatcatcgacgctgatctggccgagggcaagatcagcgagatccatacccgcttcccgcccgagccaaacggctacctgcacatcggcagtgccaaggccatctacatcaactggtccattgcaaaccagtacggcggtaagttcaacctgcgtctggacgacaccaaccctgcccgcgagggtgaggagtacgtgaacagcatcatcgaggatctgcactggctgggtgccgaccccaacggcggcatcttctacggcagcgactactttgacaagtgctacgagtatgccgaaaagctcatcatggagggcaaggcctacgtggacgacctgacccgcgacgaaatgcgcgagtaccgcggtgccgatgccggcaagccttcccgtccctctccgtggcgcgaccgcaccccggaagagaatcttgacctgttccgccggatgcgtgccggtgagttccaggagggcgaaaagaccctgcgtgccaagatcgatctggccagccccaacatgaacatgcgtgacccggctatctaccgcatcaagtacgccgagcatcaccgtcagggcagcaagtggtgcatctacccgatgtacgacttcgcacaccccattcaggatgccattgagggcatcacccacagcatgtgcagtctggagttcgagaaccaccgtccgctgtacaactgggtcatcgagaacattttcggcactgccttccccaagcagcgtgagtttgcacgcctgaacatgaccaacaccgtcatgagcaagcgctatctgcgtgagctggtggaaatgggcatcgtggacggctgggacgacccccgtatgcccaccctgtgcggcctgcgccgccgcggctacacccccacctccatcttcaccttcgtgcgggaggccggcatttctaaatccgacaacctgatcgacatgcgccagctggaagcctgcatccgcagcgagctggacctgaccgctcagcgccgcattgccgtgctggaccccgtaaagctgatcgtagacaactacccggaggacaagaccgagtactttgatgtagccaacaaccccaaccgcgaagccaacgataccaccacccgcaaggtggcctttaccaaagagctgtggatcgagaatgaggactttgccgaggtgccgcctcccaagttcaagcgcctgaccattggcggcgaggtgcgtctgatgggcgcttacatcgtcaagtgcaccggcgtggagaagaatgccgacggcagcattgccgccatccactgcaccgccgacctcgagaccggcaacggcaatcccgccgacggccgcaaggtcaagggcaccatccattgggtgagtgccgcccatgccgtggatgccgaggtgcgcctgtacgacaagctgttcaccgaggccaacatgaacgccatccccgagggcagcgattacaaggactacctgaacccggaaagcgttgttgtgtgcaagggctgcaagctggaagaaagcctgaaggaagcaaagcccggtgagaagttccagttcgtgcgcaccggcttctttaccccggactccaagaaccccggcgtttacaaccgcgtcgtcaccctgcgcgacagtttcaaacccgcaaggtaaaaaatatatcacgtcaaaagggagcatttgatcttttatgaagaaactcacccggaatgttatcatcatggctgttgtcactgtcattatggcagttgtgctcggcctgtacatcaagaacaccggcactgtgcccgctgccgacaacgccgccagcctgacggatggcatctatacgtccagcgctcagggctgcctgagtgatgtgaccgtcaccgtcaccgtcaccggcggccgggtgaccggtgtggagatcgatgcatccggcgagactcccgaactgggcggcatcgctgctgaaactctggcagaccagctgaccaaggctggttccaccagcggtgtggacgctgttgccggtgctaccatgaccagcgacgctgtgttcaccgccatggacgactgcctgagtcaggcagagtaaagacccgaaagaccggcatggctcacagctctgccggccttttttcttaaaatacagcacaaggagagggaacattatgggcgtattatccaatctggaaccagcttcggttttttattactttgaggagatctgcggcattccgcacacctcccaccacgaaaaggcactgagcgactactgcgtgcagttcgccaaggcccacggccttgcctgccgtcaggacgagatgggcaatgtgctcatcaaggcaccggccacacccggatacgagaaggagccgggcctgatcctgcagggccatctggacatggtgggcgacaagaccgccgactgcccgctggatcttgagaaagaggccatccacccggtcgtagacggcggctatgtgtgcgccgagggcacgacccttggcggcgacgacggcattgccgtggcctatgcgctggctgttctggacgcaaaggacattccccaccctgcgctggaggtcgtgctgaccgtctgcgaggaggtgggcctgctgggtgcatctgccatggatttttccgaccttgagggccggatgctggtgaacatcgactccgaggaagaaggcgtgctcaccgcaggctgtgcaggcggacgccgcgtcgagtgccatctgcccatcacccgtgcggctgtgaccggcaccgccgtgaaggcggacatcgcggggcttgcgggagggcactccggcaccgagattcacaaaggccgcgccaacgccatcgctctgctggggcgctacctgaccctgctgtctgaccacggtgcagagtacgctgtgctcaccctctccggcggtgcaaaggaaaacgtcatcccgaaagaaagcagcgttacgctggtgctgcccgccggtatcaccgaagccgtgcgcgctgccggggcagactttaccgcgcagatgaaagcagaattcggcactgctgacccgggcatccgcctgcagctcaccgaggagggctgcggcgaatacgatgcactggatgcgaactccgccgagcgtctgcgcaaagccctgctgctgatgccctggggtgtgcagagcatgagcatggatgtgcccggccttgtggagacctcgctgaacctcggcgtggccgagatgagcggcaccgaagccatcctgcggtttgccatccgcagctcggtgccctcggccaaggagctgctgagctgcaaggtgcagtctctcaccgagctgctgggcggcagtgtgcggttccacggtgactatcctgcgtgggtctatgcccgcgaaagcgccctgcgcgaccgctgcgtagctgtgtacgaggcgcagtacggtgcaaagccccagatcgttgccattcatgcgggcctagaatgcggtatcctctcgggcaagatcgacgggctggactgcatctcctttggcccgaacctgctgcacgtccacacccccaatgagcgcgccgacattgcatcggtggcccgtgtgtgggaatacctgaaggctattctggcttacaaagtataaaaccctctcagtcacagcttgcgctgtgccagctcccccgaaagggggagctttctttgtgctgactgtaaagacgcaaaaagctccccctttcgggggagctgctgaacgaagtgaagctgagagggtcagtccaaatacttgatcttgcccggctcaatgcccttgatgccaaggcccggctcgttggaaacagtgatgtctttttcgttgaacactgcaccgccgaggatggggtcctcactgcacagcacggggccgtccagatccacgcgggtgatgatctgctttgcgcaggccagatgcacggcggcgttcacgctgatcttggcttccagcatacagccgatcatgcactccacgccgtacacctcggcagcggatgcaatcttgagggcgttgtacaggccgccgcacttcatcagcttgatgttcacgaggtctgcggctcccatctgcatgatggtcagtgcgtcctgcggggagaacacgctctcgtcggccagcaccggcacataggagcgctcggtaacatacttcaggccttcaaaatcgtgggccttgaccggctgctccacgaattcgagatcaaggcccttctcctgcattccgttcaggatgcgcacggcttccttgggggtccagccctgatttgcgtcgatgcggatgcaggtctctttgggcacagcaccgcggatggcgctcaggcgtgcaatatccttttccggctccttgcccaccttgaccttcaggcagtcgtagccgcggtcgatggcgttcagggcatcgcgcaccatctcttcggggtcgttgacgctgatggtgatgtcggtgacgatggacttctttgcgccgcccatcagcttgtacacagggattttgtacagctggccgtacagatcccacagggccatatccacagcagccttggcgctggtgttcttctggatgcaggcattcagtgcgatcatcaggtcttcaaagtcgtccacatcgcggccgatgatggtctttgcgatatggtcgcggatggcaccgatgatggcaccggtggtgtcgccggtgattacaccggtgggaggtgcctcaccataacccacagcgccggtgtcggtgtggatctctacgatcacatcctccacgctgctgaccgagcgcagagccgtcttaaaaggcacgcgcagcggcacggagatcagaccgagacgtacttccgtgattttcatgcaaaaacctacccctttcgataaaaaaatattgccagattatgaaatctatggtagtattgtatacgaaattgtcgatattgtaaagacaattgtccgcaaaaaattgcacaaaaagaaaggggattgggttcatgatcacaaacggtttcacctacatcgccgtgctggtgttcattgccgcactgctggtgtggctgcaacgctacacgaagtcgaaattcttcgactatgcaccacctatcgttctgctgtacctcattaccatgattctctgcacgctgggtgcatgggacatggaggccaccaagcctgcctactccgtgctgaaaaacaacctgctgtatgcaatgatcttcctgatgctgctgcgctgcgacatccgcaagatcattaagctgggtcccaagatgctgggcggcttctttgccgcttccgtctccatctcgctggccttcattgccaccttcgccatcatgaaggggccccttggctccgaagcatggaaggcactgggcgctctgtgcggcagctggatgggcggctccggcaacatgatcgccgtgcaggctgcgctggacatcggcgaagctgacatggcctacgcactggtggtggactccatcgactactccatctgggtcatgttcctgctgtgggccatcaatctggctcccaagttcaacaagtgggtcaaggccgacaccaccacgctggacgaagtgtcccgccgtctggaagaggacgcaaagggcaacgaggacaaggccagctttgtcaacctgatcttcctgctgggtctggctctggtgatctccgccttcggtcaggatatcggcgcagccctgaacagcgcaatgcccttcctggacaaggccacctggaccgtcctgctcatcacgttgtccggcctgatcggcgctgtcacccccgtgggccgcatggcaggcagtaccgagctgtccaacctgctgctgtactccgtggtggcattgcttgcctcccgcgcaagcttcctggagctgaccgatgcacccgcatggatcctggcaggctttatgatcctggccatccacggcatcattctggtgctgctggcaaagatcttccatctggatatgttcacctgcggtgttgcatctctggcaaacatcggcggttccgcatccgctcccattctggctggtgcctacagcggcgctctggtgcctgttggcgttctgatggctctgatgggctacgtcattggcacggcaggcggcctgattaccgcaaatatcatgtctctgctggcataacaaatactgcaaaaaaggggctgttgcatgtgcaacagccccttttcttatacgattttttgcttagccgcccagatatgcgctgcgcacgcgctcgttggtcagcagttcggcaccggtgccctccatgactacacggcccgtctcaaggacgtaggcacggtctgccacggaaagagccatctgtgcgttctgctccaccagcaggatggtcatgccttccttgtgcacgttctggatgatgtcgaagatctcctgcaccagcagcggcgaaaggcccatggaaggctcgtccagcatcagcatggaagcgttgctcattagtgcacggcccatagccagcatctgctgctcgccgccggacatggtaccggccagctgcttgcggcgctccttcaggcgggggaacagctcaaacaccttttccttgttgggtgcaatggtggaagcaggctgggtgtatgcacccatgtccagattttcttccacggtcatgtgcaggaacacatggcggccttccggcacatgggcaaggcctgcttccacgatcttgtgggcgcgcatgcccttgatgctgctgcccttgtacaggatgtcgccggtcttgggcttcagcaggccggaaatggtctttaaggtggtggatttgccagcaccgttggcaccgatcagggtgacgatctcgccctgatccacctcgaaggagatgtccttgacggcgtggatgttgccgtaatagacgttgatgttatcaactttcagtaacgtatcagccatggcttagccctccttcttgcccagataggcttcgatgacctgcgggttgttgcggatctcatccggcgtgcccttggcgatgatgcggccgaagttcagcacggcaatgccctcgcagatgcccatgaccagactcatgtcatgctcgatcagcagcacggcgatgttgaactcgtcgcggatgcggtggatggtctcggtcagctctgcagtctcggagggattcataccggcagcaggctcgtccagcagcagcagcttcgggctggtggccagtgcacgcatgatctccagacggcgctgtgcgccgtagggcaggctgcctgcctgcacattggcgaggtctgccatgtggaagatatccagcagctccagagcacgctcggtgcacttcttctcttccttccagtagttgggcaggcggatcagcgaagatgccagattgtacttcatggactcgtgcaggcccaccttgatgttatcgatcacgctcagttccttaaacaggcggatgttctggaaggtacgggccacgcccatgcggttgacctgataggtctttttgccggcggtgggcataccatcgatcaggatggagccgcgggtgggctggtagacgttggtcagcaggttgaacacggtggtcttaccggcaccgttggggccgatcagaccggtgatctcgttgcggccgatcatcaggttgaagccatccacggcggtcagaccgccgaagtcgatgcccagctcacgcacgtccagaatgggctttttgtccatgtcgcggtcggtcaaaaagccgccggagggcacactgtgcagcttagtctggtattcactcatggtctttgccctcctttgctttcttctggaacagttcgccgttcatgatcttttccacaatgcggctcatggagaagtcgtagctgccaagcaggccgcccggacggaagatcatcatgaggaccagcaccagcgagtagactaccatgcggtagctgtcaaagctgcgggtcgcctcgggcaggatggtaagcacggtcgcggacaggatagagcccagcatggagcccatgccgcccagaaccaccatgaccagaatttcgatggacttcatgaagccgaaggtggaggggtccagaacgcccagatagcaggcgtacaggccgccggccagaccggcaaaggcggcagagaatgcaaaggccatgaccttataataagtagtctggatgccgcagctctcggcagcgatctcgttatcgcggatggccagcacggcacggccatggcggctcttcatcatggcgtggatggcaaagcaggtaatgaccacgcagatgaacacattggcgaagttagaatacttggggatgttcttcaggcccttggcaccgtagaacagcttgaagcccagcacatcatcgatgttgttcagggtgatgcggatgatctcgccaaagcccagtgtcaggatggccagataatcaccggtcaggcgcagagcaggaatgccgatcagcacgccgaacaggcccgccacgatgcaggccagcaccagacccacgacaaaagcgacaccggagggcagattgctgtatttcgtgaacagggcacaggtgtaagcacccacggccatgaaaccggcatggcccagcggcagctggcccagataaccggtggcaacgttcagcgagacagccagaatgatgttgatgcccacggtgagaagcaccttgttctggtaggtggacagcacgttctgggtgaggaaggacaggcccacgaacagcagagccaccagcacggcgttcatcaggtagcgcacgggcattttgagcgttttgcgtttggtattcatcttcatgccctccttacaccttttcctgaaccttgcggccaaggaagccggtgggcttgaccagcagcacgatgatcaggatcgcaaacgtgacggcatccttccatgcggaaaggccgatggcggaaacaaagcactcgcacaggccgatggcgatgccgccgatcatggcaccgggaatggagccgatgccgcccagaacggctgcaacgaaggccttcaggcccagcatggagcccatggtgggggtcgcctgcgggtagctgcagcagtacagcaccgagccgataccggccagtgcggagcccaccgcaaaggtaaaggaaatggtgctgttgacgttaatgcccatcagacgggcagcgtccatatcctcagacacggcacgcatggccttgccgagcttggtcttctgcacaaggaaggtgagcaccagcatggacagcaccgtgaccagcagggtgatgacagaggtgaggcccagcggcacagagccgatgtggaaggtctggttggtgtagtaggccggaatgacctttgcaccggaaccaaggatcagctctgcagtgtactccaggaagaaggacacgccgattgccgtaatcagcagggagatacggggtgcgttgcgcagcggggtgtaggcgatcttctcgatcacaacgcccagcagcgtgcaggtgatgatggtggcgcacacagcagtgaccgggccaaggcccagctgattcatcacgaaccaggacatgtacgcaccaaccataatgacatcgccatgggcaaagttcagcagcaggatgatgccgtacaccatgctgtaacccagtgcgatcagtgcatagatgctgccaagggacaggccgttgatcagctggctaaaaaacactgtcatggactgatacttcctttctttgcggcggaggacccgccttttgggatacacttttttaccaaaaaagcggagacagccgagcaaaacctgttccggcggtctccgcaatgggtcatttatttctgagtactgccttcatgccgcacaccggtgcgcaggatcaaagcagatcagaacatttccttcagaacgggggttgcaccgtcgaagcacaggatagcggtctgcttgacggggttgtggtgctcatcaaaggtgaaggtgccggtgatgccgtcaatggtgccgcctgcgatggcatcgatgacggcctgcttatagtcgtcatcaccagcggtcaggccggcatcctcagcagcctgaatgccgtagacaacggtcatggcagcatcgtagcccagaggagcgaagccgttggggtactcctcaccgtactcagccttgtatgcgttctcaaagtcggggttggagccctttgcgtagtttgcgcagaagtaggcgtccttcagctgggcgtccgttgcgtagccttccagaccatcccagccgtcgccgcccaggaagggaactgccagaccgatgctctcagcctgagccaggatctgaccgacttcctgatagtagttggggcagaacaccacttcgggagccttgcccagaatggtggtcagctgggtcttgtagtctacatcgccctcagagtaggtctcctgatcgacgatggtgccgcccaggctctcgaactcgttgacgaagttctctgccagaccctcgttgtagtcagcgcccttctggaagatgacggctgccttggtgtagcccaaccgctggtaagcgtagtcagccatcttgatgccctggaacgggtcggtgaaggttgcgcggaacacattctcgttcacggtgtcggtctcggcatcgtaggtgacagcctcagcggtagcggaagcggtgaccatgggcatgttgtagtctgcgctctcggcagcaactgccagagtcggggtggtggtaacgtcgcccaccagagcggtgatgccctgatcgcacatcttggtgaagcaggtaacagcctgagttgcatcgccctgctcatccatggcgatgatctccagctgcttgccgttgatgccgcccttttcgttgacctgcttcaggtacagggtagcgccgttgacaacggcctgaccgtaaacggaaacatcaccggtcagaggtccaagaacgcccaccttgatggtgtcgccggaagcagcggcaccagaagctgcggtagaggcggaagcagcagtgctgttggaagaaccgccgcatgcagtcagaacgccggctgcagcaacaacacctgcagcggccaagaaattacgacgagaaatcatctttttcatagtgaatatcctccttaggagcattcgtgcttcagtataaaaacggaagcaaggccctctttccctcaaagcgaccttgcttcgttatcaatattatagacctgtgagccaaaatccgcaattcacaaaccgtccatactttcaggggcattttgtggactttgttgccaaaatagccaaaagcagtgggcctgttttgtgcactatttcaattgcttcattttgtttgtgtgtcaggtgaacacaattcacaagttgcaaaagggttacagggtctccatttcggcatctgcggcgaactcggcctctgcacgtgcctcggcagctttgccctctgcttccgctttggccggagactctgcaaggaccttgcggatggcggtgaagtagaacaccagcgacaggccggtgccgatgcaccagcccacgggccatgccatccagatgcccgtgctgcccagagcagtgctgctcagcacaatggcgatgcccacgcgcaggatcaggtcggagaaggtggcaatcataaagcgcaccatcatgccgcagccgcgcaggatgccgtcagtgaccagcttgagcgacaccacaaaatagaagggagacaggatgcgcaggaacagcataccggtgtcgatggccggaccctgcgggtcattcatgaacagcagcagcaggaagcggccgaagaagaagtacaggagcacgatgggcacgcagataatccacaccagattgcggcctgcgccaaagcccttgtgcacacggtccatcttgcccgcgcccatgttctgggaggtgtagttggagatgccgttgcccagcgtggtaaaggaagtgatgaccatgttgttcagcttgacggctgcagagtagcctgcaatgacgctggcaccaaaggtgttgatgacgctctgcaggatgatgttgcccacagagacgaagctctgctgcaggatgctgggaatggctactacggccaccttgcccagcatgttccaggagaacagcacgaccttgttcttagatttgaaggcgctgatgcggcggaacaccaccaccatggccagcacgcagctcacaccctggcacaggaaggtggcccatgccacaccggctacgcccatcttgagaccggccacgaacaggatgtccacgccgatgttggacagggacgagactgccagaaaataaaagggcgttttgctgtcgcccagagcggagaagatgccggtggcgatgttgtagaagaacatgaagggcaggcccagcacgtagatatccagatacagcgaagaatccgcaaggatctcctccggggtgttgatgagctccagcaggctgtggcagcccacaaggccaatcagcatcagcacggcgcacagcacggcagagccgatcagggaagtgtagaccgaagtcttcatctcatcgtagtcctttgcgccaaagtagcgggacacgatgaccgagcagccaatgttgcagccaaaggcaaatgcaatgaagatcagggtgatctcgtagctgttgcccacagcagccagtgcattctcgccgatgaacttgcctgcaacaaggctgtcggcaatgttgtacagctgctggaagatgatgctgccgaacatgggcaggcagaactgccacaaaacctgtgacggcttgccgaccgtcagatccttattcatatagaaaatcctcctctatctaccataaagaaacatattagaatcaaaaacagtatagagtcatcctgacaaaaagtaaagaaaaattttagtatatctgccatatgaaattaacatgataggcatgacgcatccccgctgctgccagtgggcagactgtaaagaccagctgtttcctgctttgccggaatgttctgccccatcagctgccgttttttgccccttaaaaagtttacatccacaaacatgcgcatcggctcttgcaccgggccggaaagcgtggtaggatactattggttagttagaaataactatcataattggccgtcacccgtctgcccgccccgggcagcacagggaaggaaatgatattcaggaggttttcgagatgaacgatctggaaattgaatctgttgttggccgcgaaattctggactcccgcggcaaccccaccgtagaagcggagatcactctggccgacggcattgtggcacgcggctgcgcaccttccggcgcatccactggtgagtttgaagctctggagctgcgggacggcgacaagggccgctatctgggcaagggcgtgaccaaggctgttgagaacatcaacaccgtcattgctgatgctgttgtgggcatggatgcctccgacatctacgccatcgacgctgccatgatcaaggccgacggcaccaaagataaatccaatctgggcgcaaacgccattctggccgtgtccattgccgcctgccgtgcagccgctgcttctctggatatgccgctgtaccgctttctgggcggcgtaaacggcaaccgtctgcccgtgcccatgatgaacattttgaacggcggcgcacacgccaccaacaccgtggatacgcaggagttcatgatcatgcccgtgggcgcgccctccttcaaggaagctttgcgctggtgcgcggaggtattccacgctctggcttccatcctgaaggccaaggggctggctacctccgtgggcgatgagggcggctttgcccccaatctgtccagcgacgaggagaccattgagaccattctggccgccatcgaaaaggccggttacgtgcccggcaaggacttcatgctggctatggatgccgcgtcctccgagtggaagagccccaagggcaagggcttctacaagctgcccaaggccggcaccgagttcacctccagcgagctgatcgcacactggaagagtctggtggaaaagtaccccatcatctccatcgaggacggcctggatgaagaggactgggaaggctggcaggagatgacccgcgagttgggcggcaaggtccagctggtgggcgacgacctctttgtgaccaacaccgagcgtctggccaagggcatcgggctgggtgcaggcaacgcgatcctgatcaagctgaaccagatcggttctgtttccgagacgctggaggccatcaagatggcccacaaggccggttacaccgccatcagctctcaccgctccggcgagaccgaggacaccaccattgccgatctggccgtggcgctgaacacctgccagatcaagaccggtgctcccagccgtaccgagcgtgttgcaaagtacaaccagctgctgcgcattgaggagcagctgggcggcagcgccgtttaccctggcatggcagctttcaacgtaaagcgctgaagctgttgaaaaccaattgatcttccggcacccgtactgcttttgcagcggcacgggtgtcgttttgttttctcccaattttttcctgcaatccgctgctctgcccagccgtattccatgcatgccgggcattttggcccgaaattgcaaaaaaggagcaaaacattcatgttatctactctgatctctctgtacaagctgctgggcaccggcgattttgtaaaagtgctgctgatcctgctgaaggggcttttcggctgatgcaaagccgcccttctcactgcggaaacgggactgccttaccggcagcccctttttttgccttctcactttactttcttaaaaaaatatgccataatgaaaccagtattttccggttcaaaagccgtgccctgtactgggaaatcagggccagaatccaacagaagaggggtattttgttatgagcaaaaccatcatcccggcaaactatacgcccgcgctgaacctgtatgacacgcagcgcgccattggtacggtcaagcgtctgtttgccgacaccctgtgcgccacactgaacctgtaccgcgtgtctgctccgctgtttctggaagcatccaccggtctgaacgacgacctgaacggtgtcgagcgcaaggtcacctttgatatcaaggaaagcggcattgaggcacaggtggtgcagtcactggcaaagtggaagcgcaaggccctgaaggactacgatttccgtgtgggcaagggcctgtactgcgatatgaatgcgatccgccgcgacgaagatctggacaacctgcactccatctatgtggaccagtgggactgggaaaaggtgatccgtctggaagaccgcaacgaggcttacctcaagagcgtggtgcgctccatcgtgtccgctgtctgcgccaccgagatgaacctgcacgccatgttcccccagctgcaggagctgccgctgcacagccccaacgtcaccttcatcaccacgcaggagctggaggaccagtacccggacctgactccgaaggagcgtgagaacgcctttgtgaaggagcacggcaccaccttcctgatgaagatcggcgctccgctgaagagcggtaagccccatgacggccgtgcccccgactatgacgactgggatctgaacggcgatctgctgttctggaacgacccgctgcagtgcagctatgagctgagcagcatgggcatccgcgtcagccctgaaagcatggacaagcagctgaccatggctggctgcgacgaccgccgcgccctgcccttccacaaggccgtactgaacggcgagctgccttactccatcggcggcggcatcggccagagccgcctgtgcatgctgctgctgggcagcgcccacattggcgaagtgcaggccagcgtctgggacgcagccacccgcgaagcctgcgccaaggcaggcatcccgctgctgtaagcaggttttccacacaaagattcaaaaggcaggataccaccctcatggtgataccctgcctttgttcgttttttgcctgtatccggggagaaattgttcgagtcctgtaccaccaccaaacaaaaaatccccagacgaatgtctgaggattttttgtggtggagaattaggaactcgaactccagaccccctgcgtgggcagcagcgtgccgcttgcgccggtgacgacagccaccttgccggtgagatcagtattcagttccatacagcgtctcagctccggtattccgccggcagctgatccatggtctgccacttgtccatggcttcttccagcttcatgcccttggccactgcatcgcggcggcaggcgttgaccgcctggatctccttcatcttggcaccggtcagggtgtagcccttcatggcgatgagggtagccgcccatgccaccatggggatgatgcagaacagcacgatgaccacccagttcatgcccggggtgtaggggtcatactgggtgggcaggctctgcaggcccacaaagctgaccgcgatgcccacaacggtagcggacaggctggacaccagcttgtccaccagactgaacagggtgcccatgatgccggggatatacttgccgctgcggtaggtctcgtagtcggagcagtcggccaccatggggatgggcatatcggcggtggcgtagtaggcaccgtagccgatgccgaagaaagcgatgaacaggatggtgtacaggttgatggaaaggccgttctcgcccagaatggacagggtgaaggcatcgccgcggccccagagcagcagcagcaccagcacgcccacatagcacaccagcgccacgctgacgtacttcatcaggctggccttctggccctccttctggctggtgcggacggtgagcaggaagaagggcacgctgaacacatagcccagcaccatcatgggcaggtacaggccgtcgtagttgcccatcatgcagccgtacagcatgcacagcacggtggtgttggtggcgatggaaagcgccagcttgcagcccgcaccggccaccatcagccgctgcatgggatcattgtttttgatgatctggatgtactcgctcactttgatcttctcggtcttttcgccgccgatgccaaagtacttgggctggtccttctcccagatgccgatgacggccagcagggtgagcaggatggagatgacgatgcccaccggagccagcgtgcggaagaacccggcggaagcgtagccgccctcatagttcttggcaaggatgggggcaaagaactgcatggcacccatgcccagcaggctgcccaccgtgttgaagatggtaaacagggggcgctgcttggggtcattggtcagcacggtctggccggagcgggtgcagctggtctggaaggtgtagccgatgacccacacggcatacagggcaacgaacgcagcgtagcgcagccccatggcactggcggggatgagcggggtgaggcagtacagcaccagaatgcttgctgccatgatgaggttgccgatgaccatgaagggccggaacttgccgaacctgccgttggtgcggtccatgagggcaccaatgatggggtcggtgacggcatcgaacaggcgcatgccggtgaccatcaccgaagcaaacagcatgctcagggccagcactttgctgccgaaggtcgcgatgtaggaaagcaccagcacatagtacacgttggtcgcgccgttgttcagcggaaacagcaccagctggtaggttttggcgcggttcacactcgacgccgttgttttttgttcgcccattgcggtctctccttttgtctttgataaaaagcggcagcccgccccgccttcggggcaggctgccgtaacatggggtcagggattgtgcagaccggaattacttctggtcaacagcaggagcggtgtctgccagctccttcttgcgcttgagggccttgctcagctgccatgcgcacagcacggtcagcacagccagcacggcgatcagtgcatagatcgcagtctgccaccagggcagcacggtcttcagggtatcgcttgcagaccagccgttcatggcgttggagttgaccacggtgtacaggatgtgatgcattgcattgcgcatctgggtcacgatgtaggcatcgttctcgtagttggcagccttggtggtgtggatcttgggcatcgggctgtcccagatgtcggaaccggcgatcaggccgtccaccagatccatgtactggctggagccggagaagtcagtgatgcacatgccgcgcatgcccagctcctcgcgcaggaagccgttcagcaggttggagttggcaccgcaccaggttgcgccccagcggttgaagccggtcatcacgcaccatgcgccgccatccgtgatggccttatcggccacttccagatagatctcgcgggcggtctgttcgttcagccaggtgttgacaccacggcggctggtctcggagtcgttcagggcaacgtgcttcaggtagacatacacgcccttggactggatgccctgcacctcggcagcgcagatggtgccggccacaaagggatcctcggcgtagtactcgaagttacggccggagtaggcggtacggtgcatgttgatgccggggccgtacaggccggagtaacccattgccaggcagtcctcaccgatgcacttgcccacttcgttgatcaggtccacattgaaggtggcagccatgacatcctcggaggtgtagcacatcgcggatgcaccgccggtcagggcagcggtcaggccctgcgggccgttctcgtccttggtagcggtcttgccgatggaggcagccgctgcagtgttgtggaagcccagagtgatggtgttgaccatctcatcgaaggtcagctgatccagcagggtctcccactggggatcgtcgaagcccttgccgatcatggaagcgagggtcaggccgttcttggcacccagagtgggcatctcgacgctgtcggcctcggtgccgtcgtactgggtaaaggccagatctgcagccagcgtttcgttggcggtcagggcagcaggctgggtgggaaccgtgccggtccagtcggagcggctcatccaggtcacgctgccgggagcatcgctgctcttgttggggtcggactcatcgaacaggttggtgatggcagtgccgttggcgctggctgcataggtggtggtatccagtgcctcgttggtccacttccagaccagagaagcatcgccgtcctcggtcatgcggccattggtgccggccacggtgtagcccttggcagcaaggatgttgttgacagcgttgtgagaatcggtagcagcggtgaagtagtagtcaccggcatccagaatgtaggtcttggcgttgtttgcgtcgtaggtgcgcagctcgctcttcttcacggtgatggtcacatcctcggaagcgccgggagccagcacatcggttttggcaaagccgcacagctctgcagcggccttctcgatgccgtttgccttgtcgtagtcggtgtagggagactggaagtagacctgcacggtctccttgccggaataggtcttgccggtgttggtgaccttcagggtgacggtgaaggcatcgtcagactcggtcacattgaagttgctgtaagcgaaggtggtgtagctgtcgccgtagccgaagggataggcaacggtagtggcccagtcatagtcgcctgccttggcagtgcccatgaccacatcctcgtaacgagtctcgaagtagcggtagcccagatagatgccttcctgatagacgctgtacatgccctgcacgtccgcaccctcggtcagcaggttgtactctgctgcgttggggtaggcctgggtgtagaagttgtacatggcagggtttgccagattgtcgtacaggtaggtgtccaccagagagccggagggggtcacagtgccggcgagcagctggcccacaccgttgatgccggtctggcccacatcgccgatccacatggcggcatcaatgccgtagtcctcgccgcagatggcagggttgagaaagtccatctccagtgcgttggagctgttgatcaggacgacgatggacttgaaggtgccgttgtctttcagtgccttcaggttcttcagcagctcgatctcctcggcggacagctccagatagttgccgctgccctcggaaccggagatccagctgtcgttggtgccgttggcaccgctgggcaggtctgcgccctcgccgccggagcgggagaacaccacgatggcagcatcgccgtactcggcaaagctactctcggcgctggacagtgcgctccacggagcttcattgacagcgtactgggtgtttgcttccagcgtatccgagatggaggccggggtaatgcggctgtagttcttcatcatgctgtcggacttgtacagatcccacagcgtctggttgacctgaatgccctgagcttccagtgcttccttcaggttgggggccttgctggtatccacggaaccggagccggtgccgccgtacatcaggtccacagagccatggccgaacaggctgaccttggcgctgtctgccagcggcagggcagcgttgtcgttcttcagcagggcagcgccctcggcctcaacggtggcgcacagctctgcttcgtaagcctcgcgctcttcgtcggaagcaaagcccgctttgaagtattcggtatcttccgtagtgttgcccttgatgatcttataggtcgatgcattcagagcaacgttcagggtggtggcgtactgatttgcgatcatgttgcccacgatggcggcgatggtcaaaattgccgtcagtgcagtgagtaccgaccacaaacgtactttggatttcttggtattcattggttctcctccttttcatttataacaaccgccagacagcggaatgtccttgtttatacccagtttgcactcttggacttggtcttcaccagcttgtagctggggttcggctctgccacattgcagaaggatgcggtgtcgatgcagtcgcctgcaacggccttcagctccaccttgccatgcagcggcacgcggaacctgaagatatgctcgccggtctgctctgccagctttttgccgtccgcatacagggcgacggtgttctggttggagtagaccttgacctcgatctccttctcggtacggtcggtgaaccgcttggagcagatgtggacgaagttttcctcgctccaccatgctttatagaggtagaagctgtcctttttggtctttcggtcaaaggtgacaagacccttgtggttcatgcccggctcgccgccctgatcccgggcatcggctgcaaaatcgaacatgttccacacatgggtcgcccacagccacgggtggcggtcaaagcacttcagcatatactcgtggtacttggcctgatattcctcggtgtggtcgccccggcgggggtgggcgctgtggaggttgggcatgccctcggcaccgtattcggaaaagcccagcggacggttggggtacaccagatggaaaaagtccatccacaggtcgttcaggaacaggcccggcacataccagcccagatacaggttccagctgaccagatcggtgatgtgcgccaccgggttgaaggggccgcacatggcgtagcaggccagcgtggtcaggcgagtggggtccatcttgtggcacagctcgttgagcacccgatggttgtccagcatatcggccttatccttagtggaaatggtgatctcgttggacacgccccagcagacgatggaggggtggttgtagttctggtggatgagctccttcatctggctgacggtattttcccggccattgggcagatgctcggaaatgtagggaatctctgcccagaccaccatgccgtactggtcgcacaggtcgtagaaatactggtcgtgctggtagtgggccagccggacggtgtttgcacccagttcccggatcagcgccatgtcctcatcgtgcatctcccgggtgatggcgttgcccagacccttgcggtcctgatggcgggacacaccgtgaaggggatagggcctgccgttgaggaaaaagcccttctttgcatccacagagaagctgcgcaggcccaccttggtggtcacttcatccaccggcttgccgtcctgcagcaagcggacgacacaggtgtacaggtaggggtccttcacgccgttccacaggtggggagcatccagatggaggaaagcattttcgccttcgccctttgcagcggtgcggccctcggcatccagcagctccaccgtcacggtgccgctgccttccaccagcgtttccacccggatgtcggcgctgccctctttcagggtgggggtgatcttcacgccggtatcgccaaagtgtcccagtgcgatgtggtttttgttcaccaccagcaggctcacattccggtagatgccgccgtagaaggtgaagtctgctttctgggggtaaacgcggtcgttgacgctgttgtccacccgcaccgtgagctggttctctgcctgcagcagttccgtgacctctgcccggaaggtggagtagccgccgtcatgggtgcagagctgctgaccgttcagcagcacggcggcgctggcgttgacaccctcgaactgcagccacacctgctgctgtgccgggtcgtacaccggtgctgcaaagcgggtgcagtaggtgcagcagccccgccagtaatcgttgccgccgtcctgaccgtccctggcgttccatgtatggggcagctctacggcggtggtaacgccgttcgggccggtgaactgccagtccttcatgagctttgcaatactacgcatccgattcctcctgtttttgctgtggtacagtgatttttttcttgttctctgttctttgtcattattttatcagagtggccgtatttcgcaagatgcgtgcgaaaatcggtcgttttgcgtgcgcattcggttttggactgccaaatgtgaactgatatatttgtaagtttttcacaagcagatgtatccaacaaaccgcaaaaagaaaaccgccgcagtccttccgtttccggaacttctgcggcggctgccgttttcttaacttatttttgcagcggaaagatgatcttttccgcaaaaaactcgccctgctcttccaaggtcaaagtgcctttgtacttctgcacgatgcgccggatcaccttcagctcgtattgtgcagagcggcttgcctgctgttccggcggacgcagcgggctgatgatgttcaccaccacaaaaccctgccgcacacagaccagcagatcgatgaccctgcactccggccgggagatctgcacggcgctttccacggcgtgatccagcgcattggcaaacaatgcgtacagatcccccgcttcaaaaaagcccagacagctgccgtttgccacggcattcagctggatgccccgggactcgcacagcaggctcttctcggtcagcaccacatccagcacctcgttgccggtgttgcggttcgcgtcatacaggcgggccgcgcgctcggcctcatcaatgcgctcctgtggtacctcttcgggcgacagcttgcggagattggcgatctgcactttcagctcatggcagcgcttgttgatgatctgcacgttctgccgggccacctgatactgctgacgctgacgctcgtacagcagattcagttcactcatctctttttccatggcagacttcttgaacagctcgctctggaaatacagcagggtgataaaatagaactgcccgatcagaatggtaacggtaagactcagcggagtctgttcggcgcgggcattgtccagcacggcggcctgcaccatgaacaggatgccaatgaagaacgcgctgaacagctgccggggcccgatgttgtattctcctttataaggaagctgccgtgccagcaggatgtacaccaccgcaaagaataccgctccggacagcagctgtaccagaaccgcccaaggggaagccatgttcagcgggtgtccataccgggtaaactgcagctccagaaagcaccagctctcgtaggcgcactgcgcgatgagcaggctccatactgcgcagtacagggcaccttttttattgatatccgtacacagatagatcatcccgcccagcagcgcaaaaaaggagatgtaaagtactagcagcaggagctgctgctgccacagtgttgtggactgtgccagagggtccagcagctgcgccagcaaaagcagcgggagcagcatcccgcaggcgcgcgcccaaaaatgggagcgatgccgcaaaggcagacaaaagaccagcgccgcgccccagcgcagcagcgcccggagcaggctgttcagcagcgatgtggtcacagcacacctcccatgtaggacgctactgcggtaagaaaggccgtacgctgccgtcggctgatctccagccggtcgtttttcacaagggcaaagtcgttttcaatgcccttgacgtaggccagattgaccagatagcattggttgcagcggacaaaatgatactcggcaagctgcttttcggcactttgcaggctggcgcgtgccgcgaactcgcctttggaggtgtggtagtacagcatccggctgtgggtctccagataatagatatcagcggtgtccagcagctggatgccgccgcccgccagctgcagcaccacctgcccgcctctgcgccgctgcacccgctggatggcgcgggaaagcttggtgcagaactgataatagttcaccggcttcagcacataatccagtgcatctacctcgtagccccggatggcatactgtgccatgttggtcacaaagaccagcaccacatccgcatccacggcccggatggcttcggccgctccaaaaccgtccagccgtggcatctccacatccataaaaataatgtcgaaccccggcgtatagtgctctgcgatctcggcaccgtctgtgatgagactgatctccacctgcaggccctgctcctgcgcatattgccggacgaaccggttcaggctttcccgtgtttcttcctgatcctctacgatcgcaattttgaacatcctgcacccaccttctcactgcgtctgatcgccgtatagctctttttattgaaacacacttttctatgaaatgcaatggaaaaccttgcagggaaaacagatgcggttctcgtcctgctctgacgtgggttagtggatgacgcaacaaa

SEQ ID NO: 1120 - DNA, 1256 bp, Unknown
  gut microbiota DNA sequence
gttcaatcgtccggtacttcacaaaaggtacttctgtaactcgcagcccggtcataacgaagacggggtggctgaaatgccaatggtgcggtgcaagcccgccgccggacgattccccactcctagggaagtcgaggaccaatatgggagaccttaacttattaacgcagctgagcacttgtttcgtgcttttctgcgactggagaattggaacccaccaattctcgttacatactctttgttcctgatttctgcttcagctggaggtgatcaacatttcagaatatcttaccacgcaaactctgctgccgccgtttctcccatacccacgcttccttttggaacttgacctgagccagactgcaaaaatgacttatgtgctgctgcttgaccgtgccacgctctcgcagaaaaatctctggatagatgaacgtggtttcgtgtttgtcatttttacgatttgctctttggctgagcagctagggcgcagcacggtcagtgtttccagtgcgcttaaggaattgaacgctgcaggattgattgagcgcagacgaacgcggttttcttcgcccaatcacatctttgtgaaaattccaaatgttgaatagttctgcgtttttcacgattcaagaaccgccaaaatcacgattctgtgatgcagattcttaatggcatctgcaaaagagatttttcctatgcagtatagcagcctttaagactgtatcaaagaaaactttcacctaaccaacgtaataaaacaaaaagagaaaaacgaatagaatccatccattcctttccgtatttgcgccacatgaatgaggaggtctgcccttgaacaaagaaaaatctgagaagaagcctaccacacgcaaacgtgcgccgagaagtccgaagtccgtgcgcctgatcgtggaacgccattatatcggcaatgtgccgatgaatacgctttttcagcggcttgcggaagaagaaattcgtaaaactgccgaatcgtatctcgccgctggctaattggacgttttactgcggaaaagggcttgcatcatcacgcagcatccgctacaatgtgattgatgaggtctcttttccattatggaggtacgcatggaaaaggacaaaaaagtaactgctttatactgccggctgtcaaaagatgacggttcaaacagcgaaagcctgagcatccgcactcaaaaggcgatgcttatggagtatgccacacgcaacggtttcgggaattgccagtactatgt

SEQ ID NO: 1121 - DNA, 16562 bp, Unknown
  gut microbiota DNA sequence
cagaaggatggcaacaccctgaccgtgaagcgtatgctggaggacggctacatgatggtcaaggtgcagactccctgcctgctgacctgcatcaaggagctgaaccagccccgttacatgagcgtgaacggcatcttcacctgctacgacaagccgatggaagtgttcgattacaacgcactgaaggacgatccgctgatcgaggtcgataccattggtctgaagggttctccgacgaacgtctttaagtccttcactcctccgcagaagggcgcaggcaccatgctcaagggcgacgatactgccgcacagctggctggtatcctggccaagaagcacctgatctgatgaaaggagcataggattacaatggctgattttaacgaatacaaaggcgtatgggtcttctgcgagcagcgccagggcgcattgatgcccactgatttcgagctggtgagcgaggcccgcaagctggctgatgagctgggctgcgaggtcaccggtctgctgctgggcgacaacgtggaaggcattgccaaggagctgggcggctatggtgccgataaggtcatggtctgcgacagccccctgctgaaggattacaccaccgatgcatacgctaaggtcgtgtgcgacatggtcaacgagtacaagcccgaagtcctgctgatcggtgcaaccaacatcggccgcgatctgggcccccgctgcgcagctcgtctgcacaccggcctgaccgctgatgctacccatctggacatcgacactgcaaagtacatcgatttcctgaaggagagctccaccatcgacctgtccaagcagaagttcgatatggaagaccgcaacctgaagatgacccgtcctgcattcggcggccatctgatggctaccatcatctgcccccgcttccgtccgcagatgtccaccgtgcgtcccggcgttatgaagaaggctcccttcgatcaggccaaggctgatgcctgccagatcgtgaagcccgcattcgctctggctgctgaggacatcaagaccgaggtcctgagcgttgagaaggccgctgaaaagctggtcgatctgatcggcgcagacgtgatcgtctctgttggccgcggcatcagcaaggatgtcaacaagggcattgagctggctgagcagctggctgccgctttgggcggcggcgttgtgggcgcttcccgtgccgtcaccgatgcaggctggatgactgctgaccatcaggttggccagaccggcaagaccgtgcatcccaagatctatgttgctctgggtatctccggcgctatccagcacaccgctggtatgcaggactccgagtgcatcattgctgtcaacaagaatgagggtgcacccatcttcggcgtggctgactacggcatcgtgggcgatctgttcaaggtcgtgcccgaactgatcaagcagatcgaggcagcaaaggctgctcagtgatcgactgacgcgagatctttttatagcatagcctgaattgtgggagggcggctcttcggagccgctcttctttttatgtaaggaatacggcacagcacagatggccctgaaaaggctgcctgtgctgttttttgttgcagaaagtacagccaaaggccggctgcagcccagaaaagggctgcgggatgggaggggagtggaacggaaaagcgcacacaaaagtctgttacactttgaaatatgcatataaacgaataaacatacagaaaaatgcatgaaaaacactgcagaaaaagtgcagaaaaataaaatgcaacacgttaagtgtgacgaaacaatcctgaaaacggtgaagcgcaacacagacgtaacaaatttacggtatcttggatgaacctgttgcgcttgtgaaacgttttcggaacgggaaattttgatttttttgcattttctctcaaaaaatcgacagaaaccccttgacgatgagatgctattgtgatacttttgttgcacaaaagcaacacatttgaaacggaagagttgcaaatgtgttgcagtacgcattcacatgaatgcaaaaaagcttttatatacaaaagcttacggaggatgtcttatgaaactcgagatgcgcaccctgaaaaatatcgcagcagcagctatgactctggctgtggtttttggtgctgcatctctcaaacccgttactgcaaacgcagctgaggcttcgggttctgcctccatcgaagaagaaaattcctacatcagctttcaggacgaagcttatcagaacgagttcctgcgccgcgtaaacaacgagcgcgcaaaggctggcctgaagcccgttcagctgggcgacagcagccacaatagtgccgctcaggagcgcgctaaggaactggcctcttcttattcctacgttcgtcccaatggccagcgcgattttaccatcttcgcagagaatggcatcgaagatgtgtcgattggcgaggactacatggcgggcgtttccacccccgatgcagcggtggatcagtggatgaacattgattttacccgtgagcgcatcctgaacgcagacgcgaccaccatgagcgtgggccactacgaaggcggcgtttacaacaactactgggtgctgatcttctcttgccccgaaaactcttacaccagcaactaccgtcaggaagttctgaatctggtcaatgccgagcgtgcaaagtacggcctgcagcccctggtcatgggcgatgcaaagctcactgcagctgctcagcagcgcgccgaagagatcgcaaccgtcaattctcacgttcgtcccaatggtaccaagtggtacactgttctcagcgagtacggcgtgacggatgccgctgctggcgagaatgccgcatggggcagcgtttctcctgaagaagtcgtgaatgcctggatgaactccgaaggccatcgcgcaaacattctggatcccgaagctcgtgcaatgggtgttggctactactacaacagctccagcacttggggccatcagtggatccagctctttacgaagtgatcatctgctttcttctaacaaaagatcggctgagctgcaaggcttggccgatttttttgttgcacttttttctggcagaggacatgcgggcagcagtaccgggagctggccttgacacaaaaacgtatgcggcagtggttgcacaacggacgatttatgttatacttgttttgaataacatgcaggaggaaccacagtggaggattaccgcaccatccatggcacggccacaggagaatacgaagaaaagaagagccgcttcattgcggcgctgtcatttgcggacagcgaggaagctgccgttgcatttctggaacaggtgcgtgcggccaaccgcaccgcccgccacaatgtgtatgcctaccgcctgagggaaggcaaccgggaacgctattcagatgatggtgaaccggccaagacggcgggcacaccagcgctggaggtgctgcagcacagcggcctgacggatctgatcgtggtggtgacccgttactttggcggcgtgctgctgggcaccggcggcttggtgcgtgcatacaccacggctacggcccgtgcactggaaaatgccgaggtggtcacggtgcgcagcgtggtggagctgcgcgtgacggtggattactccctttatgagcgtgcatcgctgctgatcgatgcggcgggagcaaaacaggccgcgccgcagttcacggatcgcgtggccctgtgctggcagatgccggaacacaccgaaggcccgctgctggaacagctgcgggagctgacgcgcggcagcgcgcaggtgacggtatccgacccgttctacgcaccgttctgaacccggcagcagcaaaaataaaaaagcaagcattattttgcgaaccgacaggctttttcccccttcgacaaagcgggtgtgctacaattgccgcagacgcagcaattgggatcggctgtgccgaaacagagagggggaatggcgacaaaaagggagggcgactttgtatggatgtacgtcagcgcacagaagagatcgaacatatgaccttcgcgccgtgggctaccttcagcgaccagagccgcggccgcatgctgccggaagagcaggacccgatccggccggtgttccagcgtgaccgtgaccgggtgctgcactgcaaggcattccgacggctcaaacaaaagacgcaggtgttcctctcgccggagggagacctgtaccgcacccgactgacccatacgctggaggtctcgcagatcgcgcggaccattgcccgcgccctgcggctgaacgaagatctgaccgaagcgatcagccttgcccatgatctgggccacacgccgtttggccatgccggggagcgcgcactgaatgagctgtgcccggacggcttcaagcactacatgcagagcctgcgtgtggtggacaagctggaaaaggacggccggggcctgaacctgacgtgggaggtgcgcaacggcatcgtgacccacacaaagggcatctgggcggcaacgccggaagggcgtatcgtgcgcatggcggatcagatcgcctatgtgaaccacgacattgaggacgcggtgcgcgccggtgtgctggacccagccaccctgccgaaggaatgcaccgccgtgctgggccagacaaaatctgcccgcatcaccaccatgatcaacagtatccttgccaacagcgatggggatgtgaaggtgggcgcagaggaaaacgaagccttccttgcgctgcgggatttcatgtatgccaccgtgtacgtggacaagaccgccaagcgggaagagcagaaggtggacaaggtgatcggggaactgtacgattactacctgaaccatgtggaccggatgtccaatttttacatccagctggcttatcaggagggcagagaacgcgcagtgactgattacatcagtggcatgagcgatgaatttgccatccgcacttttgaggaattgtttgtgccccggaagtggcatgtcctataaatccgaaaggtcgtttgaaagatccatgatcccacacgaatacattgaagaactgacccgccgcaccgacattgtggagctggtgggcagctatgtgcagctcaagcgcaagggacgtttgtatggcggcctgtgcccctttcacagcgaaaaaacgccctcattctacgtctacccggacacccagagcttttactgctttggctgcggcgcaggcggcgatgccattacctttacgaaaaagatcaacagcatcgattacccggaggccgttaagctgctggcagcgcgggccggtatgccggagccccaggaggacgacaaaacaggccggatgcgcagccgcatcctctccatgaacaaggaggcggcacggtttttccacgcctgcctgaactccaccgtggaggaagcccggcaggcccgtgcctactggcggcggcgcggtctggacgacaagacgatcgtccggttcgggctgggctatgcgcccaacgacggacaggcgctgtatcagttcctgcgcgataagggctacaatcagcaggagctggatgccagcggcctgttcaagcgcagtgcgtccggccgcatctactgcctgttctggaagcgggtgatgacccccatctttgacctgcgcggcaacattattgcgtttggtgggcgcgtgctggacgattccaaaccgaaatatgtcaacagcccggaaacgctggtgtaccacaaatcagagacggtgtttgcgctgcagatcgcaaagcgcagcgcggtgcgccggttcgtgctgtgcgagggctacatggacgtgatcagtatgcatcaggcaggcatcgacacagcagtgtgcgcctgcggcacggccctgaccccggagcaggtgcggctcatcagcgagtatgctgacgaggtgatcctgagctacgattcggacgaagcaggccagaaggccacgctgcgctcgctggaactgttccgcaacagcccggtaaaggtgggcgtgctgcagatccccggtgcaaaggacccggacgagtacatcaaaaagtatggcgcagagcgattcaaagccctgctggacggtgtgggcaatgcactggacttccggttgggccgtctgcgcagccagtacgatctggcacaggatgcccagcggctggaatacgtgaaggaagctgtgaatatgctagcagagcgctccaaccctaccgagcaggaagtgtatgcggggcgtctggctgaggagaccaacatctccaaaacagctatcatgacccagctggagaccgccgtgaagagggcgggcagcaagcaccgctgggagaaaaagcagcaggcgctcaagtccggtgagatgaatcagatcaacgtgccgtacagtgcgggcggcagtcaggcgctgggcattgccagcgcacagcagcgactgctggcggccatgctgcgggagccgcactatatcgatctggtgcaggggcagctgaccgcagaacagttcgtgctgccgcagcagaaggagctgtttgaagccatgctgcgctgccgacaggagggcattgagatcagcctgaccacgctgcgcgcttttgtaagcgaagaagcgctgaatgaactgagccatcttgcggcacaatacagcgatgtgaattgtacgccggatgatatccggctgtatctggaccgcattgcccgggggatgcccatggcaggcaaggcggcgcatatgtccaatgaggaactgagtgattacctccagtcgatgcgcgaaaagaagcagggaaatgtgcctgtagaagaatgatcccccgctttcccctccggctggagcaggagaggaaaggagcaggaaccatgcagaaattgtcgcaaacggaggaattggccagaacattggccgcgcgggcacgccaccatgccctgacaccggagcagatcagccgtgccatggacgaacaggattacgatgtggcgcagctggacgagctgtatacggcactggaggaccgcggcgtgcacctgaccgaagaggaagcggacctgcctgcgttggatgaaacgcagatcggcaggctggaacatgagctttcggcagagggggtggcgctggatgacccggtaaaggcctatttgaaggagatcggccgggtgccgctgctgacggcagaacaggaaacggagcttgcccgtgccgcgcaggccggggatgaggatgcccggcggaagctcagcgaagcgaacctgcggctggtggtgtcggtggcaaagcgctatgcagggcggggcctgccgtttctggatctcattcaggaaggcaatctcggtctgatgaaggcggcggaaaagtttgagccggagcgcggcttcaaattttccacctatgccacgtggtggatccgtcagtccatcacccgcgccattgcggatcaggggaggaccatccgcatcccggtgcaccttgtggagagcatcaaccgggtcaaaaagacgacgggtgacctgctgcggaaaaatggccgggagcctaccgcggaagagatcgctgttcagctggacatggagccggaccgtgtgcgggaattgctgcagctggcgcaggaccccatcagcttggaaacgccggtgggcgaggaagaggatgcccaccttgaagattttattcaggacgaggatgcaggtgtcccggtggatgaagccgggcggcagctgctgcggcgggaactgttcagcgtgctcaaaagcctgacgccgagggaagagcgggtgatcgcactgcgcttcgggctggaggatggccgggcgcacacgctggaagagctgggtaaggagttcaatgtgacccgggagcgggtgcggcagatcgaagccaaggccctgcgcaagctgcggcatcccagccgtgcaaaacgcctgcgggattatctggatgagtgaacgattataattgccgccgcttgcgctctggcaatattagagaaaacattatttttatatttgcagctcagaaaagcctgcgagcttttctgagctgctttttcacaaaaaagggccgcaagggaaaacgggcatatccgactgtaaaagtaatacgccaaaacacaagggcaaagatagacaaattgcacaaggggattatgaacaggaacgtgcaaaataaaaaaatcaagccctaaaacagcaaaacacaacacgctgccgggcgtgcgaaaatgaaagaaaaaataaatttgttttggcaaaaatctgaaaaatggcttgacagcaaggcttttagggtgtatactgcattagtatcacataatggactagtgcgccaaaaagaggaatacgcaggcggcggctggacgggtcaaaccgaaaagtttgtgaaaaacgccgaaaggttcccttcgacgcgggtcgaattatgtgtgtctgctcaaatttgacccgtgtatacgacatcccgtagagtataaaagtaaggagtggttgattttatgatgaaagtcaagcccgtaaagctcggcaaaaccgagcgcatgagcttctcccacatcgacgaagtcatcagtatgccgaacctgatcgaggtccagaagaactcttatcagtggttcctggacgagggcctgaaagaggtcttccacgatatcggcaccattgaggactacaccggcaatctggcactgagctttgtggacttccgcctggataaggagccgaagtacagcatcaaggagtgcaaggagcgcgacgtgacctatgcagcacccctgcgcgtcaccgcccgtctgctgaacaaggagaccggcgaagtgaaggatcaggagatcttcatgggcgatttcccgctgatgaccgatgccggcacctttgtgatcaacggtgcagagcgtgctatcgtcagccagctggtgcgttctcctggcgtgttctacggcgatgccaaggataaggtgggcaacgacctgtacagcgccaccatgaaccccaaccgcggtgcatggctggagtacgagaccgatgcttccgatgtgttctatgtccgtatcgataagaaccgcaagctgcctgtcaccgtgctgtgccgtgcactgggcctgtccaccaacgaggacatcctgaacttctttggcgacgatgagcgcatcctcgctactctggaaaaggataccaccaagaatcaggaagagggcctgctggaagtctaccgcaagctgcgccccggcgagcctcccacggtggagtctgctaccagccagatcaacatgctgttcttcgacccgcgccgttatgacctgtctcgtttcggccgttataagatgaacaagaagctgtctctggcacgccgcatcaccggtcaggtggctgctgagaatgtggtcgctccgctcaccggcgagatcctgatcgaggctggtgccaagatcacccgcgagctggctgagaaggctgacaatgccggtgtgaatctggtcgtgctgaagctcgacgatcccatgaaggaagagagccggaagatcaaggtcatcaccaacggctgtgtggatgcacagggcttcttctccttcgacgtgaaggagtgcggcatcaacgagcgctgctccttcgatgaaatcaagaagatcctcgacaccacctctgatgtggaagagcagaaggagatgctgcgccgcaaccacgaccagctgatcggccgcaccgttacggtcgccgatattctggcttccatcaactacctgaacggtctgggccacaatattggcaccaccgatgatatcgaccatctgggcaaccgccgcatccgcagcgtgggcgagctgctgcagaaccagttccgcatcggcttctcccgcatggagcgcgtcatccgtgagcgcatgaccctgcagagccaggatcagagcgtcatcactccgcaggccctcatcaacatccgtccggtggtggcagccatcaaggagttcttcggctcttctccgctgtcccagttcatggatcagaacaacccgctggctgagctgacccacaagcgccgcctgtctgctctgggccccggcggtctgagccgtgaccgcgcaggtttcgaggtccgcgacgttcactacagccactacggccgtatgtgccccatcgagactcctgaaggccccaacatcggtctgatctcctatctggcatcttacgccaagatcaacgagtacggcttcgtggaagctccgtaccgcaaggtcaagaagatctatgacgagaatggcaacctgaaggaacaggtcgtcaccgacgaggtcgagtatatgaccgctgatgtcgaggacgagtacgttgtggcacaggccaacgagccgctggatgagggcaagcacttcatccgtccccgtgtgtctgcccgccgccgcgacgagatccttgaaattgatgcagagaaagtcgattacatggacgtttctccgcgaatgatggtctctgttgctaccgcctgcatccccttcctggagaacgatgactgtaaccgtgctctgatgggttccaacatgcagcgtcaggcagtgcctctgatggtcacccagcagcccatcgttgctaccggtatggagtacaaggctgctaccgactccggcaccgctgttctggcaaagaatgacggtatcgttgagaagatggatgccgaccatgttgttgtgcgcaacaacaagggcgagctggaggattatcctctggtcaagttcgcacgctccaacgcaggtacctgcatcaaccagcgtcccatcgtggaggtcggcgagagcgtcaaggccggtcaggtgctggccgacggccctgcaatgcgcaacggcgaaatttctctgggtaagaacgctctgatcggcttcatgacctgggaaggctacaactacgaggatgccgttctgctgaacgagaagatcgtgcgcgaggacgtgtacacctccattcatattgaagagtacgagaccgagagccgcgacaccaagctgggacctgaagagatcacccgtgatatccccaacgtttctgaggatgcactgaaggatctggacgagcgcggcatcatccgtatcggtgctgaggtcaagagcggcgacattctggtcggtaaggtcaccccgaagggcgagaccgagctgaccgctgaagagcgcctgctgcgcgccatcttcggcgagaaggcacgcgaagtgcgtgatacttctctgcgcgtgccccatggtgcatacggcatcatcgtggacgtcaaggtgttcaccccggagaacagcgacgaactgcagcccggcgtacgcgaggtcgtccgctgctatattgcccagaagcgcaagatcagcgttggcgataagatggcaggccgtcacggcaacaagggtgtcgtttcccgcattctgccgcaggaggacatgccctacctgcccgacggcaccccgctggacatcgtgctgaaccctctgggcgtgccttcccgtatgaacatcggtcaggtgctggaagtcaacctgggctacgctgccaaggcatgcggcatcaaggtcatgactcccgtcttcgactctgctcgtgagaacgacatcggcgatacctttgataccgcccgcgagatgtggcatggcgagaatgctcctgcatatcccacgaagctccccaagatcatgggcgagaagggacacattatcgacttctccaagatcgagctggaccgcgatggcaagaccaccgtttacgatggccgcaccggcgaaaagttcgataaccgcgttaccgtcggttatatgtactacctgaagctgcatcacctggtcgatgataagatccatgcacgttctaccggcccctactctctggtcactcagcagcctctgggcggcaaggcccagttcggcggccagcgctttggcgaaatggaagtctgggcactggaagcttacggcgctgcttacactctgcaggagatcctgaccgtcaagtccgacgacgtggagggccgtgtgaagacctacgaggccatcgttaagggtgagccgatcccgcagcccggcatccccgagtccttccgcgttatgctgaaggaactgcagtctctgggtctggacgttgttgttcaggacaaggacggcaacgagatcgacatgcgtcagaatttcgacgacgaagagaccggctttgatatgcgcgatgttgccggcactgagaacgtcgtgcaggagagcgaactgctcaacgattataatattaaggatgccgatgccggtttcgatgatccttctgtgctggaggacaataactccggtgccgaagctcccgcttcttctgacgaagtagatttctgatcagacaaagaacacaagcctcaaaccccctgttccgcgtgctgcggcaggggagagggacctgtggtctgaacaagaaagccgcctgtatcatcgagacaactagagattaagaaagggttcgtttcatggaaaacaacgttttcgattccatcaagatcggccttgcctccccggagcagatccgcaactggagctacggcgaggtcaaaaagcctgagaccatcaactaccgtaccctgaagccggagcgcgacggcttgtactgtgagcgcatttttggacctaccaaggactgggagtgccactgcggtaagtataagcgcatccgctacaagggcaagatctgcgaccgctgcggcgttgaagtgaccaaggccaaggtccgccgtgagcgcatgggccacattgagctggccgctcccgtcagccacatctggtacttcaagggcatccccagccgcatcggcctgatgctggacatcagcccccgcctgctggagaaggtgctgtactttgcaagctatatcgttactgatccgggcgctacccgtctggaaaagaagcagctgctcaccgagagcgagtatcgtgagatgcgcgaccactacggtgatgagttcgaggctgctatgggcgctgaggccattcaggatctgctgaaggagatcgatctggatcagctgagtgaagagctgactgccgaggtggaaaagtcctccggccagaagcgcgtgcgcatcctcaagcgtctggaagtagttgaggcattccgcatttccggcaaccgtcctgaatggatggtcatggatgtgctgcctgttctgccgcctgacctgcgccccatggtccagctggacggcggccgttttgccacctccgacctgaacgacctgtaccgccgcgtgatcaaccgcaacaaccgtctgcgccgtctgctggagctgggcgctcccgacatcatcgtgcgcaacgagaagcgtatgctgcaggaagcagtggacagcctgatcgacaacggccgccgcggccgtccggtcaccggccccaacaaccgcgcactgaagagcctttccgatatgctgaagggcaagcagggccgcttccgtcagaacctgctgggcaagcgtgttgactactccggtcgttctgttatcgtcgtcggccctgagctgaagatggatcagtgcggtctgcccaaggaaatggctctggagctgttcaagccctttgtcatgaaggatctggtggagaagggcattgccaacaacatcaagtctgcccgcaagatggtggagcgcgctaagcccgaagtgtgggacagcctggagaccgtgatcaagggccaccccgttctgctgaaccgtgcacctaccctgcaccgtctgggcattcaggctttcaacccggtgctggtggagggccgtgccatcaagctgcacccgctggcatgtaccgcattcaacgccgacttcgacggtgaccagatggcagtccatctgcctctgggcgaggatgcctgccgtgaggccaagatgctgatgctggcttccggcaacctgctgaagccctctgacggcgcacctgttaccgtgcctacgcaggatatgatcctgggcagctactacctgaccaccgttcgtgaaaatgacgagggcgcaggcaaggtgttccgcgatgagaacgaagccctgatggcttatgcagagcacatcgttaccctgcacgcacccatcaaggtgcgccgcaccatgaccattgacggcgtggagcgcaccggtctggtggaaaccaccgtcggccgcatcatcttcaataaccctgttcctcagaatctgggttatatcgaccgtactgatcccgagcactggctggagtacgaggtcagcttccgcgtgaccaagaagactctgcccgacatcatttcccgctgcatgacccgcaacggcacccgcaagtgtgcaaagatgctggatgccatcaaggcgcagggctacaagtactccactctgtctgcaatctccgtcgctgtgtgcgacgctgtgatcccgccgcagaagcaggaactgatcgctgaggctgaccagcagatcgcaaaggtcggcaagctgttcaaccgcggcctgatctccgacaacgagcgttacaaccagaccatcgccatctggcaggctaccaccgataaggtctccaaggctctggcagacaacctgcccaaggacaacgagatctatatgatggctgactccggtgctcgtggttctatgaaccagatcaagcagctggccggtatgcgcggcctgctggcaaacaccgctggccacaccatcgagatgcccattcgtgccaactaccgtgaaggtctgaatattctggaatatttcgtttctgcccgtggtgcccgtaagggtctggccgataccgctctgcgtaccgctgactccggttacctgacccgccgcatggtcgatgtctctcaggatgtcattgtgcgcgagatcgactgtggcaccactgacggcctgtgggtgtctgagatccacgagggcaaggagaagatcgagagcttccgcgagcgcttgatcggccgctttgctgtgggcgatgtggtcaaccccgtcaccggcaaggtgatcgtgccggaaggcaagatgatcgacctgtacgatgcaaacgagatcgaggctgctggcattaccaagctgaagatccgcagcctgctgacctgccgtgcaaagaccggtgtctgcgcacgctgctatggttccgatatggcaaacggcgagccggtccgtctgggcgagtctgtcggcgttatcgccgcagagtccatcggcgagcctggtactcagctgaccatgcgtaccttccataccggcggtatcgcatctgctgaagatatcacgcagggtcttccccgtgttgaagagctgttcgagagccgccgtcccaagagcatggccatcatgagcgagatctctggtgtcgtttctcaggacgataccaagaagaatgtcgttatcaaggtgaccggcaaggacgagaacggtgccgaggtcgtaaagagctactccatcccgttcacccagcattcccgcgtgatgccgggtgaccgtgtggagaagggcgacatcatcactcgtgaaggtgttctgtatccgcaggatattctggcaatcaagggtctggaggatgtccagaactacctgatcaacgaagttcagaaggtctaccgtctgcagggcgttgagatcaacgataagcatatcgaagtcatcgtccgtcagatgtgccgcaaggtgcgcgtgactgattccggttcttccaacctgatcggcggtgcactggcaagccgtctggaagtggagagcatcaacgccgatctgcagcagcgcatcgacgctggtgaagagggcctgaagctggttgagtaccagcaggtgctgctgggcatcaccaaggctgctctggcaaacgactccttcctgtccgctgcatcctttcaggagaccacccgcgtgctgaccgaagctgccatcaagggcaaggttgacccgctggccggcctgaaggagaacgtcatcattggtaagctgatccccgcaggtaccggtctgccggaagtccgtgaggatctgaagaaccgtgaggctgagcgcgatgctgagatcgctgccgaacaggcagctgctgtacagtaagcaaagctccttcttctgaaataaaacaatggaccgctctgtgggcatccgcctgcagggcggtttttatatgcccggaaaagcggaaacaggggagaaaaccgtgcgttttacgtcgaaaaaatgctgaaagaaaaaatctggaataaatgcaaaaaactttgcaaaaactgttgacatccgcctgtaaagcgagtattatataactgttgcgcatccctcatggggatagtgcggcaaaaaagtcggaaaaaagtccgatgtgcattattaagaaaggagaaacaaaatgcctacttttaaccagcttgtacgcaagggccgtcaggttctggctaccaagagtaccgctcccgcactgctgaagagctacaattctcagaagaaacagtattctgatctgaacagcccccagaagcgtggtgtctgcactgctgttcgtaccatgacccccaagaagcccaactctgctctgcgtaaggttgctcgtgtccgcctcacgaatggtatcgaggtcacctcttacattcccggtatcgg

SEQ ID NO: 1122 - DNA, 72795 bp, Unknown
  gut microbiota DNA sequence
aggcttctgtcagaactccagcgccgggctcacctcattgcggcgctgtgcctgcacgatgcagtccttctccggcacaacgcccgccgcgcccagcgtgttgaacacggtctgcagggcaagcgcaggcgtgttgttctcctgcgaaagatggcacagcgcaaactttttgcacccttcctgaatgagttccagcagctttgccgagcactcgtcgttggaaaggtggccccgggtgctttcaatgcgtgcccgtaagtaataggggtacggcccgctgcgcagcatgtgcaggtcgtagttgctctccagtgccacaaggtcgcagccggaaagcgcctcgtgcaccggcggcgtgagcacaccaaggtcggttgcaatggtcatggtcttgccgtccggggtgtggatgcggtagcccacacagggcacatcgtggctggtgggaaagctctgcacaccaaacgcgcccacgtcctcttccctgccttccagctcgtgcagctcacagctggccggtacgatgccgttgctgtccagaaaatccagcgttgccgctgcaccgtacaccggcagcgtgttctttttgaggaaggtggaaagccccttcacatggtcgctgtgctcgtgggtgacaaggatgccgtcgcagtcactgacggcaaggcccagcgccttgagcgccgccgaggtagtgcgcacgcccttgcccatatccacaatgagataccgctgcccgcagcgcaccacactgctgttgccggaggaacccgaatataacgagatgaattctgccatgaaaaacctctgatacactcaaaaacagcccgccgcatatgcagcaggctgtttgctttttataagttacagtgcctgatccagtgcagcgggcatacgctccaccttgctgatgtctgcacccagaccgcgcagcttttccacgatattctcgtagccgcgctcgatgtggccgatctcctcgatctcactggtgccgtctgccatcagcgcagccaccaccatggcagcgcctgcacgcagatccagtgcgcgcagcggtgcaggggtgagcttatccacgccctcaaacacagccacctgaccgtccacctgcacgttggcacccatcttgcgcagctcgtccacatagcggaagcggttgtcccacacgctctcggtcacggtgctggtgcccttggccacgctcagcagcacgcccatcaggggctgcatgtcggtgggaaagccgggatgcggcatagtgttgatcttcagcggcagaatatcgccggtgcggcgcacacgcacagcatcgtcaaattcttccacctccacgcctgcacggcgcagcttttcggtaatgggttccagatgcttgggggtgacgttcttcaccagaacatcgccgccggtggcagcagcagccaccatgtagctgccagcctcgatctgatccgggatgatgctgtaggtgcagccgtgcatcttttccacgccgcgcaccttgatcacatcggtgcctgcgccgcggatgttcgcaccgcacatattcaggaagtttgccagatccaccacatggggttccttggcacagttttccagaatggtctggcccttggccattacagcggagagcataccgttcatggtagcgcccacgctgaccttatcaaagaagatgtgtgcaccgttcatctccttggcgcgcacgctgatcatgccgtagtccacgctgtcctctgcgcccagagcactgaacaccttcaggtgctggtcaatggggcgggggccgaggttgcagccgccgggcatggccacctgagccttgccaaaacgggacagcagtgcgcccagaaagtagtagctggcgcgcatctggcgggacaggtcgtccgggacgttggtgccggtcagatgggtggtgtcgatctcgtaggtgttgcggttgatcattttgatctgtgcgcccagaacgctgaggatcttcaggctcaccgccacatcactgatatccggcagattctcgatcacacagacatccgctgccagaatggttgcaggcaggacgcccaccgccgcatttttggcacccgaaatggtaacttcgccgtgcaggggcttgccgcccgtaataacaaatttctccaattttatgatctccttgtcggaggcccgcagccgcaggcctgttaaggttcctgaaagcattttccataaaagctgcctgatgtgcatgggccataaggccgtacacgtacagctatcttattatacacaactttcacaaaaaagcaaagccccgtttggtgttgttttattattttctgttttgcccattttcgcgcaggatattccaaaattttgatttctttttcaggtattttacaaaaaccagatacattgctgttgcgctttctttaccagatgtggtcttcgcaccgagtctcagtgatccagcccagctggtaggcagccaccagctgcttgaggtcgtgcacacgctcccgcagcacctcgccctcgtcggtgtcctccacgagaatgcgatgattttcggtttccagaatgtttttctgggaaatgatatccagattatccttcaccgctttctcggcactttcaaagggctgatgggtgcgcagggacatggtgcggctggaatacaccagcgtgtagcccgcaatgccggtcttttcgtggtaggcacggcagaaaccgccgtcgatcaccaccagccgtccgccgcccttgatggggctttcgccgttcttttcccgcaccggcacgtggccgttgacgatgtggctggcaccgggcaggccaaactcggccagaatgcggcggcagacggcctcatcgttataccatgtataataggggtccttcacctcggtgtgggtggaagcgtcctctacatagagccgctcgaaggtggtcatggcactgcggccaaacagcggcgaaagcttgccgcaccacagataccacaaaaaatcctgtccgctctggcgggcagcgctgccttccggtgcatagtagccccggcgggcgcgggcatcacagtagtccatcagtgcgcggccggagtagtagcggccctcaaagcgctccatggcaaaggtgccgcggctggtcatgggcacagcgccatggtagagcaggttgccgttctcaatgtggtacacgctgccctttgcatagagaaattcaacatgctggtgcagtttttcgctctggcggaaggactgcaccagcttgcgcagcaccagctgttcatccgggtgcagtgcggccggatcggcggggtccaccgtggggaacgaggtatcccgcagcggatactccttttcgccgatctttaccgtgtgcttttcccagtcgatgcggcgcagataatctcgctcctgcatctggaagtccgggttgcggtcaatgacatggcactccagcttgaacatcagaatgctgatggccttgtgcatcacggcacagcggtgcagcattcccctggtgtaggggccgcgggccgcatcggtatgaggcatccagatggaaagatcatcattgccgtagaactgctcggccatgcgctgcagatggcgcaggttgatgccgtagcagtcctccagcattccgtggttatgataagccagcgtggtcttgagcaccgtgcagatgcagatggggctgcccgcagcggcacccatccatactacatcgtggttgccccactggatatccacattgtggtggcgcatgagcagatcgaggatgatatccgggcgtgggccgcggtcgaacaggtcgcccacgatgtgcagcttgtccactgccagatgcttgatcagctcgcacagccgcacgataaagcggtcggcgcggccattttcaatgatgctgcccacgatctggccgtagtacagatccttgtcgtgatcctcaaaatgggcgtggagcagctcgtccagaatgtagccgcaactggcaggcaggcatctgcgcacatggtcgcgggtatgcttggaggacaccagacggcagatatcaataagcctcagcagcgtttcggtgtaccactgatccagcgcttcctcgctggtacagcgtgccttgagctggggcagcttttcgtttgggtaatagatcagcgttgcaagctcggcgcgggtatgcttcggcacggtatcgcccagcacctgatccactttttcgcgaatgacaccggaagcggaattcagaatatgcacaaaagcttcattctcgccgtgcaggtcgctcatgaagtgctcggtacccttgggcagcttgagcagtgcctgcgtgctgatgatctcgctggctgccgccgcctgcgaaggataatcccgcgagagcagggtcaggtacttgagattatcgcggatctcatcggtttcggtgcgcatggtctcctccatcacaacgttctctccgccgcagtccgccacacggaccttgcaaagatgttgctttccatatgtattattttttccttatcttatagtatagcacgtccggggcgaaaagtggtatactggggctgacaaactttcagcaaaggactttggatattatgccgaaaagcgatttcgtctccgttccctcttcctgcaccctctgcccgcgccggtgcggggccgaccgtgctgccggacgcaccggtttctgcggcgcgggcggcaccttaaaagcagcccgcgctgccctgcactactgggaggagccatgcatcagcggcacaaagggcagcggcacggtgttcttttccggctgcaccctcaaatgctgcttctgccagaactatcccatcagcgccgagggccttggcaaagagatcagcgtggaacatctggcagagattttcctgaatctgcaggagcagggtgccaacaacatcaatctggtcacacccggccagtggcggccctggatcattgccgcgctggatattgcccgggctaagggcctgcatctgcccatcgtatgcaacaccggcggctacgaaacggtggaaagcgtggaagcatggcgcggatacatcgacatctggctggccgacctgaaatacgtctcctccgccctctcggcagagctttcctctgcaccggactattttgcgcaggcaaagcccgccattgaagccatgatggcacaggccgggcacccggtgttcaatgcagagggcatcctgcaaaagggggtcattctgcggcaccttgccctgcccggccatgttgacgacagctttgcggtgcttgaccagatggccgcgtggaacgatgcagaccccgagtgcttcatccccagcgtcatgagccagtacacaccgttttacaaagccgcagagcacggcatcggacggcgcattactacctatgaataccgccgggtggtcaactatgccatggacaagggactggcgcagggctacatgcagcagaagagcagcgcgaaggaagagtatacgccttctttcgatttgacaggggtatgaattcgtcaaatctcccaaaaaaggccgatttttttctcttgcatcctcacggaagtgcttgcaatcccatccgggccggattataatggatacaacgatgtgttaacagaactctgatgagctgtaaatatcaggaggagcgttatggaacatttcaacccgatccttggcaacgataccaccggccagaaattcatcacctgcggtgagatcatgctgcgcctgaccccgccgaactacgagaagatccgtatggcatccggctttgaggccagctacggcggcagcgaggccaatattgcactggcactggctaaccttggtgtggacagcaccttcttcagcgtggtgcccaacaacagtctgggcaagagcgccgtgcgctggctgcgttccaacgacgtgcactgcacccctatgatcctgaccgagccgaacgagactccttccaaccgtctgggtacttattatctggagaccggctacggcatccgcccgtccaaggtcatctatgaccgcaagcacagtgccattaccgagtacgatttctcgcaggtggatctggatgctttgctggacggctacgactggctgcacctgagcggcatcaccccggcactggcacccaactgccgcaccctcattctggatatgctcaaggtcgccaaaaacaagggcctgaccgtcagcttcgacggcaatttccgctccaccctgtggagctgggaagaagcccgcgatttctgcaccgagtgcctgccctatgtggatgtgctgcttggcattgagccgtaccacctgtggaaggatgagagcgaccactccaagggcgactggaaggacggcgttcctctgcagcccagctatgagcagcaggacgagattttccagcacttcatcgagcggtatcccaacctcaagtgcattgcccgccatgtgcgttatgcgcacagcggcagcgagaacagcctgaaggccttcatgtggtacgatggccacaccttcgagagcaagctgttcacctttaatatccttgaccgcgtgggcggcggcgatgcctttgccagcggcctgatctacgccatgctgcacaactacagagccatggatatgatcaactttgcggtggcaagcagtgccatcaagcacaccatccacggcgatgccaatatcaccgatgatgtgagcactatccgcaacctgatgaacatgaactacgatatcaagcggtaagttttatcgccgtacagagaacgcccgccgggtctccccggcgggcgttgctttttctatcagatataccgcccggtgatgctctccgggttctgtcttacctgttccggagtacctgccgccacgatgcgtccgccggcatcgccgccgcccggccccatatccacaaggtaatccgcattgcggatcacatccagatcatgctcaatgaccaccacggtggcaccgttcccgatcagcttctggaacacacccagcagggtctgtacatccagcggatgcaggccgatggtgggttcatcgaacacgaacacactgtctgcctgccccttgcccatctcgctggcaagcttcagccgctgggcttcgccgccggaaaggctgggtgtctcctcgccaagggtcaggtagccaaggcccaattctttcagtacctgcaggcgctggcgcacaagcttgcagtccgcacaggcttccaatgcagtggacacatccatgtccatcaggtcggccatggaggctggttcgccgttcgccgtgggcagcttcactgccgccgcttcccggctgtaacgcgaaccgccgcagtccgggcagggcacttctacgtccggcaaaaactgcacatccaaactgatgacgccggtgccgtcacaggtggggcaccgcagcttaccggtgttgtaggagaaatcgcccgccttatagccgtggtctttggcatcctgcgttttggcaaacagcttgcgcagctcatcgtgcacattggcataggtggccacggtggagcgcacattgatgccgatgggcgttgcatcgatcagcttcacctgcgcgatttcctcggcctccacgcttttcacatgcgctggcagggctgtgccgttcacctttgcctgcaaggccgggaccaggctttccaaaatcagggtggtcttgccgctgccggacacacccgtaaccacggtcagccgccccttaggcagttccagttccagcggcttcacagtatggatggccgaggttgccagatggatgcggccctgtgcaaacagttcattttccggcacatgaggccgggcgttcacccccgccctgcctgcaagaaacgggccgatctgagaagccgcgttctgttcaattttcggaatgctgccctgcgcgatcacatgtccaccctttgcaccggcttccggccccatctcgatcagccagtcagcttcctttaaaatttgggtatcgtgatccaccagcaccaccgagttgccgtcggccacaaggtcgtgcatcacatcggtcaggccttcaatgttagaaggatgcaggccgatggacggctcgtccagcacatagagcacaccggtggtacggttgcgcaccgcacgggccagctgcatccgctggcgctcaccggtggaaagagtggaagcggagcggtccagcgtcaggtagccaaggcccagtgaaagcagccgtgccgctgccgtctggaaggattcgcagatattgcgggccatgggccgcatctcttccggcagaccgtccggcacacccgccacccaatcggtaagctgcacaagagtcatctgacaagccttgtccagcgtgatgccccgcagctttggggtacgagccgcattacacagccgggtgccgccgcagtccgggcagatgccttgccgcaggaacttttccacccgcttcatgcccttttcatccttgaccttggagagggcgttctccacggtataggtggcattgaaataggtaaaatccagctccccggcctgattggaatttttgttatgataaaaaatgtgctttttctccgccgggccatggaaaacgatatccttttcccggtcggtcaggtcgcggaagggcacatcggtgcgcacgcccatctcccggcagatatccaccatcagcgaccacatcaggctcttccacggggccacggcaccttcgtcgatcgtaagagaatcgtccggcacaagggtgctctcgtccacggtcatcaccatgccggtaccgctgcaggtgcggcaggcaccctgactgttgaaggcaaattcttcagcggaaagcgcgcgcacgctggcaccgcactgcgggcagagcagcggtttttctgccgccacggcaaggctgggttccagccagtggccgcactgcgggcagggatagctggaaagacgggagaacatcaggcgcagactgttcagcagttccgtgccggtaccaaaggtgctgcggatgcccggcacagcgggccgctgatgcagtgccagtgcagccggaacatacagcacttcgtccaccgatgcctttgccgcctgcgtcatgcggcggcgcgtataggtggaaagtgcgtccagataccggcgggagccttcggcgtaaagcacgcccagcgcaaggctggacttgcccgaaccggacacgcccgccacacccacgattttgcccagcggcacatccacattcacgtttttcaagttgtgcacccgcgcgccgcggatcctgatatggtcgaccatcttcttttccccctgccgtcaccgcttcttttttaaatagtatccaatgccaatggcatctgccagcgcccagccgacgggcacgctgagccagatgccggtaacgcccatcggcgtggccgaaagcagataggccagcatcagcggcagagcaaacagcaaaatgctgccggtgatggggcctttggtcaaactacgctgcattgtttccgattctcctttttataacgctgtttcagccggtgcactggctctgccgccgtcccgccttgaaagagactgctctcttcctgcaaacttctgacggtactctctgggcgtgcagtgcttgatctctcggaaggtctttgtaaagtagctggtatccgaaaagccgcagtcggcaccgatctcgccgatcttcatgctggtggaaagcagcagctcggcggccttttcaatgcggtactgcttgacatactggatgggtgtgatccccagcagctgccggaagctgcgcaggcaggcgctctcactcagggccacgcagtcggaaatgcgctccacgttcagttcctcagcataatgctcttccacaaaacgcagcatctgtttcatgcgctgggccgcgatctgctcctgctgagagacctttgtttttccaccctcgcactgcattcccagcagatgcaccgccgccgaaagatggtaccgcgcctgattctcatagtcaaagacctcttgggctactgcgtcccagacttcccgcaaatggcagagcacggccttctgcccgtcgtctgcctcgtccagcagaaagaacgccggtgctcccggctgaagcagcgggtatacgagcttttgccagaagatggtatccatgccgccaatcaggcgcggatggaataccccggaatgcagcagggcatccccggtctcagcctgctccaccgcatggaacactccggaattgacaaacacgccctgcccggtctgcaaaaccagccgggctttgctcacgtccaccgccagcgggccttttacggcaaggatgtattcaaactcttcatgccaatgccatgctaccgagtagcttttgaggtcctcttcatagcaggcaataggaaacagtgcgctgccgtgctgcaccagttccctgccctcgtcatccgccacaacatccggcaggcagttgagcccgcccgctgctgcacagctggtctgaaatgccacgatcagccatctcctttccgtcaaggtgcacatccgcatccgcgccggttttgttgtatcaatcgggcgtttttatcctaatattccgctccgatgtgtgatattattacatcagcaaagtacaagatgcattgcaagtataacacgcttcccggaggaactcaagatttatggtacagcttctgcttccgatcatttacatctcgttcatcagtctaggcctgccggattccctgctggggtcggcgtggccctccatgtatccggcgctcggtgtgccggtgtcctatgcggggctgatctccatgatcatctcctttggcaccattgtttccagcctgaacagcgaccggctcacccgtgcgctgggtaccggaaaagtgaccgccctcagtgtggccatgacagctgccgcgctgttcggcttttcggtctccacacagttctggatgctctgcctgtgggccgtgccctatgggctgggtgcaggcagcgtagacgcggccctgaacaactatgttgctttacattataaaagccgccacatgagctggctgcactgcatgtggggcatcggcaccatgatcagccccatggtcatgggccgggtgctggcaggcggcgggccgtggacatccggctaccggtacattgccctgttccagatcctgctgagcgcagtgctctttttcagtttgccgctatggcagagccgtactgcaggcactgacaccgaaactgcttcgacgcaggcgttgagccttggacaggtattccgtctgccgggtgccagagaggtgatgctgtgcttcttctgctactgtgcattggagaccacggccggtctgtgggccagcagctacctcacactgacgaaaggcgttgccgccggcactgccgccagctttgccagcctgttctacatcggcatcactgccgggcgcgccgcctgcggctttttgaccctgaaattcaacgatacgcagatgatccgcatgggtcagtgcattctggccgcaggggtgctggctctgctgctgcccgggccgcagatccttgccctgagcggtcttgttctggtggggctgggctgtgcgcccatctatcccagcatcatccactccacgccggaacacttcggcgcggacagatcgcaggcggtcatcggcatccagatggcaagcgcctatttgggcaatctggccatgccgccgctgttcggcctgctggcaaacaacatcactccggcactgttccctttttgcctgctggcactgctggtgctcatggtattcatgcacgaacagctggtgcgcaaaacaagctgctgctaattctgccattctcctatttcatatacagcaaaaggctccctgtccggtctcgggcggggagcctgctgttttaaaggagttatttacaggatgcaccggctgatggcgttggcgaccgcaaacagttcctgctggccgataaagccgaactttgcctcgtgtgcgtccgcaaagcagacggtcagctgcgatgcctgcaccgggtcgccaaagcctgccgtctggatcccgaagtgcagcaccttgcggtacggcagcacaaagatctgctgccgggttccagtaacgccctgcatatccaccatgatgatgcggtgggtggtaaagatcacctgatcgcgcaccgtcttgtaggcacccacgatgctctcaccgtccagcagcagcgcgcgggcatttttgcagatgtccttttcctgaaggcggatgaggttttccattggcttatcacggaattccatggtttttgtcccctttcctgcgtggttttctgcccttattgtagcattcctgcaggcggtttacaagatgtgctctcgccttttgggccgggctgtgctatactgtatgccaaagagattcttataaaaacgaggtaactcccatggagatcatcattcatcaggccattctgcacgtgctggacaccaccatggatgcgcctgtactcagcggcagcggcatggaaatgaccgccgaaaagaccgcctatttccagtaccacatcgaaaagctgcttgccagcgacgatatccgccagtgccgcccgctgccggattccgcctttaaaaacgagctggagcacaaccacgattttgtggacctctcctgccgcatcgcgggcgttctgttcgactacatgcacgcgcacaccaccattccgggggcagaccttgccgtggtggattttacccgcgatggtgagccgtggctgggcattctgaagctgaactacaaaaacggctacacccactacaccgagaatgtggagggtgccccggtgaactccatcatacagcagcgggcctgcctgcccagccagagcggcaaggtggaggaaggtgcccttgtcaatctgaccgactactccatgaagctgctggaaaaaaagttcgacatcgacggccacaaggatttttacctttccacggtagtgttccagtacaccaccgcccagccggaaaagaaaaagctgcaggccattcaggaagccgccgtgcaggccgtgcaggaaaactacgcagatcagccccacgtagaggctcaggtcgcgatgctgatcgccaatcaggccgcagacaacgacaatcaggtatccatccagcaggtgcgtcagcagttggaagaggaatatccccttgccgccgtgccctttgatgattatgtggaaaagagtgatgtgctggaagcgcctgagcagcccgtgaccgtgacccctgcgcgcatccgccgcatggagagccgcagcatccacaccgccaacggcattgaggtgaagattcccaccgaactgctcaactcggacaacgaggtggaatttctgcacagcgacgacggcagcatttcgctgctcattaaaaatgtgatcctgtaagaaacgatttaaaattgtctccgcgcacggatcgcgctccgacaatatcagcggaatcattattttcatatttgcaaaagccgaaaaatctgcggattttccggcttttcttttttcacaggaaggagccgtaacgggaaacaacaaaaaagccatcgtttttgcatttctgcatcaacgatggcttcgtattggagcggccgacgaggctcgaactcgctacctccaccttggcaaggtggcgctctaccagatgagctacggccgcatattggaaaccctgctggatttccttagctggtgcctccgatcggaatcgaaccaatgacacggggattttcagtcccctgctctaccgactgagctacagaggcataagcggtgcaattatccctgcaccctcccgagcgattctcgcgaatttcggggcccccgcgaaagcttgcgaagcaagattttgtggggaagaggagaaagtctggcgttcatcacggcagtcttgcttgcaagaccgcccgatgaactgcaggactttcgacgagcgacccggatcgggctcgaaccgacgacccccagcgtgacaggctggtgctctaaccaactgagctaccgggccaaatggtggaagttaacgggctcgaaccgctgaccctctgcttgtaaggcagatgctctcccagctgagctaaacttccacaaaatggagcggccgacgaggctcgaactcgctacctccaccttggcaaggtggcgctctaccagatgagctacggccgcacattccatgtgtttgtgccggactgtttaccggcgacgctgattattataccgtaccgcccggcaattgtcaaccacaaatttgcattttctgcaaaaaagttggaaacccgcctgtctgtattcaaaagacttcacttttgcgggctttacctgtgtcatcattcaagtttgccacgacatacacgaagaaaattgatttgctttcccttttgtaaaccattataatggaaagtgtcattttgtcgcctgtaagagctgcgtctgttatgccgctgagggcatacaggcgcgttttcgtgcgcagaaataggaaaagccagcataaaggagcaaacacaatgtataagatcactgaaaaagtcgcgctgaatcccaccgtgacgaagatggtcattgaagccccgctgatcgccaaaaaggcaaagccgggccagtttatcattgtgcgcccgtttgaggacagcgagcgcatccccctgaccgtggccggttacgaccgcgaaaagggcactgtggatatcattttccagatcgtgggcggtaccacgatggagctgaacagcctgcaggtgggccagagtgtccacgactttgtaggcccgctgggccgcgccaccgaggtggacggcctgaagaaggtatgtgtcgtgggcggcggcgtaggctgcgccatcgctctgcccattgcccgcgaactgcacgagcagggctgtgtggtgcacagcgtggtgggcttccgcaataaggacctgctgatccttgaggacgagttcaaagcctgcagcgacgagctgcgcattatgaccgacgatggcagctatggcaccaagggtgttgttaccgctgcactggacgagctggtggccgccggcaaccagtacgatctggtcatcaccatcggcccgctgatcatgatgaagttcgtggtcaagacctgccagaaacatggcctgaagagcatcgtttccatgaaccccatcatgatcgacggcaccggcatgtgcggcggctgccgcctgaccgttggcggcgagaccaagttcgcctgcgtggacggccccgactttgacggcgatctggtggattttgatgaggcaatggcccgcggcaccatgtaccgcccgtttgaggcacacgcccgtgaagcggcatgcaatctgctcaatcaggaggtaaaataagatggctttcaatatggacccgaagaagtgccccatgcccacgcaggaccccaatgtgcgcaacaagaactttaaggaagttgcacttggctacaccgaagaaatggccgtgaacgaagcaaagcgctgcgtgcactgcaagaacaaaccctgccagaccggctgccctgtgggcatcgatatccccgagttcatcggccatgtggccgagggcgactttgaagccgcttatcaggtgatcaaccgttcctcttccctgcccgctgtctgcggccgtgtatgcccgcaggagagccagtgcgagggcaagtgcacccgcggcatcaagaacgagccggtgggcatcggccgcctggagcgctttgttgccgactggcaccgtgagaatgtgcacaccgcccccatcgtgcccgaatggaacggccacaaggtggccatcatcggcgcaggccctgccggcctgaccgccgcaggcgatctggcaaagcttggctacaaggtcaccgtttacgaggccctgcatgtggccggcggtgtgctgatgtacggcatccctgagttccgtctgcccaaggccatcgtgcagcaggagatcgacggcctgaagaagatgggcgttgattttgagtgcaatatggtcattggcaaggtgctcaccatcgacgagctgatggacgagtacggctacgaggccgtgttcgtaggctccggtgccggtctgccccgcttcatgggcatccccggcgagagcctgaagggcgtctactctgccaacgagttcctgacccgctccaacctgatgaaggcttatctgcccaccagcaagacccccatccgcaccggcaaaaaggtcgccgttgtgggcggcggcaacgtggctatggacgctgcccgcagcgccttgcgtctgggtgccgagaccgtgtacatcgtctaccgccgcggcatggctgagctgcccgcccgtaaggaagaggtggagcacgccgaggaagagggcatcatcttcaagaccctgtgcaaccctgtggagatccacgccaacgacgagggctttgtcaagtccatcacctgcattgagatggagctgggcgagccggatgcttccggccgccgccgccccatcgaaaagaagggcagcgagttcgagctggatgtggacacggtcattatgagtctgggcaccagccccaacccgctgatccgctccaccaccccgggtctggaaaccaacaagcacggctgcatcgttaccgacggcgacgacggcaaaaccagccgcgatggtgtgtacgccggcggcgatgccgtgaccggcgcagccaccgtcatcaaggccatgggcgcaggcaaggctgctgcaaaggccattgacgagtacattcagagcaagtaatcccctgtgaagatgggcaccgcccactgaataccggatatgaaaaatcccctgtgccagtgcacaggggattttttgcatcttattctgcggtctccgttgtgagcgccgggtaactcgtccgcacgcaccgcacagcgcaccgggcgctgccgccggtggtgcaggtaaagagggtcagatcccattcatcggactcctccgtcttttcggtcatttcctcaatttgcgtgggctgcaggttttccacataggagacctcgtaggtccagcgcataccgtccatatccgtaaaatagacctgcgcgccctcggtcagccacttgatggggctgaaatgctttgcatagttgtgggcgcagaccaccatgttatccgcataggtggaaccggagtaacggcccggtgcgattttcaggcccgcatagctccactggctcatcaccggcagttccagcccgatggacggaatggacagatagccgatgtaatcccagccgttcagttcggtcacggtcatttcctgcgtggggtccagctccggctgcagcgccacggtatccgattttgccttttcctccatggcagcgttcagggtctgctccaactcgcccagcacctcctgcgaggccttgtctgcacgggatgcatcccacttgttataggccagcagggctgctgccgcaaggatcagcagcgcgcccagcaccatacacactcttccgattttctgtcgcatagcaatgtttcctttttgttccgcggtaggtttcatccctttcagtatatgcgcaattggtatgtttgtccagtaaaaacttaccgcactgcccggtccggcacaaggcggcacacaaaccgcaccatcagcggggtcagcggcagccacaccagcgtgcacaccacattgaacaaggtgtgcgcattcgcgatctgccgggcaatcacggcaagctccggccctttgggcgaaagtgcagccgtcagccgcacatacaacggcagaccggcgcagaacaccgccgcgccggtcagattgaacactgcatgggccgcagccacccgctttgcgtcccggcttgcgctcaaggatgccagcactgccgtgatggtggtgccgatgttatcgcccagcagcaccggcagcgcacccgcaagacccaacagactgctgccgtccagcccggggcgggctgcaaagttctgcagcaaggcaatggtagccgagctgctctgcactgtcagggtcatgccaagccccgccagcagccccagccatgggtgctgccgcacccgacccagccagtgcacaaacaccgggctttgcgccagcggttccatggcagtgcccatatcggcaatgccctcgaacagcaggccaaaggcgaacaccgcccggccaatggcccggcccttctgccctgcacaggcaaagcagagcagcagcccggccagcagcacaaggccgcgcacatcttccagccggaaagccagcagctgtgcggtaacggtggttccgatgttgcagccaaagatcaccgggaccgcctgccgcagggtcagcaggcccgcacttacaaagcccagcaccatcaccgtgactgccgagctgctttgcagcaccgccgtgaccgcagcccccgccagcacgccccgcaccgggctgccggtcacagcggccagcaggcttttcaggcggctgcctgccgctgtttccagactgtggctgagcgcatccatgccgtataaaaacagtgccaagccgccaaaaagtgtaaaaattcttgtcaggttctgttccactgccgccgcccctcccgcagaaacgtttcttattctatttatgcagctgccgggcggttcaggctttctgccgccctcccctttttgtgaacttttttaaaattatcctaaactgcccttgcattctgggtgccggaggaatattattgtcaggcgttaatagttaacaactgttaagcattttgcaatgaggagggatagaatgttgaacgagaccgaagccgccgcgagctttcacggtctgtgccatttttttggacggctgagcaaggcatcccgggccggcatgaaggcggctctgcggggctgtcccaagtgccactttcccatgctggagggtctggctcacacgatcagtacccatgggcagaacggagcggtgtacgtttccgattttgcccgggaggcacaccagccgctgccagccatcagccgcagcctgcgccagctggaacaggacggccttgttctgcgcgaagcggacccggctgaccggcgcaaaacgctggtgcgcatcacgccggagggctacgccgcctgtgcccggtgtgaggatgccctcagcgattattttgcctgcgtgatggcccggctgacaccggagcaggtgcagcagatgaatactttgcgcggcgcactgatggatgccattcttgcggaaaacgcttcccgtgaagcaaaaaacaacgaagggagaaccgaactatgacgaaaattttcaagcagctggcccggcactgggccgtctgtcttgtggtgttcgcgctgctgttcgtgcaggcgtactgcgatcttttgctgccggactacaccagcaggatcgtggacaccggcatccagcagggcggcattgaaagccccctgccggaaacgatacgccagagcacgctggacgccctcacgcttttgatgagcgaagaggacgccgatgcgctccagaacgcctacgggtattaccttcaggacgacggcgtgctgaagctgcgcaccgacctgaccgatgacgagcgcaccgcgctggaggatgccgtcaccacgccggacatcgtgctgtatatggccgccgcgcaggcagcgaacgcccccgccgggcaggacaccatgggcatgaccggccttgctgacatgcaggcggcatcctctgagagcaccaccacggatagcgagaccgtcacccccactgccgaagatctggacaccgtatgcgcccagtttgccgctatgagccagatgcccggcttcacccgcgaagctgtccagcagcagctggccggtgcttttgccagtctggatgataccctgatggagaacctcaaaagccagtccatgctgctggtgcagctggaatacgaggcacagggcattgcccacgatgtgcagatgcgctacctttaccgcgtaggcggccagatgctgggcctgactttgctgatggtggctgtgtccattgcggtgggcttcctcgcctctcgtgtgtccgccgccattggccgcgacctgcgccgtgagacctttgccagcgtcatcgggttctccaatgcagagatcgagaatttttccaccgcatctctcatcacccgcaccaccaacgacatccagcaggtgcagttcgtctgcgtcatgctgctgcgcatggtggcctatgcgcccattctgggcattggcggcgtgctgcatgtgctaaacagcagcaccggcctttcctggatcatcgtgctggatgtggccgttctgctgttgctcatcctcttcctgatgagtgtggccatgcccaagttcaagatcatgcagaagctggtggaccggttgaacctcgtcagccgcgagattctgactggcatcatgccggtgcgtgccttcagccgtgaaaagtttgaggaggagcgcttcgacaaggccaacaaagacctgatgagcacccagctgttcaccaaccatgccatggttgccatgatgccctttatgaccctcatcatgaacggcaccagcctgctgatcgtctggttcggcggcaaggccatggacaacggcaccatgcaggtgggcgagatgatcgcattcatcacctacaccatgcagattgtcatgtccttcctgatgctggccatggtggccgtcatgctgccccgcgccggtgtggctgcggagcgcatcgacgaggtgatccgcaccaaagccaccatcaacgacccggacgaagctgctgcaaagcccgcgcaggagcacgaaaactggcagggtgaggtagagttccacgatgtgagcttccgcttcccgggtgcggacagcgatgcgctggagcacatcagctttaccgcaaagcccggcgaaaccaccgccatcatcggctctaccggctgcggcaaatccaccctgctcaacctcatcccccgcttttatgatgtcaccggcggcagcgtgaccgtggatggcatcgatgtgcgcaatatgccgcaggcacagctgcacgacctgctgggctatgtgccccagaagggcgtgctgttcagcggcaccatcgactcgaacctgaagttcggcggggagcacatcaccgatgccgatgtaaaaaaggctgctgccattgcgcaggccaccgagttcatcgacgcaaagcccgagggctaccaaagccccattgcacagggcggctccaatgtgtccggcggccagaagcagcgcctttccattgcacgcgccattgccaaggaccccaaaatttatctgttcgacgacagcttttctgccctcgactttaagaccgatgttgccctgcgccgtgcactgaaagcccagaccgataacgctaccgttatcattgtggcacagcgcatctccactgtgctgcacgcaaaccagatcctggtgctggacgaaggccgcctggtgggcaagggcacccatgcccagctgatggcttcctgcccggagtatcaggagatcgcccgcagccagctgagccagaaggagctggacctcaaatctctgaataccgaaaaggagggtgagtgatatgccaagacccggacgcatgacgaccgaacgcgccaaggacttcaagggcaccctgctgcagcttgtgcgcaaccttggccgctaccgcctttcgctcgttaccgccattgtatttgccattctttctaccatcttcaatattgcaggccctaaggtgctggcaaaggccaccacggctcttgccaccggctggatcgccaagctgcgcggcaccggcagcatcgactttgtgtatatcggccgcatcctgctgtttttgctgggcatgtacctgctgagcagcgccttcagctttattcagggctggctcatgaccggcctttcccagaaagtctgctacgacttccgcaagcagatcagcgaaaagatcaaccgcctgccccttgcctactttgaaaagcgcaccgtgggcgaagtgctgtcccgcatcaccaacgatgtggacacgctgggccagagcctgaaccagagcatcacccagctcatcaccagtgtgaccaccatgatcggcgtgctggtcatgatgctgtccatcagcccgaagatgaccctgattgccctgctgatcctgccggtctcgctggtgctggtgctcatcgtggtcaagttcagccagaaatacttcaaggcccagcaggccattctgggcgttgtgaacggtcaggtggaagaagtctactccggccacaacgtggtcaaagccttcaaccgcgaggccgtggtgctgaacgacttcaacgccgccaacgacaagctgtacgaatccgcatggaagagccagtttctctccggcctgatgatgcccattatgaactttgtgggcaatctgggctacgtggcagtggccatcgtgggcagcatttttgcagcaaacggcaccattaccatcggtgacattcaggccttcatccagtacgtcaagaacttcacccagcccatccagcagctttctcaggtgtccaacatgctgcagagcatggccgctgccgctgagcgggtgttcgagtttctgaacgagccggaagaggatcagcaggcagatccggcccgccgggccgaccccggctgcatcaacggtcaggtgacattcagtcatgtccgcttcggctacaccccggacaagaccgtcatccacgatttcagctgcgaggtcaagcccggccagaaggtggctatcgtcggccctaccggcgcgggcaaaactaccatggtcaagctgctcatgcgcttctatgatgtggattccggttccatcaccctgaatggccacgatgtgcgggactttgaccgcagcgccctgcgcgagggcttcggcatggtgctgcaggacacatggctgttcaagggcaccatcatggagaacatccgctatggccgtctggatgctaccgacgaagaagtgatcgccgccgccaaggctgccaacgctgaccactttatccgcaccctgcccggcggctaccagatggagctgaacgaggacgcttccaacgtgagtcagggccagaagcagctgctcaccatcgcccgcaccattctggcagataaccgcatcctgattttggacgaggccaccagcagcgtggatacccgtaccgagcagcgcatccaaaccgccatggaccgcctgatggagggccgcaccagctttgtgatcgcacaccgtctttccaccatccgggatgccgacctcatccttgtaatgcgagatggcgatattgtggagcagggcacccacgaccagctgatcgaagcaggcggcttctacgccgatctgtacaacagccagttcgaggacgtggtggagtaagctgcccgtcatcgcagtataagcacaaaaatagcacctgccgccttcctttccgaaggcagcaggtgctatttgtttaccctctcagtcatcgctacgcgatgccagctcccccgagagggggagcttttcagcagttaccggtcagctgcaatagagctctcccttcgggagagctggcgcgaatgcgcctgagagggttttcttttttctttattcttccaccgcttccagcttcaggccgaacagcttttccgagagggacggcagcagctgctgcaaagcgcggacataggccatcaccaacgggtcctcgcgcttttgtcccagcacgatgccgaaccggtgtcccctgccccagtccagcacccgcgcaaagctgagatccggtctgcggtaatagaccgccgggaccatcttgagcgccggatccccataggatgcgctgcggatgccgcccaccggcgtaaagttcactccgcgctccagcccctcctgcagcaggctggtctcgtagacagtctggtacatctctttgacgggcagccagcggtattgcagcgcctgctccagactcagcctgcccaccggcatatcggcgggcgggtggatgggaatgcacagctccggcacataaagcagcgggatgaaagtgaacccctgcgcgtaaaattccgcactttccaactggaaagaaagatccgcgtccccttttttcaggctgcgccagacctcgctgcggctggcgcactgcatcataatagacgtgtattgcagacacagctcgttcgtcagagaaaacaggtcgtatccgaacatccgcatggcctcatggctccatgcaatgaccagatgccgttccggcggattttcctgttgctgtaccgcacgggcatggcgcaccgcctcctgatacaaggccgtcagctgctttgccttggggtaaaagtcccggcctgccggggtcaggatcacccggcgcggtacatgctggaacagttcaaactgcagctgcccttccagcgtgcggatctgctgcgaaagcgccgactgcgaaagatacagtgcctctgctgctgctgaaaagctgtccatctctacgatcttcacaaatccttccagtgcactctggttcatctgcgcatcctcgctttcttacattaggattttctaaattataatataacataattgaattgtaaagtgcgtcactctacgctacaattgttaaagattcagcaaagtggttttcaccctgctgcacgataagaagagaaaagagaaagagagcatccctatgaataagatctcccgcaaaggctttctgaagatcgccgctgccgccgccatgagcggtgtcactgccggcgcactggctgcctgcaattccgcctccggctccactgcctccggtgctgccggtcagtacatccccggcacctacgagggcactgccgagggcatctcctccaccgtcaaggtcaccatgaccttctccgacagcgctgtcaccgacgtggtggtggatacctccggcgagaccgcttccttcggcgctgccgctgccgatgagctgcgtgagcagctgctttctgccggttctgccgagatcgacggcgtttccggctctaccatcacctccgatgccgtgatgaaggccgccaagagctgctatgcacaggcaaagggtgaggctgtggtgtccagcgtgcagctgcccacaggcgacgcaaacgactggctgggcaaagagcctgatatcgacgaggccgccatcaccgagaccgtggacaccgacatcctgatcgtgggtgcaggcaacggcggtatgttcgctgccgcctatgctgctgccaacggcctgaacttccgtgttatcgagcagaacgccaacgtgcaggacacccgtcactggtacggcgctgttgattctgctgccgctaaggaggctggcgaacccgccaccgataaggcaaaactgctgagcgagatctcccgctacgcctccggcaagtgcgatcagcgcgttgtcaagacctggatcaacgagtctgccgccatgcacgacttcatgcgcagcattctggaagataagtacggctgggtatgcgatttcacctccggcagcgaggctgcatggcctgcagagaatgccgagcacaacaccgactacctctaccctgtgcaggagcacaactacatggccagcgagagcgcatccggcctgccccgtaatgagctgctgctgcagtacattcaggagctgggctacgatgtggacttcaagaccagtctggccaagctggaaaagaacagcgagggccgcattaccggcatcatcgcccagagcaccgaagatgaccactttatccgctacaacgccaacaagggcgtgctgctggcctgcggcggtttccccggcaacccctacatgatggagcagctggacccgcttggcaccagcgtgaccaccgcctgctcctactcccccgccgacaagggctacggcatccgcgctgctgtgtgggccggtgccaatctggacaaggaagccgctcccatgctgtttgaccgcggcgttgttgcccccggcgtggatggcggctatgtggatagcgacactgcctttggcggcaaggccttccccggcaagatccgccagtacaaccccggtacccagcccttcctgaaggtgaaccgcaacggcgagcgctttgccaacgagagctgcccctacaacgatatcgtctacgctgccgcccaccagccgggccgcgtctacgcacagatctgcgatgccaacattctggaggacgcaaagcgtttccacaccatcggctgctctgcccagacccgcaacggcggcgagaagtacattcagggtaagatggacgaggctattgaggccggtgcattgttcaagtgcgatacgctggacgagctggctgacaagatgggctttaccggtgctgccaaggacaccttccttgctaccgtggagcgctacaatgagctgtacgacaagcagaacgatgaggatttcggcaagcccgcttaccgcctgagtgccatccgcaccgcgcccttctatggctgctggctgggtgcctctctgctgaccaccgagcagggcattgccatcaacgaaaagggtcaggcgctggacaacaacaaccagcccatggagggcctgtatatcaccggtgatatgtccggcagcttctttgccaacaactacccctgcctgatggctggtgtggccatgggccgcaccctgaccttcgccatgaaggccgtcaagcagatggcgggtctggataacgcctgatccagcgcggttttccggcacaacttaagcgtttttccatttcttctttcttcatgaagagaggcggtccctgtttggggccgcctctctttgctattttttcgccacgtgccccctacacaaatccccacgattgtgctatgataaagctgaacagccggtttgtgccagacaaccggcaaaatcgaggtgtttgtacaaatgtctgatctccttgaaactctgcagcaggaaggggtagaccccgctctgctggaagcagtccaacagtaccgcgctgcccatgccctgccggacgcactgcgcccgcgcattccttcccctgcctttacctactacggcaaacaggtgtgggagcaggcgctggcggcgctgctctgcggcgaaaacctgctgctggcaggcggaaaagccaccggcaaaaacgtgctggccgaaaaccttgccgccgcctttggccgtcccgcatgggacatctccttccatgtgaacatggatgcagcatccctcattggcatggacacttttgcggacggtcaggtggtgttccggcccggcccggtataccgttgcgcccagtgcggcggctttggtgtgctggatgagatcaacatggccaaaaacgaagcgctggccgtactgcatgcggtgctggacttccgccgcgccatcgatgtgcccggctacgaccgcatcccgctggcggaggagacccgctttattgccaccatgaactacggttatgccggcacccgtgagctgaacgaggccctcacctctcgtttcgtggtcatccagatgcccaccattacgcaggacgatctggaaaagctgctgcggacgcagttccccgatcttgcttccaagtatgtgcgccagtttgcactgctgttccttgacctgcagaaaaagtgcgacagtgcggaaatttccaccaaggcgctggatctgcgcggtatgctggattccctgcggctgatccggcgcggcatcccggcaggcgcggcactggatatgggcatcaccaacaaggcctttgactcctacgagcagggcctgatccgtgatgtgatcgcggcgcgcattccggccaagctggatgccgccaagctctttggctgatggacgcccagagttacaccgcgcaggagcggcgtgcggccaatcaggtctgggctgctgcaggagcctatggctttgagccgctgtttctggcccgctataccgacggcaccaccgatttttacatgaacacggtcgtgggcctcatccataaatattacggtgacgcgctgattcgcagcatctttgatgcatgggacggtgatctgcggcagaccatgctggacgacatgacatggctgtatctggaaaatgcagcctatcggctggagctgccccgccgcccggttctggaagcgctgcgccatgcccatgcagattacttttttgcgattcaatacaagctctcccgtcaggagtggatggcaaaaaatcagctggtctacaccatgcaggccgcacgctggcggcgtgtgctgggccgcaccgacccggtgatgaccccttacgagtccggccttgccgccgcgctggccccggagcatgtgccggagccggaacagctgaaagccgaaattttatcgatctacgcaaaattcaacctgttcgacggcactgtgcaccagagagcagctttgcatctgcatctggacggcctgctggcaaagcttgccaccaaagccatgcccacccagatgatcaaaacggaccgcgtgaccgtggaacactcaaactccgtggatgctgtgggcggcgggctggcggtggacaagcgcagggcccacatcaccctgaagcagaatgccgcgcaggacagagcctacatcgaaagctgcttcggccgctctctctacccaccggaacggctgcgcaaggctgagcaggagctttgcgtgggcgaccacctgggatgccatttgtggttcagcgccggtgtgccaagcccggagcaggcccccaccccggaggcaaaacatctggctgagcaggccgaacttcaggccgaccgcaaccgcgcttattacgccaaaaatcgggaactgcaccgcagtgtggtgctgcggctcaccgagcagatccgcaactgcatccttgtgcaccagcagcccaacgcccgtgttgcccgcagtggcaacctgaacgctgggcgcatctggcgcgcaccacttttgaacgatgaccgggtgtttttgtgtgccgaggaagagaaccagccctcttttacggtagaccttttattggacgcatccgcttcccgcctgcactgtcaggaagtgatcgcggctcaaggatccattttggcccagagccttgcggcctgcggtatcccggtgcgggtgtccagcttcagcagcctgcggggctacaccgtactgcgtgtgctcaaaggctttgcagacaaaaacctgcaaaacatcaaccgatattttgcttccggctggaaccgtgacggccttgccctgcgggcagcaggcgaccttttgcggtttgcgcccggtcctgcgccgcggcatctgctcatcgtgctgacggacgcttcgcccaacgacagccgccgcattccgcccagtgcagaaaacccgctgggctgcggttacgaggacgctgccggtgtggctgacactgccgcgcaggtgcgtgcgctgcagcgcatgggcatccgggtgtcggctgtgttcatgggtgaggacagctctgccggtgccgctgcacagatctacggcaaaaacatggcccgtatccgcggcatggaccaactggcccgcgcggccgggcggctgatccagaacgagatccgtgaactgggcgattgaaccatattttaccagaacagcccacagatgggaggctttggccttgccgtctgtgggctgtttttgatacagaacacaactgattcactcttgcaacaaccatgtttcgggtcactgttgcaggatgcgcggaaatattttgtttttctgcaaacttatagttgttttttattgtgaagtatgctatactatgttcagtcaataaaacattcctgcgtaagctgcctgctgtgcaccgggtcgtttggcgcagtgcccatccgttatacaacgaactgctgtgttatagtttcaggagggaaccgatcatggatgccaaccgttattttgatgccatgcacaacgctatgtcagctcagcaccccggtgcgcagctgcttttaacggtaaagctgcaggacacctgcggcaacgatgcctgcctggagctgaagcagctgcccggtgagagcacctccattctgtgctactccaccatgggtcgccgctgcctgaacttccagctgttccgcaagggctggcagctgtgccacaacgccgatggccagctggtgggccgctttccttccagcgccgacggcctgatcgacgagaccgatttccgcgcctactgccgggaagaccggctggatctggcccgcacccagcgcatcaccgccgagcttcgccagtgcgccggtatcgattatcggggcagcatcccgcagaacgcccgcaccggtgccgttattaccgtggagagctttgtaggggccggtgcccgctggacctactggagtcaggatgttctgcccagcctgccgctgggtgccatcctctactggctggcggatcatctggccggtgccgagcgccgcaccctgcaggccgacccgcaggcagcccgccttgccgcccagtggctggccggtgatacagccgtattcttccatccgtcggtgccgatgaccgccatgaatacggtctcttccggctctgcacccgcacgccgccgcaccactgtgcccgctgcccgcaacaagagctggcaaagcatcatggccgtgatggcaggcatgtgaacgaaaaagcaaggaaagaccgatcgtctctccttgctttttcagtattattcgaggtacgggtccagcagggcatccaccgttttgttccgcttggggttcggctttttgatcacatggccgcggcagaccaccagttccagatgctgcagcgcacgcaggtcttccagcgggttgtgctttgtcacaataaaatctgcgctcttgcccggctcaatggaaccggtcacgtctcctactccggccagctgagcattgcgcagggtggccgtgtacagggcgaactggttgcttacaccgcagtatttgtggaagtagcacagctcccgccagaaatcgtactgggtgatgtacggacagcctacatcgttgcccaaggccaccgggatgccgttggcaagggcggtctttgcgctttccaccacgccgtcaaacacgatcttgccgttatactggtccttttccgaagcgccggaaaccgccgtatcaaacagtgcgtagggcagcgccggggagatggtggtgcacacaaaggctcccctctccttgtaaagccggatggtctcatcatccatctttgctccgtgctcaatggaatccacaccgttttccagcgccacctttacgccttctggcgactcggtgtgtgccgccacggtatagcccagcttgtgggcctcgtcgcagacggctttgaccatttccggcttcatcttcagctcgccgggggttcccttttcggtggcatccagcacgccgccggtgatcatcagcttgacaagatccaccttctgtccgctggcctttttgagctgagcaagtgcttcggcattgttatgggccgcaactgccaccgagcccgccatgtgtcccccgggcaccgaaatgccttcgttggcagcaaggatgcgcggtgccagcagcttgccagctgcagcatcatcacggcagcgggtgtcaaaatctgcaatgccgcccacggtgcggatggtagtcacgccacccagcagttccagcttcgcgtagctgcataccagcctgtaggccaccgcacgggtcaggccgttgctcagaattttgcgcaccagcgcagcattgtcccgcggctttgcgctgggcttgccgttgcctgccagatgcacatgcaggttgatcaggcccgggcacagatagcctccgtgcagatcgatcacctcataaccgtccagatccacgccctcatcgacaatggcagtgattttatcatcctcggtcagcaggatcttgtgcgctaccggctgcatctgctcggtgccatccagcaggatcccgttcgtataggcacgtttcattgggaacatcccctctttttcaggttttttcagacaggagttgttttatttcagtatagcacgttccggcagatggtgcaatgcaaaaacgggcaggaaaggttcagccctctcctgcccgctcggtgtttttatttactgtgcggctgcgctggaagccacttcggaagcagcagcctcagaagatgcggcttccgaagaagcatcttcgctggatgcggcatctgcgccgccggtcacgccgccctcaacgaccagctcatcctcatagtcaaggccgtaggtatccaccagagtctcctcatagtccttgtggaagaagttctcctcgcccagagccttgatctcctcgttcagccaatccagaacagtggtgttgccctggctcacagcgggagcaatggtgtcctgactgcccagagagggaatgccgaccgtgtagccggtgttctgctttgcaaatgcaatgacctcggtgttatcgttggcccatgccacgccgttgccgttctccagtgcgttcttggccgttgcataggaatcgtacttctgcagcggaatgtcggggtactccttggtcaggtaggtctcggcggtggtgccggaaatgacgatcatctggtcgtcagcgttccagttgtccagagtggtgataacgttgctgtccggagaaatgacacccagagccacgttcatgtaaggcagagcaaagtccacttcctctgcgcgctccggggtcacggtgaagtttgccaggatcacatccgccttgccggtctgcaggtactcgatgcggttggcagcctcggtggaaacgaagttgatctctacgcccagatcctcgcccagacggcgtgcaaagtagacatcatagccctgatattcgccgttctcgtccacatagccgaacgggttcttatcggagaacacgccgatgttgatggtgccggactccttgatctgatccagcgtgcggtagaccacgctgctgccggatgctgcgctgccagatgctgcagtggaagcagaagaagagccgccgcatgcggtcagaacagcggcagcggaaactgcgcccagacccagcaagaaggaacgacgagagatcttagactgtttcataatgattactcctttacaaaatctttcccatttggctgcggaacacccgcagtctttatcttgatctgtgactcatttcacagcatcaaacgtgaaggtgcgcaggaagcgttgcgcgcgctcagtcttgggccggtcaaagaactcggccggtgcagcttcttccacgatcttgccgccatccagaaagatgacgcggttggcaatggcgcgggcaaactgcatttcgtgggtgacaatgatcatggtcttgccctgcttggcaaggtccagcataacgtccagcacctcgcgcaccatttccggatcaagggcagcggtcacttcgtcaaacagaaggatctccgggtgcatacacagtgcgcgtacgatggcaacgcgctgcttctggccgccggaaagctcccgcgggtagctgtttttcttggcaagcaggcccacacggtccagcagagcttcggcctcctgctgcacttccgctttggggcgcttctgcaccttggtgggtgccagaagcacattgtccagcaccgtcatgtgcgggaacagctcgtagctctggaacaccatgccgatgcgctggcgcagctgagtcagatttttaccgccgtaggcaacggtctcattgcccagccgcacccggccgctctgggtgggctccagaccattcagacagcgcagcagggtgcttttgccgcagcccgaagggccgaccaccacgatgacctcgccgggcttgacagcaaagctgatatcatccagcacgggggtctcgccataggccttgatcagatgttcaacagtcaaaataggttctgccatgtacggtcacttccatttcttttcgagataggatgccagcagactgatgggccagcatacgaagaaatataacacgaaaaccgtgagataaatgccaaacgctgcgttggggctggcggtgcggttggcctcgatgatctgctgtgctaccttgatcacttccaccacaccgatcatcagcacaaggctggtggtcttgatcatgcgggtaatcaggttgatggacagcgggatcaggcggcgcaccgtctgcggaatgatgatgtaccagtaggtctgcgcacggctcatgccaagggcctcggcgctctcatactggtgcttcggaatggcgatcagcgcaccgcgcacaaggtcgctcatttctgcggtgccccacagcacaaacacgatgatggatgccatctcgccggaaaggttccacccaaaggcacgggtggtgccgaagtaaacgaggaacagcagcaccatctgcggcatgatgcggacgaactccagatacagccgcagaaccgccttgataacggggttgcgggaggtcatgagcacgcccagcaggatgcccagcggcaggctgatgatcaccgagacggcgctgatcttgagtgcaacgccaaggccgcccagcaggcgggccatgtttttgcccttgaacaggacatcaagacccaaatccagcatagcgcagcctcctttcgatcaggctgcccacaatggacaccggcagcagaatgataaggtagaacaccaccagcaggaacagacattcgatggttttggagtacatgccgatcaggtcctttgccgtgaacatcaggtccatcaggctgatggcgctgaacacgctggtctccttgagcaggaagatcacatttgccatgaaagccggcatactggtggacatggcctgcggcagaatgatgtagcgcatggtctgccagcggttcatgccaaggctgtaggcactctcggtctggatgggctcaatggcttccagaccgctgcggaacgcttcagccatgtagctgccgcccagaaacgccagaccggcaatgccgcagatctcggcattggtgcggatgcccaccttgggcaggccataataaatgaagaacagctgcaccagcagcggtgtgttgcgggacagctggatgtaaacacccacgatctgccgcagaacgggcaccttgtcatactggatcactgcgcaggcaaggccaatgataatggcaaaaatgatgcctgcaacgcccagccgcacggtaagtacagcggccttctggtagagcggcaaatattgctggatcgcattccagtccattgccggattcctcccttgtatcctgatttgcgggtcaaaacaaaacgcccggaagctccctcttcaagtaagctcccaggcggtcagcgacagatccttctgcgtgttcccacacagaatatgcagatatgctcacacggcataccatactgcagggcggccggtccgggaagcgtttgcggtacaacaacacattgcgcaacaacacatcatagccgtttcctccctgaatgatctcaattttcggatttgctcgacccgatgcacgtagtttacaccctattacccattatgtcaatatgattatgggacttctttcgattctttgctcattcagcctaaaatcatatcattctatgtgtaaattttattcatttttcaacttgaccgtatgcgtcgtgcggacagcaaaaagtcctcccgtcgggggagggccggataaagattttttaggaaagtttaagaaacagccggttttgctttctgctgccatatgctcccctcctgccttttcttttgtaaataagtatcatgatctcccgggaaaagtgcaatcaaaaggcaccggcttgtgcaaaaaagccggtgccttggggcaggaatattttacaggttcagcagcacattagcccggaaaacgttgccgctcgtttccaccgtcagattgccgtgatacctgtgcacggcagtttcgacggaaacaaggccgatgccctgtccgtcatgcttggtggagtgcagaacgccgccctgctttttcagcacgccatcgtagcggttctccaccatcaggcccatcatggccgggctgagcatccgggccagcaccttgacctgccgttcttccggcggcagcttctggctggcatggagcgcattttccagcaggttgccaagaatggtgcacaggtcggcctccggcaggggcaggagcttgggcagttccagcttccattcgatctggatgccctgtttccgggcctcgtagtcgtagtggccggcaagcgcatccaccgcagcgttgacgcacagggtgggtctggcatcgctgagttcgctctcgtactggctcaggtagcttttcagttcatccagccgcccggcctcggtcaggccggagatcacatgcaggtgctggcggaaatcgtgccgcaggtggcgggtctgttccagatagctgcgcagctccatatagcggcgggactccacggccagcagctggttttcgcggtccagctgggagctgcgggcatactcctttgccacgcggtacatctcgtacagcagcagaaagatgcccagcagcgagatgctcactgccagcaccgcgatgatgcggatgcggttcatcaggatgacgccgatctccttcggcatacagaacaccagaaacgccgcgtatagtgccggcagcggccatgccgactcccagaaggcttcgccgtggtactcctgcagcagccaccggctccagcgcactgccgtaaaacggaagatggcgctgagtatcaccgagagggtcaggcagatgaccgaggtgctgggcagaaacaccggctgtgcattgtccagctcagcttccgcgttcagcacaatggcaagcagggtgcacacagacatcatcactgccgacacggagaacagaaacatggtctggctgatcgatacttcccggtcggtgcgccagcgcagcagccagaagctgatgatgagcagcgggatgagcaggaaattcgtttccatgtccagcatgcagcacaccgctgcgccagccagacccatcagtgtgatcgccgacgcaccgatggcataggttttacgcggtgcacgcaagtgctcctgcagcgaggcaaggcagaggtattctgccggatacatcattgcaaattccagaaaaaaacgtccaaacaatgcaaaattcacaagcgctctcctttccgggtcagaattcccgctgcataccacggaactggtactgcgtaaattgggcaagcaggctgtttttgtccttctgccgcaccggcagatgggtcccatccagcatttcaatgcagtcaccctcaaaccgcagcaccttggacatgttgatgatcacgccgcggttgcacaccagaaattccggctgggtctgaagctgttcctgcacctgtgcaaaatttgccgtggcccggcactcgccgtcatccgtgaccacacgcacataatggttctgtgccgtagcatagtagatcttggtcagcggcagccgcacgatctgccgggcaatgcgcacctccagctccggctgctggcggcacagcacccgccgcagctcccctgccagctgctcaaacttttcttccttataaggcttgagcagataatcgaatggatgtaccggaaaggcatcccacacgtactctggcgaggatgtcacaaacacgatcagcaggtccgggtcggccgcacgcagccgctgcgccgtctcaatgccattggtgccctccatgcagatgtccagaaacaccacctgatacccttcgcgccagccggcccgcaaaaattcatctccgctggcaaaacagctgcaggatatgttctcattttcaaatgcctttttcagcagctgtttcaaccgttcggcatccggcttgctgtcttccacgatcgccgtctgcaggttcattgctgcaccccctgttccttctgcttccctgttttttatattatagcacaagttccgccttccgtggtctgccattcgcgcacaaaacagcccgtttcgcgcaggttgcggcagtgggcagaaatttttttgtgttttcctgctgcaatgcaaaacaaaaaaggcaccacacaatgtgtgatgcctttctgatctggtggagaataccgggatcgaaccggagaacgaagtgacagctgttcgcattgacttcgttgcacaatatggatataatataattagaattttactattatagatcgttcaggagcaggaggtgcttttatgaatatccgtccatctgcagcgattcgtcagaactacaacgagatcgccgatctgtgcagagaaaccgctgagccgatttttctcaccaaaaacggcgagggtgacttggtcgtcatggacatcgaaacctacaaccgccgtgaaaaaatgctgaagctccgcgaagagctgctttccgtggaagaggaccggatgcgtggaagcgagggctattcgattgacgaggtcacttccatgatgcgcagtgcgatcaaggaggccgccggacatggagcagcaaaataaataccgcgtgatcgtgtcagcacgagctgctcaaatgctggtgtcccacgccgcatttctggcacaggtcaaccctgcagcagcagagcggcttacagtggaatttgaaaaggctgcaaaatctctggagcagatgccgcagcgctgcccatggctcaaaggcgaatacattcctaaaaatgcttaccgatttatcttgtttgaaaaacgctatatgcttatcttccagatcgtagatcatacggtttatgcagatcatgtggtagattgcagacaggattacggctggctcatccgatgatcaacaaaggcggtggctttcccttttgtgggaagctcccgcctttttctgcgtctgtataaaaagaaaagcaccatacttcctacgaagtacagtgcttttttggtggagattaccgggccgattctgatcacggtgaccctcttgcagtccatgcacggcgctctcctgggtgagctaagccctcactcgtttggcaacaacaaaaaaggcaccacacaatgtgtgatgcctttctgatctggtggagaataccgggatcgaaccggtgacctcttgcatgccatgcaagcgctctcccagctgagctaatcccccataaattccagaagcaagcctctggaatggaaaatctttagtgggaacttaatcgtcatcaaccatcgctgtgggggtgtgtttctgggtgcatcgcgctcccagctgagctaatcccccagatgttcgtgccgtgcctgacgacgtgatttattatatcagcacatccgggagttgtcaactgttttttgaaaaattctgcagcagtttgtctgccatcgggaaattgtttttgaatgggctattctcattccattcctgcgccgtttttccacagcctgttaagtttttatgcaaacaaaaaccccgcacaaaacaattgcttgtcttgtgcggggcctctctagctctttttacctaacacaacaaacgctatgtcaaatcaaactatctatcctattcaggaaagattagttattagagagtgggcagagtgccactcttagtttccagaccgatggagctgctgcccagggtgtagatagcggacaggccgcccaggatctgcatgccagcgttcagagcgccaacagcaaagccccagttgccgccgaaggtgttgtagcccttgttgtaagccttatccagattcttaacagagaagccgatcacatcgccgggaacgtagttgccatcgaacagctgggccagaacatcgttggtgtacttagccaggaaagagttgccaacgatcttgatcacgttagcggaaacgttctgccagttagcagtggtcatagcaggagccaggacatcaaccaggctaccaccaacaacgtaggtcatctcgttttctgcaacagcagagaagtttgcaggcatcatcataatgaatttctcccttcaaatttagaaagatatttgcaagccatttgtttggcttacgtcccttactaggatggcaataatataccacactttccagaaatgttcaagtactttcttgaaaaaaatgtgaaaaatgtgatagactgtgaaaatccggtctcaaaattcttacagaagccgcttttttgcacacagcgacatgtttttttgcagaattggaagatactggaatttgaaagggatcgtgtatgaaaaccgtgatctatctggacgaactgctgctgacgaactttctggccgcagcagcgctgcttttgggcgcagggcttttgtgtgcgcggcagtgcagcggcctgcggctgatggcgggcagtgcggcagcggcagcggcttcgctgggcattctgctgccggagctgcccgagcctgcagctttcctttataaggtgttcacctgctgtgctgctgtagctgcggcttacggcgtgccgggcctgcgcaattttgtgcagctgtgtgtgtggtatctgctgctgaacctgctgctgtgcggagccgtactgctgcccggagtgcaaagcgcaaatctctgcgtctatctgccgctgtctccgggccggctgctgctatgctgcggtgcagtgcttgccgtgctgcgcggcgtactgttctgctttggccgtgccggcacccgctgctttgccgctgtgctggagctggaaggtgcagtcctctccgtacaggctttctgcgacaccggcttctcggtgcaggacccgctgaccgggcaggcagtggttctggtctattatcctgccgtgcgcagcgccctgccgcgggagctgcgcacatttctggaccgttattttgcctgcggcacggcaccgccgccggagctgcgggtgcggctggtgccctgcaccaccattgccgggcactgcgtgctgcctgccgttccggccaaggccctgcgcaccagcaaaggcagtgcagcgggcattctggccgcattctgccgcccggaaacacagcagccatggacagctctgctgggcagcgaactggccgtacagctgggcatccgctgagaagcgcttgatgcgatcgatacttatagatatacaggaggggtattcatgtttcatgttctgcaccggttctggcgttggctccttgcacggctgggctattgcggcggcgcacattttctggcgggcgcgcccagcctgcccccgcccctgaccccggaacaggaaaaagtcctgctggcccgtatggctgcaggcgatgccgccgcccgggacgacctgatcacccacaacctgcggctggtggtgtaccttgccaaaaagtacgaaagcagcggtgtgcctgccgaggacatgatcagcattggcaccatcgggctgatcaaggcggtgaacaccttcacgccggagcgcagcatcaagctggccacctacgccagccgctgcatcggcaatgaaattctgatgtacttacgcaaaagctccaaccgccgtcaggaagccagcatcgacgaaccgctgaacgtggatggcgacggcaacgagctgctgctttctgatattctgggcagtgatgagaaccagatcagccagcggctggaacaggatgcggagcgcgccgtgctgcgccgggccgtggacagcctgtccccgcgggaacggcagatcatggagctgcgctttggtctggcggacggcattgagcgtacccagaaggaggccgccgacgcactgggcatcagccaaagctacatttcccggctggaaaaacggatcatccataccttaaaagtacaattggaaaacgagtgaggtaaaaaacgcggactgccgcccgctgggcttgacaatccgcgctgattcgcgtataataaagctacaaaaggcgctggccctgcaaacggctagttccttaccggattagtcaagaaaagatgaccgctcggattgggactcgaggcggtcattttttctttttgtcatcactgtgagaaacagtccatgtaatttcaaacgtaacgtagattgctccgccgagaagcgtgagcagaagcacgacctgttcaaacgtcatggtgcatcccccctttccgcctttgggcatccggggagaacgagatcttcaagaaaaaatcgtctttagccggcacccaagtaccggtaaggactagccgcctgcgtttgtgggcacagcgcctgatggcggcgttgccgccgcaaatacagcatatcataaatctgcacgaaaaacaatattttgccgcgctttcctgtcaaacgggaaagcgcacagttttttccacgcatacaatgccgctgcgcatcccatactcccggtgaagatcaaaacagaccgggggcgtttggatgtacaacaaagtggagctgtgcggcatgaacactgcaaagctgcctgtgctgaccgaagccgaaaagcgggaactgctggcccgcgcccacgccggtgatgcagcagcccgggaacaaatggtggaaggcaacctgcggctggtgctcagcgtggtgcagcggttcgcccagcgcggcgaaaatctggacgacctgtttcaggtggggtgcatcgggcttatcaaggccatcgatcattttgaccccgcccagccggtgcgcttctccacctacggcgtgcccatgatcattggcgagatccggcgttttctgcgggacaacaatgccctgcgggtgagccgcagcctgcgggataccgcctaccgggccatgcagagccgcgaagcgctggaaaagcagctgggccgcgagccgaccatggacgagatcgcgcaggcggcgggccttgcccggcgcgaagtgacggcggcgctggaatcggtggtggagccgatcagtctggaagagccggtgtacaccgatggcggcgatgcgatgtatgtgatcgatcaggtgcgggacccggacggcgaggacagctggatcagcgggctgcagttccggcagaccgtggccgggctgaccccgcgggaaaagcggatcatggagctgcgctacctgcagggcaagacccagatggaggtggcgcgggagatcggcatcagtcaggcacaggtcagccggttggaaaaaggcgcactgagccagttccgcacccgggactgaacctaaaaaaggcggcacagcttccgttttgttcggaagtgtgccgtcttttatctgcggctgtatttgcgccgggtggccgcaccgccgcgcagatgccgctctgccttattgcaggccagaaccgcacgcacctgccggaacagctccggctgcagcgtccgcagccgcaccgcaacatccttgtgcacggtggacttgctgcacccgaacaccgctgccgccgcacgcactgtggcccggttggccgcgatatattcgcccagctgtaccgccctctgttcggggtctcccttcatatccagactcctcccattgtgaacttatggtacagcctatgcacaggccggggcagatatgttccgccggggcttgacttttgcgccggacgcgctatacttttgcatggacataaaaacaggggtgccgaaaggctgagatccgcgttttgcggagtacccttttacctgaccggacaatgccggcgtgggagtttgcagaactgtccgttctttcacaaaccccgtgcgcctgctggaaagcgggcgcattttgtttttgtgtactatcgttctgagaagaggaatccctatgaccaaaacctattccaagacccgcattctggtggagggtgcgctgatgatcgccctgtccaccgttttgagcatgatccagatcccgctcatgccccacggcggttccatcaccctgttcagcatggtgcccattctggtaatgagctaccgccacggcgcaaagtggggcatcatgaccgctttcgtcaacagcctgatccagcttgtgcagggccttggcaatctggcatactgccagaccctcacggcacaggtgggctgcgtgctgctggactaccttctggccttcacggtgctgggctttgcctgcctgatcgcaaagcctttccgcaaccgcaccgtgggtgtcggtgtcagcgcctttgtggtgtgcctgctgcgctttttgtgcagctttctgtccggttacatcgtctggaaggactacgactacgctttcagctggatgaccgagatcggctttcccggcatctccaacatgagcgtggacggtctgtgctggctgtacagtgccgtgtacaacgccacctacatgctgcccgaagccattctgaccacggtccttgtggtgatcctgatccgtgtcgcaccgcagatcttcgacccgcagaacgcaagagcgtaagttttttcgcagtcatttttcccgccgggaagggcatttccccggcgggaatttttttgcagaaaatcccaaaaaagctgttgacaatccggcaaagcgctggtataattactcctgtcgtcaggcacggcacaaacatctgggggattagctcagctgggagagcgcttgcatggcatgcaagaggtcaccggttcgatcccggtattctccaccagaaggaaaagcaccgcacggaaacgtgtggtgttttttgttgttaccgaccaaaggagaaactatgagctacgcgatcgtattcagcagtaaaacaggcaacacaaaattattggcagacacgctgcacgcctgtctgccacaggaaaactgctgctattttggcaccccggaccctgctgccatggaagcggacgacctctatgtgggcttctggacagacaagggaaacgctgacgaaagtactttggactttttgaagcagctgcacggcaaaaatatcttcctttttggcaccgccggctttggcggcagtgaggagtatttcaacaagatcctgaaaaaggtggagcgttcactggacaggagcaacacggtcttcggccgttatatgtgtcagggcaagatgccgctttcggtacgccagcggtatgagggcatgaaaaagcagccgatccatctgcccaatctggatgcactgatcgagaattttgacaacgccctttctcacccggatgcagaagatctggaacggttaaagcaggcggtaaaatgatcaaaaggcagcggttttcctcaaacagaggaagccgttgccttttttgcttagcggatggtcctacgctcctgcctgcggctccgcggttcttatcccacgcttcttttataaaagaacaggtactgctgcacgatgcctgcttccagcccgaactgcgggaacgggtcctgcccggcaaattcgtcccggatgagccgttcgatccagacatccaccggcacacggcccacacggccatagccgaacagacacacgcagtttgccacctttttgcccacaccgtccagttccatcaaacgggcaaaaagtgcttcatcgggcagggaagccagcttcttcaggtccagtgtgccctctgccgcctgctgcgccgcatgcagcacgtagcgggtgcggtagccaagaccgcactcctgcagcgcctgctccccggcacagcagagcgcttctgctgtcgggaacgcatacaccggcccttcgctatcgctgcccagccgctcgccaaaccgctccgaaagcagctctaccgccctgcggatagccgggatgctttttcgctgcgagatgatgaagctgaccagcatctcccactcatcctgacgcagcacccggatgccccggccatattccatggcacgctgcagaaagtcgtcccggctgtccagctttccgcgcagggcggcatagctgcggccaaggtcgaagtaaccgtgccagaaggtttcccatgcgcccggctcacaccgcaccgtgtaggttccgctgcgcagtggtctgaggtaaagcagctgtctcccggaaacaaaccgataccagccctccgcctgcttccgggggcgaaagcactggccgctttccagaattttgtccgggtcgaaatcatcccggatctgaaccgttttctcttccagctccattgcccccatcacagctccagctcccggtacacttcgccttccagcgttttccaaaggaaagtctccccttccagtgtcatatagctatgtgcactcccctccttcgggatgctcacagaaccggggttcaggtagagattgccttcgccgaactctgtccacgccggaatgtgggtgtggccatgcagcaggacatcccccggagccagcggcggcaggtttttcaggttgtgcacatgaccgtgggtagcgtaaatgagccgcctgcccaccggcagcaccgcatagtcggccagaatgggaaaatccagcaccatctgatccacctcagcgtcacagttgccccgcacgcacaaaagcgccggcttcagcccgttcaggagcgggatgacctccttcggggcatagccctccggcaggtcgttgcgggggccgtgatacaaaagatcccccagcaaaagcagccggtctgctctctcccgctcaaacgctttgatcatttttttgcaataaaacgccgacccgtgcaggtcggatgcgatcatccatttcatggcaggattctccttattttataaagtatctatttttattttagcctcccggtgaaaaatggtcaagtctataaaagtcatactttatccatttgacctcttgacatctgccggaagccgtgttatcctacagttaataaaattcgtgtggatttttacagcagtatgctacttttcgccacacaatgacttcaaaaaagccattgtgtggcttttttgcgtctgcttttatcttcgagcagtctcgccctgacgattccgcggctgcagtaattcatttcttttctctacaggagcaatgcaaacactatgaacgagacctttatgaaagaaaaaccggtgctgccgctgctggtatccatggcactgccgaacgttatctccatgctggtgaacagcctgtacaacattgtagacagcctgttcgtggcccgcatcagcgaagacgccatgactgcgttgtcgctggtgttcccgatccagaattttgccaacgccatcgccatcggcttcggtatcggcatcaatgccatgatcgcactgtaccttggcgcgggcgaccacaaaaaggccgagactgccgccacccacggtatggcgctgagcctgatgcacggcattctcatcaccattgtcagcattgtcatcatgccgggctttttgcgccggttcaccagcgacgcaggcctgatcgcatccggcatcacctactccaccatcgtattcctgtttgccaccatcaacatggcggcactggcctttgaaaagatgtttcaggccgtgggccgcatgaaggtgactatggcggcgctgatctttggctgtgtgtgcaacatccttctggaccccatcctgatcttcggccttggcccggtgcctgccatgggcattgcgggtgcggcccttgccaccggcatcggccagctgctgagcctgtgcgtttaccttttcgtttacgtccgtactgagctgcctatccgactgcgccgcagctgcctgcgcccggatgctgcactggacggcaaactgtatgccatcggcgtgccggccatcctcaatctagccctgccctctctgctggtcaccttcctgaacggcctgctggcgggcttttcccagagctacgtggtggtgctgggcatttactacaagctgcagaccttcctgtatctgcccgccaacggcatcgtgcagggtatgcgcccgctcattggctacaattacggtgccaaacagcacgcccgcgtgaaaaagctctacgaactcaccctcatcatgagtgctgccatcatggctgcgggcacggtcatctgcctgttcgcttcccgcccgctgatgcagctgttcacctccaaccccgaaaccgtcgccatcggccagactgccctgcgcatcatctgtctgggctttgtggtttctgccgtatccaccacctcttccggtgcactggaaggccttggcaagggcgcagaatcgctggtcatctcgctgtgccgctacatcgtattcatcatgccgctggccgctgtgctgtgccatttccttggtgccaacggcgtgtggcatgcattctggatcaccgaagtgctgtccgccatcgtggcttacccggtgtaccgcaaggcagttggaaagtgctgagccttcttgaaagcgctggacggcgaaggccaagtaaaataaaatagtttcaagcagttgagggagagtttgccaaaaaacctccctcttttttgtgcattttatttgacagtacgcaaaaactgcggtaaaataaggtgtttgttttccggcatttcggctggaaaagcgcaatttaacagaggatgtgggaaatatatgatcgagacgatcacggccgtcaatcaggcggtcaaccaattcatctggggcgtgcccgccatggtgtgcatcatcggcgtaggcctgctcctgagcgttcgcacgggctttttgcagatccgcaaatttccctacgccatcaagatcaccattggacgcatgttccgcaaaaaagacgcttccgatggcgccatgaccccctttcaggcggtgtgcaccgcgctggccggcaccgtgggcaccggcaacattgccggtgtggcaggcgcgatcgccattggcggaccgggtgccgtgttctggatgtggtgttctgccctgcttggcatgtgcaccaagtttgccgaggtcacgctggcggtgcactaccgtgagcgcagcgaggcgggcgaatgggtaggcggccccatgtactacattaaaaacggcctgagcaagcattggcagtttcttgctgtgctgtattccctgtttggcgtgctgaccgtgtttggcaccggcaatgccacacaggtaaataccatcgttgccgctatcgataccgctctgctggagtacggcgtggtgggcggcggtgcgctttctaccctgaacctcgtggttggcatcgcagtggccatgctggtggccatggtgctgctgggcggcatcaagcgcattggcagcgtgagcgaaaagctggtgccctttatggctctgttctacatcgtgctgtccgtgggcgttatggtgctgaactttgagcgcctgccctatgtgttcgagtccatcattgcgggtgcgttcaacccggcagcgttcaccggcggcaccatcggcagcctgttcgtcagtatgcagaagggtgtgtcccgcggcattttctccaacgaggccggccttggcaccggttccattgcccacgcctgcgccgacaccaaaaagccggtcaagcagggcatgttcggcatctttgaagtgtttgccgataccatcgtcatctgcaccctgactgccatggtcattctgtgcagcggcaccaccgtgaactacggcaccgccgccggtgcagagctgaccatcagcggctttaccaccacctacggcggctgggcttccatctttaccgccgtggccctgtgctgctttgctttttccaccatcatcggctggggcctgtatggttcccggttcctggtgttcctgtgccgcagcgataaggtggcaaagcccttctttctggtctactcctttgtgtccattctgggcgcaacgatggatctgggcctgctgtggagcatcgccgataccttcaacggcctgatgagcattccgaacctgctcgcgttgctgctgctttccggcacggtggtcaggctgaccaaagaattttttgcatcggagggctgattgcccacaacaaaaagaggctgttgcactttcggctaaaacgatgtgcaacagcctcttttgttattcgggcaggtgtaccggtacccgcgccacacagtgcacccagcaatcgccgtccttgcgggtatttcctgccgcgggagcgggtggtgcgcctgtgggagggattcaaaaagcgtctcggcctttgccgataaaaagcatccaaaaaatactgtacgatacccggaactttttcagggccaaaacggctccaaaaggttccgggtctttgatttttcgcaatttccctgcgcaggctgctaccgcattttttcaatccccttattctgcccgcgtccggctcttttcaacccggacagttcatgttacaatatacattagaaataaaaaatgaatcgagggaatgaaccttggatttttatggtaccatcggcccagcctgcgcacagccggcgatcttgcagcacatggtggaagccggcatgaccggcatccgcatgaatctttcccacgggccgctggcggcgcacaccgactggctggccatgatccgcgcagccggcatccgtcagctgctgatcgacctgcaggggccggaactgcgcatcggcacgctggcagagcctgttgctctggttgagggcagctctatacgccttggcgcagacggcgtaccttgcccggcagctctggtacaggcggctgcgcccgggcagcagcttctgctggacgacggcaagcttctggtgcaggtcacacaggcattgccggaagcccttgtgtgcaccgtggtgcgcggcggcaccctgcagagccgcaaaagcattgctgcaccgggccttgcggtgccctcgcctaccctgacggaggaagacctgcagaacctgaaaattgcaaagcagtgcggtgttaccggtgtgatgctgccttttgtgcgcggcaaagcagatattctggccctgcgccatgcgctggaagaagccggggctgcggatatccgtatctttgccaaaattgaaaacatgatcggtgtgcgtgccctgccggaattcatccaccttgtggatgaggtggtgatcgcccgcggagaccttggcaatgccatgccgctgtgggagctgccccgctgccagaagcagctttccgccgcctgccgggctgcaggcgtgccctttatggtagtgacccagatgctggacagcatgtgcacccgcgcggtgcccacccgtgccgaggtgagtgacatttacaacgccgtgctggacggcgcggccagcgtgatgctgaccggtgagactgctgccggacagtacccgatgcaggccatggaatatctggtgcgcacagcgcagacagcccttgcctgacctttgcggagtttttgcgcaaaagggatggcgcattgtgtcagaatacagtataatagacgtaaatatttcttgttcagaaaggttttttgctatgggaatcgttgtgctcggtgctgtttttgtggatatcaaaggctatcccctttccgcctatattccgggcgggcgcaatgccggccgcattgagcaggtacacggcggagtgagccgcaacgtggtggaggatatcgccaatgtagagttgcgccctacctttgtcagtctggtggacgacaccggcatgggacaggatgtgatcaacaagctggagaaccacaaggtgaacaccaagtacatccagcgcgtgccggacggcatgggcacctggctggccatctttgacaacgacggcgatgtgcatgcagccatttccaagcggccggacaccactcccctcaccggccttttaaaggaaaagggtgacgagatctttgccgactgcgatgccattgcgctggagctggatctggaaaaagatactgtaaaacaggtgctgcactacgccaaaaagtacaacaaaaaggtttttgcggccatttccaacatgagtattgccatggagcgccgggatttcctgcagcagatcgattgctttgtgtgcaaccagcaggaagccgggcttctgttctccgatgattacggccatctggccccggacgagatgtgcagggttctggccgccaatgtgcacagcgccaacattcccagtatggtgatcaccatgggcggtcagggtgccgtatatgcccgcgccaacggcgagtgcggcgtggtgcctgccaagaaggtggatgtgatcgacaccaccggcgcaggcgatgccttctttgccggcaccaccatcggcctgacctacggcaaaacgctggccgagtcctgcgagatcggcagccgactggccgcatcggtcatctgcatcaccgagaacgtctgcccccgcttccgcccgctggaattcgggctgaacattccggtggtggattaaagtaatatcagaaagccgggcagactgcggtctgcccggctttctttttaggattcggggaagaggtttatatcatgcttccagcacctttttgccggtaactggatcagggatatcaagcaatgccagaatgatggccatgcggatatacacaccattgtgcacttgatcaaagtaggcggcacgcgggtcgtcatccacatcctttttgatctcgtcgatgcggggcagcggatgcagcaccggcatatcctgcggtgccttctgcagcagcgcttcgtccagctggtagcagcctttcaggcgcaggtattcttcttcgttgaaaaagcgctcctgctggatacgagtcatgtacagcacatccagatgcggcagctcggcttcaaggtcagccgtttccttatagatctgatgggtcggctccagcgattcattcttcacatactgcggcaggcgcagatcttccggcgagatgaacacgaaccggttgccctcaaactggctcagcgcagcggtcagggagtggaccgtgcggccaaacttgaggtcgccgcagaagccgatagtcaaatgatccagccgccccttgcgctggcggatcgtcatgaggtcgatcatcgtctggctgggatgcgcgtgcccaccgtcgcctgcattgatcaccggcacacgtgcagaaagggatgcccgcagcggtgcgccctctttggggtggcgcatggcgatcacatcggcgtagttgctcaccacgcgggcggtgtcctccaccgtctcgcccttgctggcggaagaaagctgtgcccctgcaaagcccagtgtcttgccgcccagccgcagcatggccgattcaaacgaaaggcgggtgcgggtggaaggctcgtagaacagggtggccagaatgcgcccatcgcacaggtgggcatagggtgccgggtcggcctccatccggtcggcaagatccagaagggccagctgctcttccagagaaaagctgttgggctcaataaagtgtctcacagccatgctcctttcagcacgaacttctcgcgctcggctccggtggagacgaactggatctcatggcccagctgcttttccagaaattccacgtaagccttggcctctttgggcagctcatcccagctcttgcagccggagatatccttgttccagcctggcagcatagtgaccaccggctctacacggtcaaggtcggacagcgggtcgaagctggggacttgcacgccatccaatgtgtaaccggtgatcaccgggatctctttcatgctgctgagcacatccagcttcgtcagggcgatcttgtctgcgccctgacaggtaaggccgtagcggctggccacacagtcgaaggggccgacacggcgcggacggccggtggccgcaccatactcgccgcctgccttgcgcagctgttcattccagtcctcgctcatggcgttctcggcggcaaaggggcctgcacccacgcaggtggagtaggctttcagcacgcccaccacatggtcaagacggcagttcggaatgcctgcgcccagcggcgcataggctgccagcgtgttggagctggaagtgaacgggaagataccgtaatcgatatcgcgcatggcacccagctgggcttccagcacgatgcgcttgccgctgtcgtgagcctgcttcaaaaatgcacccacatcacagatatacggtgcaaactgtccggcctgcatccggcaccattccagcagagcatcgtagctcatgggttcctgatgatagcagccacccagctccagattcttggattccaggatcatgtgcaggcggtcctgcacgcgcttttcgtccagatgcagcagatcgcccagacgcagggtctttttgcggtatttgtcgctgtaggcgtaggcaatgccgcggcgggtagaaccaaaggccgcacccttctgggcaaggcggtcctcttccaagccgtcctgcaccttgtgccacggcatggagatggtggccttatctgaaagtttcaggttttctgagcctacctttacgccgcgctcctcaatggcatccatttctccggccagatggtcgaggtcgatcaccatgcccgcacccagtacacagacaacgtccgggtgcaggatgccggagggcagcaggttcaggatgaacttgccctgctccgttacaacggtgtggccggcattgttaccgccctgatagcgggcaacaacatcggcatgttcggctaacagatcgatgacgcggcccttgccctcatcgccccaattgataccagtaactgcggtaagcataacttcttatttaccttctttttcgttatttacaatagcctgtaccttggtgggcagaccatagatgctgataaaaccggtagcatcactctgcttgtagtcgccgccggcagcaaaagttgcaatgtcctcacggtagagggaatacggagaccaaacaccggcattgatcatgttacccttgtacaactccagacgcaccttaccggtaacgttttcctgcgtggaggtgacgaaggcactcagagctttgcgcagggggctgaaccactggccgtcatagaccagttcaccaaatgtgatggccagctcgcgctttttgtgggcagtgagcttatccagcgtcagagtttccagcacctcatgagccttatagaggatggtaccgccgggcgtctcgtacacaccgcggctcttcatgcccaccagacggttctccaccacatcgtacaggccgatgccattgcggccgccgatctcattcagcttggcaatgaggacggcaggcttcatcttttcgccgttcaggctcaccggcacgcccttttcaaatgccagctccacgaactcggacttgtccggtgcggtcttggggctgacacccagctccaaaaagcccggcttatcgtactgcggctcgttgcccgggtcctcaaggtcaaggccctcatggctcaggtgccacaggttcttatccttggagtagttggtctcgcggttgatcttcagcgggatgtgatgtgcctcggcatagtcgatctcttcgtcacggctctggatatcccactcacgccacggagtgatgatcttcaggtccggtgcaaagtgcatgatggccagttcaaagcgcacctgatcgttgcccttgccggtgctgccgtggcacacggcatctgcaccctcggcatgggcgatctccaccacacgctttgccagaatgggtcgtgcaaagctggtgcccagcagatagccctcgtaatcggccccggcctgcatggtggggatgacgtaatcctccacaaattcatcggtcagatcttctacgtacagcttggaagcaccgcttgccttggcgcgctcttccagaccttccagctcgcccttctggcccacattgccgcacactgcaatgacctcgcagttgttgtaatgctctttcagccatgggatgataatggaagtatccagaccgccggaataggccagcacgacctttttgatctcagacataagaaccgcctccgttcaaaccactttatacttttgaattccctcttgcaatttttgattgcggtgttattatactagcaagcagagaatgtgtaaaaagtatcctgcacatgatcacgatacaaaattgacatgaaagagggcacgccgccatgtatgtggactgggaatattacaaaatcttttattatgtcgcgaaatatcagaatttcaccaaagccgcgcgggtgctgggcaacaaccagcccaacatcacccactcgatgaaccggctggaaagccagctgaattgcgtgctgttcatccgctccaaccgcggcgttacccttaccccggagggtgaactgctttactcccgcattgcatctgcggcggtgcagatccaggatgcagaagaagagctgagcgccagcgccacgctggaacacggtgcgatcagcatcagcgctaccgaaactgcgctgaacatctaccttgcagaaaagctgcgcgccttccacacggactatcccggcatccgcctgcgcatctccaaccactccacgccgcaggctttgcaggccgtgaaaaacggcgaggtggattttgccatcatcaccacccctgccgaggtggaaagcggcctgaaaatggtggagctgaagcccttttatgaggtgcttgtgggcggcaggacctttactgcccttgccagccagaacctttcgctgaaggagctgaacaattatccgctgatctccctgagcgacgaaagcatgacccgcgccttttaccggcagttctttctggatcacggtgcggtgctgaagccggataccgaggctgccaccaccgaccagatgctgacccttgttaaaagtgagctgggcattgcattcctgccccagaccatggcacaggatgcactggcccgcggtgagatcgtgcagctgcatctgcaggagatcatccctcagcgctctatctgccttgtgtacgaccatcaccgcccgctgaacacggcagcccgcaagttccagcagatgctgaccaaggcggcccccaagcgcccgtaacacagataaccgccgggcctttccctgcaaactgatctatacgggactgttgcaaaatagctctctgaaaaaacaatgcacaaaacccggaaccttttcacagccaaatcggcttaaaaaaggctccgggtttttgattttgtgctatttctttgtgcaagttgctatcgcatttttattttgcaacagtcccctgttttatttttacttttcctggatctgtttgccggtgaggtgttcaatggtaatctcgtaaagctgcacggccttgatgtccagcgcaatttccttttccacctcttccttgccggggtaatacttcatgccaagctcccgcacgcgggcctcggtagcagcggcatcgtcgatcagatggcagcggccaaacaccacggtgctctgcacataaggtgcccagtcgcccggctcaaagtgttcgttaccgtaaacggtaaagcataccttatcattctgtttcagcgcgtccaccttctggccggactttgcaccgtggaagtagattttgtcgtgctcctgatcgtagtaataatttaccgggatcgcaaagggatagccgttgtcgccgttcactgccagcacgccccgccgggactgctgcagcaggtgctttgcagcttcttccgggatggcgcggctggctcttctcatgggtctgaacatttttgtttcctccatgtatcgcaggtttgcggtgcgcactcatgcacccttgataatgcggatgagggtcttatccagctggatggtgcggttccacgggttcaggatgatgccgctgatctccggcacggcaagcgctgcatcaaacagcttgtccatatccacaagaaaggtggactgcaccggctcggctcccttcatttcctcgtcaaagctggtgaatgcataccaccagcttgcgccatcggccgtccggatggcccgcagctgcatctgttcactgcccaaattgggctccaccgccacgacaagctggccatgctcctttatgcgccgccggatcacggtaagggtgtgggccagctgttcctgtgtgggctcctgctgcagggcggctaccgcctgctcgatcttttcgttgccgttcaggcccttgtctctgggttgattcattgaggttggttcctttctattgtattttggcagagggaataagcgcagctcatcacagcagcagatcgaacaggccgatcattaccggcatagacacaatggaaagcagagtggtcagcacatacagcgcgctggaatgcgccgcatcgcggtcatagagctgagccatggaggtaacagtagcacaggcaggggtgatggcggcaaggtagaccgtcatcaggatgttcttgccgtcggccacccagctggatgcatggcagacccacagcagcaccagaaccaccagcgggcataccaccagacgcagcactgtgggcagatagttgcggcgggtgcagaacacctcccgcagcggcttttctgcaatggccataccggccagcagcatgcccatcggtcccatcatgttgcccactgtgctcatggtattctgcagcggtgcaggcagcaccacacggaaccagtacagcagtgcaccggctgcaatggcgatcatgttgatattggtgagcacctttttccagtccagcgcactgctgccctgcaaaagggaactggcgtgggtccacagcagcaccagctgcacaatgatgaatgcgcaggagtaaatgacatacgcatcgcccatcagagccttgaccaacgggatcaccagtgcagcggcgttgctgtagatcacattcacctgctccacggcatccagcttgagcgggcggctcaacagggcgctgagcaccagcagcactacatggatagccgccgcaatagccatggagtacaaaagtcccttgcggatctccggcgtatcgtcgatctggaatgcgttgatgatcacgcagggcgtgaccagatacaccatgaccaccgagagcacccggctgtcgctggccttcagcagccctaccttgaccacagcatagcccatgatcagaatgaggaacagctgtgcgatctgctgcatcaataacagacttatctccattgttttttcctttccccttccctttttcaaaacccaaagggagagccgccttccgcaaggcagctctcccttttttctgattttatttgccgctcgtcagccgcgccacatgcaacgccagataggcggtttcctcgttgggcaaaaacacgccgtacttgcgcagcacaaaggtgcgtattttttccgcgcaggtcaccgctgccggataattctgctgcatctgctggaacaaaaagtcgtcttcgctgtccatcagtttgccggagaagaaccgctcggcaaaatactgcaggtggctcacgaaccgcgcatagtggatgctctcggtgctcaccgggcagtgcatactgtaggtgacaatgttggacagctcaccgatcagctgcgctgcccgcatggcatcgtagccggcctgcgggtcctgccgggcgttgacgatatggaaggcgatgttgcctgcctcttcgtccggcagctcgatgccaagctttgcctttaccttctgcaggccgcgctggcccaccgcgtactccttgggataaaaatgcttgatttcccagaagatgcggttggtcaccacaagacccttttgctggcgctccactgcaaaatgtaggtgatcggtcagcagcagatagatgtgcgccgaaagcttgactcccagcgactgctctgcgtcgtccacaatgtcctgcgtcagttccagataggatgccggaatgctggaaaacagctccagcataggctgtgcgtccgggttggacaatggaaggaacacgcggtctgagggctgccgttcaatgggctcgcccgccttgcggccatagccgatgcccttacccagcaggatggattcctcgccgctgtcatcctgcaccagcacaacactgctgttcagcaccttctgaatgtgcatcggtccctcctccttccgttgaaaccttaagactgccgcttagtccagatcttcgccgttggaagcaatgaccttcttgtaccagtagaagctgtccttacggctgcgggccagagtaccgttacccatatcatcctgatccacatagataaagccatagcgtttggacatctgattggtggatgcagagatcaggtcgatgggtgcccatgtggtgtagccccacatctcaacaccctcatcgatggccttgcccatttcgctgatgtgctggcggaagtactctacacggtaggggtcgtggatggagccgtcggcctccaccacatccttggcacccatgccgttctccaccaccatcagcggcttgcggtaacggtcgtacagctcgatcaggctgtagcgcaggcccttgggatcgatctgccagccccagtcggtggagggcagatacgggttcttgacacccagcacggtgttgccgggggtacgctctgcgttcgggtccacagactcggtcatggtcatatagtagctgcaggaaacaaagtccacacagcctgccttcagggtggcggcatcctcaggcagcatttccacatggatgcccttgcgctcgaacatcttgaggatcaggcgggggtactcgccccagacatgcacatcggcgtagaacaggttttccagattctttgcctgagtagccagctcatcatcgggtgcgcaggtgcgggcataggtggtgagcttggtcagcatgcagcccaccttgctgccggggatgatctcgtggcagtcctttactaccatagcgctggccaccagctggtggtgcagggcctgatagcaggtctccagcatcttatcctcgggcacgcggctggggatgatgccggcggtggtgaaggggtgacggatcacgctgtccacctcgttgaaggtgagccagtacttgacctgatccttgtagcgctcaaagcacgcatggcagaactttgcaaagcagtcgatcacgcggcgatccacccagccattgtacttggtggccagtgccagcggcatttcgtagtggctcagcgtgaccagcggctcgatgccgttcttgtgcatctcagcgaacaggttgctgtagaactgcaggcccttttcgttcggctctgcttcctcgccggtggggaagatgcgggtccatgcaatggaaacgcgcagcatggtaaagcccatctcggcaaacagcttcaggtcttctttgtaatgatggtagaagtcgatgccgcggcgcttgggataataggtatcatccgggtcggccatggcggcagcaatgtgtgcgtcgtccatggcaacatgggacttgtaatccttcacgtcggtgttgggcttgtaggtggcaacatcggccacgctggggcctttgccatccacgttccatgcgccctctacctggttcgcggcaacagcgccgccccagaaaaagcctttggggaaactcatttatttgcctccagtttcagcagtgcggcaccgggcaccacagcgccctcggccacagtcttgatggtgaactcatcggcgttggtcacgacgatgggggtagttacatcataaccgtctgctttgattccgtcaaggtcaaacttcatcagcagctggcccttcttgacagtctcgccgtccttgacctgcggatcaaagcccttgccatcgcgcttgacggtgtccatgccgatgtgcatgagcagttcagcaccggcattggtcttcatggagatggcgtgcttggtgccgaacacggactcgatcacgccgtcagcgggagcgtacagctcacccttctcgggcaccacggcaatgccgtcgcccaggatcttctgggagaaaacttcatccttgacctcttccagagcaatggccttgccctgcagggggctgctgatggtggaatccgcagctgctgcgtctgcagcagtctcgggagcgggtgcagcggtctcatcctctgcgggggtctcgtccttatacaggaagaaggacagtgcgaaggaggccacaacagagattaccagaccaactgcagcccacaggatgttcttgccgttatccgggtcaacgaacatggccatgccagccagaccggggcccatggcaacgaatgctttgaccttcatcaggccaacgaacagaccgccgatgaagctggagaccacaacggacatcatgaccttcttgtgctgcagggtaacaccgtacagagcaggctcggtgatgccgaacaggccggagatgccagcggagatcgcggtagcgcgcaggttttcgtccttagttttcagagcaacacccaggcaggcaccgccctcagagatgttgtgtgccagagaagcaggcatgtacagcatttcaaagccggggtcagaaatagaagcaactgcgtaggggaccagagccttatgcatgcccatggagatcatgaagggcagcatggcagccagcagagcaacggccagccagcccagcgtgttgtacagagccaggatcacggtggtcagcagagcaccgatgttgtagcccagaggtccgaggacgaccagtgccacagggaagccgatgccgaagcacagcatgggcacaaagaacacgcggatggccttggggcaccacttgttggcccacttttcaataaaggacatgaaaatgacggtcaggatggccgggaatacctggccgccgtaagcgatgttctgcagcttgatgccgaggaagtaagcaccaccctcggtagccagcagagcggaaacgctggggtggatcatggcagcagccagagccaccgacaccagcttgttgcagttgaacttggttgcagtggtgaaggcgaccatgacgggcaggtagtacagagctgcatctgccacgccgacaaacaccttatagacgatatcgccgctgctcatcaggcccagagtgctcaacagcaccatcagagccttcagaacgcctgcacctgcaatggcggggaccagcggctggaagatgccgaccatgtagtccagaataatgccgccgatctcttttttgcccttgggggcagcgggagctgcagcctgacctgcattgaaggtgcccagcttgagcagctcatcgtacacttcgatgacatcgttgccgatgaccacctgacactgcgggccgctggaaataacgcccataacaccggcagtctttttcagggctgcagcatccaccttggaggcgtctgccagagtgaagcgcaggcgggtggagcagtgctcgacctgcacaacgttcttctcgccgccaaccagacgcagcacgtcggaggcagtctgcttgtagttcttcattttgttctcctttatcttgtgtgtggtggcatttccctgccgcccggccgaagcggacaaaagaaaaaagacccaacagaatgaccccgtgtacaatttctcccggaatcatagtatctggctacaattcacccaaaagaaaaggtattcgtcattccatcagatcctgcctgcattaccagtaacatgtccaactggatattgtggtattagtatatcaatcatcttttcgtttttcaatatgactttttcacaaaataaatcttaaaaaattatgaagttcgcacattcatttgttttttcacatagctgtcggtgtgtgctcgtatactcctttcaccgcctgcactgatgccggccgcacatcttgcgcaccgcgccgccgcttgttataataagtgtaacgatctgtttattactttttacatacaggaggtacaatccatgcgcattgcttacgagacgatgctggccgaatttgagcgggtcctgaccaaatacggtttcagcccaaagcgtgcccatgaagcggccgagatctttgcccagaacagtctggctggcgtgttcagccacgggctgaaccgcttcccccgcgtggtggaatacctgcgcaagggcgagattgatcccgccgctgaggccgagtgcattgccagctttggtgccatggagcgctgggacggcaagcgcggctttggccctctgaacgccaagcacgccatggaccgtgccgtagagctggcacatcagttcggtattggcatggtggcgctgggcaacaacaaccactggatgcgcggcggcacctacggctggcaggccgcagacgcgggctgcatcggcatctgctggtccaacacctgccccaacatgcctgcatggggcgcaaaggacaaccacatcggcaacaacccgctcattctggccgtgccgcgctcgaacggggagcacatcatggtggattgtgccctgagccagttcagctacggcaagctggaaacgatgcgtctggccggcaaacagctgcctgtggtaggcggctacgatgcagacggcagcctgaccaccgaccccgctgccattgaagagacccgccgcatgatccccattggctactggaagggcagcggtctttccatcctgctggatatgatcggtactatcctgacgggcgcaaactcggtggcaacgatcggcacctttggcgatgaagtgggcctgacccagatcatgatcgccattgatccggcaaagttccagtccgccgacctcaccgatgccgtcattgatgccattgccgccgatgtggcatccagtgagcctgcagagccgggccgtgaggtgcgctgccccggcatgggcgagcaccgcagccgcaaggagaacatggagcttggcatcccgatagccgaggaaaagtgggccgaagttctggcgatgtgatgcaatgttaaaaggggtgtctctccggcagacagagagacaccccttttctttttatctgtggttttccgcaaatatccggcccagctgggacaagatatcatgcggcagcattccgtactcgccaagcgcagcagcggcacggtcggcagcggcaccgtgcagatacaccgcgcaggccgcagcttcgtatgcaggcaggccgcaggccagcagggccgccgtcataccggccagtacatctccgctgccgccccgggcaaggcctgggtttccggtagggtttgtgcacacgcggccatccggtgcagccaccacggtacggcagcccttgagtaccaccacagcgttccatttttctgcatactggcaggcagtattttcacggtccgcattgatctgcgccaccgaaagcccggtgagccgggccatctcgccggggtgcggggtcacgatcagctctcccgccgggtgcggcagcgttttgccctcggccagcagctgcgcggcggcgttcaggccgtccgcatccagcaccgcgctgcctgcaaagccgggcagcagcttctgcaccagcgtgcgtgtttcggccgcgcggcctgtgctctgggctgtaccgccaaggcccgggcccagcagcagcaccgtcgccttctggcgctggagctgtggaatgctctccggtgagatgccgccttcggcccccgccacgcagggacacaggcagcattccggcaggcgggccaccgcagctgccaataccggctccacgctggccagcattacaatgcccgcaccggtgcgcagcgcaccctcggcagccagcagggccgcacctcggtaatatgcgctgcctgccacagccaatacggtgccaaagctgcccttgtggctgtcgcgcgggcgcggcgggatgttgtgccagacaaattcggatgtgatctcggttgacattttatgcttccccctgcaccagtttgcggatctgcttttccacattctgcacttcctcatggaacatgcgggcggagacacgcagcgcgccgtggcccagaatgatgatctgctccatgccgtcggaagtagccacacgcacccgccgccccttgccgatctcatgagtaacgtgctcgatgaacatatcggcggtttcggcttccttggtgtagaccacatggatgttatggtactgctcaatgctgccggggctgcccggcacacgataggcatcgaatacaagaataagattgcacttctggtagccctgatagttgcacagaatatccatcagcttgtggcgggccgcttccagactgtcctttgcaagggcgttcagctcatcccacgcaaagataatattgtagccgtccaccagcagatattcgggcagaatttcccactgttgggcatcaaaatccgggcgttcccgcttttgcaccgggcggaatgccgccagcgggtcccgtttgatggggccataggtgcgctcgaagattttgagcagctcggcatcctcttccagtgttgcgcggtaagccgctgtccggcgctggggcacggcctgcgtctcctgctccgagcttttgctttttccccagccgctgtccacatgcatgtggctgcgcacctgatcccaaggcaccacaaagcccgcgccatgggcacagaacaccgaatccgccgggttgtcaaggtcgtgctccggctcgtagcccacagcttcaatgatctccgccgcattgtggcagggccggtagccgtccagcgtcagggtcaggtgtccccggccccgggtatagcccaccacctccatggggtagctgcgcatggtggccaccggtgcaaaaccggtgagcacagcagcctcttccccgctttctggcgggtcaaagctgccctccatgcgctggatatcggtcatggcacggccaaggttctccaccggcacttccagccgaaaggcataccatggctccagcagctggcttttggccagcatcaggccctgccgcaccgcgcgataggtggcctgccggaaatctccgccctccgtatgtttaagatgggcgcggcccgcaatgagggtgatcttcacgtccgtcagcggcgcaccggtcagcacgccaaggtgctgcttttcttccagatgggtcagcacaaggcgctgccagttcttgtccagcacttcttcccggcagtcggcggcaaactgcatcccgctgccgcggggcaggggttccagcttgacatgcacctccgcataatggcgcagcggctcgtagtggcccacgccctccataggctccgtgatggtctccttgtacagaatgccgccggggccgaactccacgttcaggccaaagcgctctgccagcaaactgcgcagcacttccagctgcacctcacccatgagctgcacatggatctcgcccaaagtctcgttccataccacatggagctgcggctcctcttcttccagccggtgcagcttgcccagtgccgcgtgcacatcagccccctgcggcagcagcacctgatagctcagcaccggttccagaaccggcacatcgctgtcgcgttccgcgccaaggccctcgcccgggcgcgctttggtcaggccggtgacggcgcacacctgccccgggccgatggcttccgccagcgtatactttacgccggagtacagccgcagctggtttgccttttcctcccacggctcaccatctgcttcgccggagagctgggcctttaccttcagttcgccgccagtcacgcgcagccatgtcaggcgcgtgccctgctcatcctgcgacaccttaaacaccttggcaccaaaggcatccagcgcgggagccggacgggtatagcggtcaatcccgtccagcagagcatccacgctttccagtgcatcgttttcggtacgccgcagcgccgaaccgaaccagcacgggaacacatgccggcgtgcaacggccgggatgaggtccgcatcggtcaactgcccggcatccagcatccgatccatcaggttttcgtcacatagggccagtgcttcgtcccggtcggcctgcggcacatcaaaggccacaaagccctcgcccagacggtggttcagctgggcgagcagttcttccctgctcttgccgggcaggtccatcttgttcacgaacacaaaggtgggcacatggtagcgccgcagcagccgccagagcgtctcggtgtggctctgcacgccgtcggtgccgcttaccaccagcacagcatagtccagcacctgcagggtgcgctctgtctcggtagaaaaatccacatggccgggggtatccagcaatgtgatatccgtattgcccgccgtcaacagggcctgcttagaaaagatggtgatgccgcgcgctttttcaagcgtgtcggtatccagaaaggcatccttgtgatccacgcggcccagcttgcggatcgcgccggagcggtagagcatggcttccgaaagggtggtcttgccggagtccacatgggcaaggatgcccagaacgatttgtttatgcgttgtttccatccgcttctcctacaatcaaaaattcatttttattgtagcacggatggagaaaaaagaaaagtttttgatttagaatggggtcgaaaccaaaaaacgcagtttatcttatcggcttttcgcgtgaaaaaacagctctggaaaatccgcagattttccagagctgtaaatataagaataacaattccgctattcatagccaaagcgaacgcgtcggccattttaacggtcaattactccacaatgatgctcttgccggtcatttcagcaggcacgggcagaccaatatacggcagcatggtgggtgcgatatctgccaggcagccgccctcacgcagcttcacatcgccgcagccaacagccacaaagggcaccacgttggtggtgtgtgcggtgaagggggtgccgtccgggttcatcatcttctcggcgttgccgtggtcggcggtgatgaaggcgcagccgccggccttcagcacagcggacaccacctgatccacagcggtatccacagcctcaacggccttgaccgcagcatcgaacacgccggtgtggccgaccatatcgcagtttgcaaagttcaggatgaccacatcgtacttgccgctctcgatgcgcttgacgcactcggcagcaacctcgggggcgctcatctcgggcttcaggtcataggtggcgaccttcgggctggggatcacgcagcggtcctcgccctcgtagggagcctccacgccgccgttgaagaagaaggtgacatgagcgtacttctcggtctcggcaatgcgcagctgagtcttgccattctcggacaggtactggcccagaacgttcttcagctccacaggcggataggcgacctcgcagttgggcatggtggcatcgtattcggccatgcagacatagttcacctgcttgcggccgccgcggcgctcaaagccggtgaacgcatcgtcgcagaagatgcgggtcatctggcgggcacgatcgggacggaagttcatgaagatcacggtgtcgccatcctgcacgcggccaccctcacaggtgacgcagggcagaacgaactcgtcggtcttgtctgctgcataggatgcctcgatggcctcggcagcgttggcggcatgattgccctcgccgtagacaaaggcagcgtatgccttttcttcacgatcccagttgttatcgcgatccatggcgtagtaacggccggagacgctggcgatcttgccgatgcccagctcgtccagcttggcctgcaggtcggccaggaagcccttgccggagtgcgggtcggtatcacggccatcggtgatgcagtgcaggtaaacgttctttgcacccagatgttttgccatttccagcacgccgaaccagtggtcagcgtggctgtgcacgccgccggtgcccaccaggcccatcagatggatggccttgccggcgtcgatggcagcctgcatgttcttaaccagaacagggttcttgagcatctcgccgtccttgatggacttggtgatcagggtcagctgctggtacacgatgcggccagcgcccatgttggtgtggccaacctcggagttgcccatctggccgtcgggcaggccgactgccatgccggaagcctcgatggtggtcatggggtacttttccatcagagcatccagatggggggtcttggcggccaccacggcgttgccgtaggtctcgcccggcacccagccgaagccatccatgatgcacagaagaacaggtttctttgccataaaattgaatctcctttgaatttaacaaatcagcgcccggcacagcgctggaaatgcggcgcagccgggcgctgaaacagctgatttaaaccgtcgatcagcccttggtggctgcgttgacgatcactgcaaagtcgggagccttcagggatgcgccgccgatcaggccgccgtccacgtcctttttgctcagcagctcctcgcagttcttggcgttcatactgccgccgtactggacagtggtagcctcggcaactgcctcgccgtacacctcaccgatgaccttgcggatctggccgcagacttcctcagcctgatcggcggtagcggtcttgccggtgccgatggcccagatgggctcgtaagcgatcacgacatttgccatctgctcagcggtcacatcacgcagagcgatcttggtctgcatacgcaccagctcttcggtcacgccctcttcgcgctgctgcaggctctcgcccacgcagatgatgaccttcagaccggcgttcagagcagccagagcgcgcttgttcacggtctggtcggtctcggcgaagtactggcggcgctcagagtggcccacaatgacatactccacgcccagatctaccagcatgtcagcgctgatctcgccggtgaaagcgccggacttctcgaagtgaacattctcagcacccacatggatgttggtgcccttggtcttttccacagcggtgaccagatcggtatacggggtgcagataaccacctcgcagcctgcgtcctgcacggcgggaaccagctcgtccaccagaacagcagcctcggaggcagtcttgttcatcttccagttgcctgcaatgatagccttacgctttgccttatccatgatactctatctcctttatttaccttctacttctatatgtgcagtctgtgcacaaacaaaaaggtgcggcggcgctaaagccgccgcacccatttacgatgccggaaaaattatgcgttctgaataactgcgatgccgggcagctccttgccctccagatactccagagaagcgccgccgccggtggagatgtgggtcatcttgtcgcccagacccatctgctgcacagctgctgcgctgtcgccgccgccgatcacggtggtagcatcgctctcagccatagccttggcaactgccagagtgccagctgccagagtggggttctcgaacacgcccatggggccgttccacacaacggtcttggatgccttgacagcatcggcaaacagcttcatggtctcggggccgatgtcgcagccttccatgtcagccgggatcgcggtgacgggaacaacagtggtctcaaccggagcgtcgatgggatcggggaagtccttgatgcagacagcatcaacgggcagcagcagcttcacgcccttctcctgagccttggccatcatctccttgcagtaatccagcttggaatcgtcgcacaggctcttgccgacctcgtagccctgagccttgacgaaggtgtaagccatgccgccgccgatgatcagggtatcgaccttctccagcaggttggagataacattcagcttgtctgcgacctttgcgccgcccagaatagcggtgaagggacgaacgggatcgttcacagcgttgcccagatacttgatttccttctccatcaggtagccgacagcggtatccttgatgaagtcggtgacacctgcagtggagcagtgtgcacggtggcagctgccgaatgcatcgtcaacatatgcatcagccagagaagccagctcttcgctgaactcaggcatgttcttggtctcttccttgcggaagcgggtgttctgcagcagaacgacatcgccgttgttcatggcagcaacagcagcctttgcgttctcgcccacaacgttgtcgtcgtcagcaaacacaacggtcttgcccagctttgcgctcagagccacagcaacgggtgccaggctgaactttgcctcggggccgttcttgggcttgcccagatggctgcacaggatgacctttgcgccatcgttgaccagcttctggatggtgggcagagctgcgttgatgcggttctcgttggtgatcacgccgtccttcatcgggacgttgaaatcgcaacggacaagcaccttcttgccgcagtagttctgatcgtcgatcgtcttcttacctaaacccatggtaataaactcctctcaagttttaatttctgaactagagtttcgctcgcattcgggggatccttccccgttactctactattataaacaaaaaccgtgcacattgcaaggtcgcaagatagataatagtttaacaaacatttgccgctgatgcacggaaatgtgtgtattttgaccgaaagccgcagccttaccgtgttttccggcagaacattccgcaaatgcggtcatacattccccatatgaacttctggttccgctgatcccgctcaaaaattgcttccacaccagcatagccgctcgccttatacttcctgaaaatattctgctttcagaggattattcgacacttctttttcaaagaattctttgaagccttcctccaatacatccagaaaatccggagtcaacccccacatattcatggatatcagataatttttctgtgacccagcaggtcacttgttccttaaaatgtgacctactgggtcacattttggcctcagaagccatctctgctagaggggaaaaaagaaaattctgacttctattgtcaaaatacgtatctacataatttaattcaccg

SEQ ID NO: 1123 - DNA, 14171 bp, Unknown
  gut microbiota DNA sequence
acagagtccaccagcgaatcgctcttttttcaaatcccctagacaaaaaaatcggcacccgcttttcagcgagtgccgattttgttaccctatagtgcgctttgatttttggcgtaagtggcgtaagtttggcgtaaatccgcttttgcgcgctccaaaaatcaaggattcatgcagttttttggcagctattagtacatgccgcccataccgcccatgtcaccgcctgcagcagcgggtgcagcagggggttccggcagatcagcgaccaggctttcggtggtcagcaccatctcagcgacggaggctgcgttctccagagcagaacgggtgaccttggtggggtcaacgatgccagcagcgatcatatcgtccacaaagacctcgttctgagcatcaaagccgtagttgggcttgttggcagagatgatcttgtcgatgatgacactgccttccagaccggcattcttagcgatctggcgcagaggagcttccagagccttcagaacgatcttggcaccggtgcgctcgtcgccttccagcgtgtcgcacagctcgcgcacagcggggatcgcattgataggagcagtaccgccgccggcaacaacaccttcctgaacagcagccttggttgcgttcagagcatcctcgatgcgcagcttcttgtccttcatctcaacttcggtagcagcaccgaccttgatgacggccacgccgccagccagctttgccagacgctcctgcagcttttcacggtcgaaatcgctggtagcggcctcgatctggctgcggatctgagcgatgcgggctgcgatggcatccttatcgcctgcaccgccaacgatagtggtgttctccttggagaccttcacctgacgggcatggcccagcatctggacggtagcatccttcagctcatagcccagatcggaggagatcacggtgccgccggtcagggttgcgatatcctgcagcatttccttgcggcggtcgccaaagccgggagccttgacagcgcagacgttcagggtgccgcgcaggcggttgacgatcagagtggacagagcctcgccctcaatgtcctcagccacgatcaatagtttcagaccgttctgcatcacctgctccagcagagggaccagatcctgaatcacgctgatcttcttatcggtgatcaggatagcggcgttgtccagatcagccaccatcttgtcggtatcggtgaccatatacggggtgaggtagccgcggtcgaactgcatgccttccacgatctcgttgtaggtctcagcggtggtcttgttctcctcaatggtgataacgccatcggaggtgaccttctccatagcctcggcgatcagacggccgatctcggggtcgcctgcagaaatagtgccgacgcgggcgatatcgttgctgtccttcaccttctggctgtgagccttgatggtctcaacagccttggcaacagccttgctcatgccgcggcggatatccatggggtttgcaccggcggtgacattcttcatgccctcggtgaccatggcctgtgccagaacggttgcggtggtggtgccgtcgcctgctgcgtcgttggtcttggtagcgacttcacgcaccagctgtgcgcccatgttctcgaactcgtccttcagctcgatctccttggcaatggtcacgccatcgttggtgatgaccggtgcaccgaactttttgctcagcaccacattgcggcccttggggcccagggtgatcttaacggtgtttgccagggtatcgataccggcacacagtgccttgcgggcatcctcgccctgcttgatctgcttagccataatcaaatcgctcctttaaagctcaattttcaaatatcagaggggaaactgctcagtcctcaacgactgccaggatatcgccctgacggacgatggtgcactcttcgccgtccaccttgacctcggtaccggagtacttgctggtgaggaccttgtcgccgaccttcacagtcatcttgacttccttgccgtccacaacgccgccggggccgacagcgatgacctcagccacctggggcttttccttagcactgccggtcaggatcagaccgcccttggtggtctcctcaacctcaacagccttaatgacaacacggtctgcaagaggaatgatcttcatagttcttgccctcctatagtaaaaatataatttaaaactttgctgtgtccaaagggcctcctgtcggctctttggttctttagcactccatttctctgagtgctaagtgtattgtactcatcttgacccaaaaaatcaagaccttttttgcttctttttgttaagattttatgacagatgaaaaaatcagccgtacagcgaaaaagagacagctttttcttgggcaaaaaagctgtctcttcttctggtttttcatgttcggtctgcactctgtgccgtcctctgcgctgcaaagcgctcaaaagcaggctttggcagaaggatgcgccctgccagcggctgtacctgtacagtgatctgctccttgggtgcgcattcaccgtctgccgtggcaacgatcggcccgcggccatccgcagcgcgcaggctcacctgctttgcgcggcggtaaatgaagtacggctctgcagccctgacgagctgaccgttctggaagtgcttgccgctcttgtacattcccagcagctttgcaatggtcacgcggctcaccttgcggatgatatatacatccagccagccatcgtcgggctgtgcttccggcgctgcacagaaaccgccgccataggtgcggccattgcagatggcacacatcaggcagtccacatccagcgtttcaccatcgatggtgtactccaccctgcggccgatgtgtccgcacagctgttccacaatggaaagcacataggccatctcgccgccgcacagcgggatgcgccggaacttcgggatgccgtaggcaacctgcgcatccagaccggcagcgcagatggtggccgaaaggccaaggctggtctgcatcagatcgatgctcaccggcccaccggccagctgggcatccagatccagaaactcttcctttgtaccaaaggtgcgcagaaaatcgttgccgctgccaaagggcagacagcccacggctgcatttgcatagccatagatcccggtgagcgcttcgttgaaggtgccgtcgccgccggcagtgaagacccgcagttcttccccgctctgccgggcctgctgcgcagcggcattggccagctcccgggcatgaccggcgtgatttgtgacctgaatggtatactcttccggcgcaagccctgcacgcgcggcggcaacattgatctgctgcggcagcgtacgggtgcaatcggccttaccggcagttgggttcaaaagaaacaatgtgcgcatggacttcctcctgcaattctgttgcttctatgataacagaaaaccaaaaggatgcaagagccaatctcacaatgtccctgccccgtacgcacaaaaaaggagcggatgtctccgctcccccctgcagacaaaaaaataccgccccgggtcttgtaactcagggcggtccttttgagcttcagatgctttacagtgttgcggtttcgtcctcccgcaggacgatagcaccatccgccgagcagtccgctgtccagtgctggcccacgcaggccgtgccggatgcgatctgatccgcaagtgcctgttccactgccctgtccactgcgcggcgcagttctctggccccgtaggcagagcgggcctttgctgccagcgcctgccctacccgcggtgtgtgatgcagctggtagccgctgcgggcggcacgctgctccagctggcacagcattttttcggcaatggcgcacaggctgtcgtcggccagcggacggaatacgatcatctcgtccagacggcctgccagctctggccggaaccacttttttgcctcctcaatggcctgcgcagactgcttttcaaacacggcttcgctgcccgccgcaaagcccagcggcgtgctctgacccgccaaaaaacgtgcgccgaggtttgaggtgagcagtacgatggtgttgcggaaatccgccttgcggcccatggcatcggtcagctggccatcttccagtatctgcaaaaggatgttctgaatgtccgggtgtgccttttcgatctcgtcaaacagcaccacactgtaagggcggcggcgcactgcttcggtcagctgtccgccctcgtcatggcccagatagcccggcggcgcacccagcagccgggcagcggtgtgctgctcctgatactccgacatatcaaatttgagcagggccttttcgctgccgaaccagctgaccgccagcgcccgggcaagagccgttttgcccactcccgtggggccaagaaacagcatggcacccatgggccggcccggctcgccaagaccggtgcggctgcgccggatggcacctgccactgcagccacagcccggctctggcccacgatctcggcgttgagacgttcttccagcttgtccagccgttcccgctcctgctcacctacccgctccaccggcacaccgctggcctgcgccaccacatgggcgatatcgtccggcatcagcgtgggctttgactgctttgcctgctcggcccggatgcgtgccgccgcacaggcttcgtccacaaggtcgatggccttatccggcagaaagcgccccggcagataccgcaccgaaagctccaccgcagcctgcagcgcttccggcggaaggcagacattgtggtagcactcatagcgcggcgcaagcccgttgaggatatccagcgcctgcgcaggcgtaggctcctctacctgcaccttgccgaaacggcgttccagtgcggcatccttctggatgtgggtgcggaactcttcggtagtggtagcgccgataatttgtatctcgccccgggccagcaccggttttaagatgctggctgcatcgatggcaccctccgctgcaccggcacccacgatggtgtggaactcgtctacgaacaggatggagctgccgtcccgcaccagctcttccagcaggttcttgaaccgctcctcaaagtcaccgcggtatttggtgcccgccacaaggctggccatatccagtgccagcagacggcggcccttgagcgcacggggcacacgatccgtggcaatgcgctgggccaatccttcggcaagggcggtcttgcccacgcccggctcccccacaaggcaggggttgttcttctgacggcggcataagatctccaccatgcggtccagctctgcttcccggcagaacaccgggtccagttcccgttccgcagcacggcgggtcagatcccggcagtacttatcactggcgcggctgccgcgcggcgcactgaccgtggtccgcatctgatacggcagtacgaactgcccggacagctggcggcactcccgcacggcatctgtgagctgcacgcccatggatgccagcaggatgcctgctgtgcagccgtcatcctccagcatggcgcagagcagatgttccggctcggcccggttcaggtgtgcgttctgtgccccgatgatggcgtaatccatggtgcgcttgaggtccggcgcaagagcgtagcgatccagatgcaaagccggtgcgcggcggctctcggccagctgacggcgcacctccggttcccggatctgcttgccctccagaaaccgtgctgccgccccgtgatcctgctgcaggatcgccagcagcaggtggccggtatcggctttttcgcagccaaggttcccggcaagctccaccgcactgcgcagcagctgatccgactcgtgcgaaaagcccttgtacccgccaaagccaagtttttcccaaatactcatttgcccgctccttgctgatgaaattcgttttcacaagaagtatagccccgaagcacagaaaaaaaacatctctttctgtcgggatgggaaaacaaaaaggagatacccgcaggcatctcccccttcgctgtttgatttttcagtccatttcggccagggcctttttcagattcttggcgacctgatccgggcagctggtattgcggaaaccgcagagcgtgccctccatgcggtcgatcacatcttcggccttcatgcccttgaccagacggcagatgcccttcaggttgccgttgcagccgccaatgacctccatggacgcaatggtgtggtcatcgttcagcacaaagttggtctgcttggaacaggtgccgctgttcgggaagctgaattccttgctcatagttcaaaatcctctctttttgacagaaatcccgacgaagatcgtctgcttctattatagagcagcgtgccggaatgtcaatgtgaccgggtcacacatcaataccgcggcgcttgtgggccaactccagaatgcgggccacctgatcgtctgccgtggtacaggtacccaccgggtgcggcaccttatggtttgcaccgtggaagtccgtaccgccggtatggatcagcccatactgctcacacagagcagcacactcggccctgtcctccgggctgttgcgggggtgctccacctcaatgccatcgatgatgccctctttggcaagctgacgcaccagcggcatactcttgtaaacggtcgggtgtgcaaataccagcaccgcaccggcagctttcgccgtggcgatcacttcctgcaccgagggatattttacctgatgcagcaccacaccgcgcggctcccagccaaagagataactgtacagcttgccgtacacagcatcgcacagccccagctggtgcagcgcttccataatgccgcttttgaacagcacaccgctgtcctttgcgtattccagcgcctgttccgtgcggaactgcgggtacagcgcttcgatctcctttgcgctttgcaggccgcactcgttgcggcgctgtcgcaggatgtcgcagtgctccttcagttcccggctttccgggtccgggaagtagcacagcaggtgcacgcgatgcttatgctcatggtcatagccggtcagctcggtggccgggagcaggcgcacgccgtcctgcacagggtgctcatagcagtagtttacgctgagcagggtgtcgtggtcggaaatggccatggtgtccagccccgcccgcgccgccatgagcggcaggcggtggatgggcacagagccatcggaacaggtggaatggttgtgaagatcgccgggcatggaaaatgaacctcccaagaaaatcagagaaaggcttcccccaaagaggaagccttctatcatatcagtgcttatagaaattgatcaggcagccgtcggccaggatcttgcgctcgtcggcggtcagcggggccatgtacaggctgaactcttttgcggtgtcgcccagcacataggccttgatgtcctgcaggtcgcccttgagggcctcgcggacattcgggataaagacatagtcgcccagaccgaagggcgttgcgcccaccagctgcagcggcagcataccccagttgatgaggttggagcggtagcgcttggtggcgtactcggcaacgatgttggcaccggcccccagcacacgctggcagctggccgcctgctcacgggcagagccatcgccgggcttgacggcaaagatggtggatgcgatctgcacatcgttccaagtcaggttttcgcaaccgggcaccttgtgcagctgggccagcacctcggcactgccctcgcctgcacggcgggccttttcttcggcctgcacggccttggcacggcccacatactccgggtccttgcggctgagggtaaactcggccagacccagaggattggaacggtaagacgaagtctcaccggaggggatcagctcgtcggtggtggtgacagggtcggtgatgtaagatgccaccttcagcagcaggttatcgcccagcggtgcaatttcgggccagtccttgatgttggggccaagcttgagcagagcatcgtaatcgcccttgccaaagccctgatacacgcgggtatcgtagctggaaggatcgtactgatactccggcacggtgggatcatagtcgatatcggtagccggggtcagaatgccgccgttggccgtggtggccgcaatgctgcgggcatccatcagtgccacaccggaaagctggccgttgccgggcttggagccttcgcggctggggaagttgcgggtggtatggcggatagacagcgcaccgttggcgggcacgtcgcctgcgccgaagcaggggccgcagaacgcagtgcggacggtggcaccgctggccatcaggtcgtggatgactccggtgcgcaccagttccatcatgatgggctggctgccgggatacacgctcagggcgtagtcaccgcagccgccggtgtggcccttgaggatggaggcagcttcataaatgctgtcgtacagaccgcctgcgcagcctgcgatcacgccctgatccacacgcagtttaccgttctcgatcttgctgcacaggtcaaggctgacatccttgcggccgatcagcttctgcacatcctgctcgcaggcatggagaatatcctcaaggtttgcgttcagctcttcaatggtaaatgcattggagggatgcatgggcagtgcgatcatggggcggatggcagaaaggtctacctctaccacaccgtcgtaataagcaaggtcggccggagccagcttcttatagtcggcggcacggccatgcaccgcaaggaatttctgcgtcgtttcgtcggtttcccagatggaggacaggcaggtggtctcggtggtcatggcatcgatggcgttgcgggtatcctgacgcagagacgcaacgccggggccgacaaactccatcaccttgtttttgacatagccgctcttgaacagcttgcccaccagcgcaatggccacatcgtgggggccgcagcctgcaggcagagagccggtgagataaattgcaacaacacccggacgggccacatcgtaggtgcggcccagcagctgctttgccagctcgccgccgccctcaccaatggccatggtgcccagagcaccgtagcgggtgtgggagtccgagccaaggatcatcttgccgcagcccgcaaacttttcgcgcatgtactggtggatgaccgccagatgcgggggcacaaaaatgccgccgtattttttggcggcggacaggccgaagcggtggtcgtcctcattgatggtgccgcccacggcacaaaggctgttgtggcagttggtgagcacatacggaatggggaatttctccagaccggacgcacgggccgtctggatgatgcccacaaaggtgatgtcatggctggccatggcatcgaacttgatcttcaggttttcggcatcgccgctggtgttgtgggcctgcagaatgctgtaggccatggtgccggtctttgcgttctcgatggctgcggcatcaaagccctttgccgccagtgcggcgcttgcttcgccgtctgcaggcacccattcaccgcgggcatagtatgcgccgccggtgctgcacttgatcatatccaacatctcgattcgcctctctttttgtatttcccgcccgccctatcttgcgggcactgccccagcagagcggtacgctgcccgctttgccctcttctgccgcgctgccaaagcacgcggctacggcccggaaagccgtatctgaaggttattataccatgaaaccacggaaagaaaaagcactttttacaaatgaattgtgaatggaggatgaagagacgggctctgtgctttttcttgacaaagaagccattctattgtattattattagcgttgtatgccgctgtggtgaaattggcagacacgagggacttaaaatccctttctggagacagagtacgggttcgacccccgtcggcggcataaaaagaccccccaagcttacgcttgaggggctttttattttgcttattttacaccttgccgccgtgcagctctgcatacatcttggaacggcactcggccacagccggggtcatgttcacatagtgcttatgcgggcactccagacgcagttcgctctcccaggtctcctcggtgagctgctttgcaatgtaggccttcttctctgcgatcgaaggcagctcaatggccagctgaccattcagcacatgcggcaccagcagctttttgaccttggtgggggtaatggtgacggtgcgctcgatggcatcggagtccagattgaccatcgtgacgggcttgcccgcctcgatgacttcatcatccatggcgatcaggtcacactgggcctgaccattttcatcgtagaggcgccacggcatcttcttgcccggaatgatggccttgctggcggaatccgaacacttcatcttgggagtgtagctgccgtccggctgcttgaccgccaccagcttgtacacaccgccgaacacggggtcggaagcagaggtgatcaggttttcgcccacgccgtaggagtcaaaatgagcgtgctcatacagctccatgttggcgatcttcttttcgtccagaccattggaagccaccagcttgatgtaaggcttaccggccgcatccagcgccttgcgcaggcgcttggagccgcgggccaggtcgccggagtcgatacgggcgctcttgacgcggcggttcgggtcgttggggtatttctcgatgaggtaatcgtccagtttaatgaggttgggcagaccgctctccatgatattataggtgtccagcagcagactgaccgaatccgggtaggtatcggcaaaggccttgaatgcatcaaactccgtggggaagaactcgatgaagctgtgcgctacggtgcccacagccttgacctccgcgccgaacttcatctcggccaaacagttggcagtgcccacgcaaccgcccagaacagcagcatatgcaccatcgttgccagcgctttcgccctgcgcacggcgggtgccgaattccatcacgctgcggggcgtgtgggtgttcaggccggtgacgcgggtagccttggtggcgatcagactgtggaagttcatggtctgcagcaggtaggtctcgatcagaattgcgcccacgaggtcgcactcgatgcgcaccatctgcacatgcgggtatgccaccgtgccctcgggcagagcgtacatgtcgcccttccactgataggtgcgcagatactcgcagaattcctcactcatgcccttggtgcgcagccaccagatatcctgtgcattgaagtggtagttcagcaggaagcgggtcagcttgcgctggccggcgctgatggagtagccctgagcatccgggttcttgcggaagaacatatcaaacaccagcgtggtgtccttgaatccgtgcaggaacaggcagtttgccattgtaaattcataaaaatccacgaccattgcggggttgtcgtagtcctcatctggaatataaggcacaaccttgatttcgtccatgaatagtatcctctcttctttacacccggcaaaggctccttgctgtcccctgccgttctgacctgtgggaaggtttgcgcgcctgcctgtcttgacagtgcgtttctatcatgatatcaccaaacgcagagcggtgcaagcatttttggaaaatcccggtcaatttccggtaagaaaaagccgcccatacacaaacagcacgggcggctttcagaacaaacgtgttaaccgttgatgatattgggggtagcattcttcagcacaacgtcgtggctgccgccctcaacgatggaggtagaggaaaccacggtcagctttgctttctgctgcagctccgggatggacagagcgccgcagttgcacatggtgctcttgaccttgtacagagtggtctgcacaccgtcagccagagggccggcatagggcacgtagctgtccacgccttcctcaaaactcagcttgctggaaccgcccagatcgtagcgctgccagttgcgggcacggttggagccttcgccccagtactccttcatatactggccgttgatgcgcaccttattcgtggggctttcgtcaaagcgggcaaagtagcggcccagcatcacaaaatccgcacccatggccagtgccagcgtgatgtggtaatcgtggacgatgccgccgtcggagcagatgggcacgtagatgccggtctccttatagtactcatcgcgggcctttgccacctcgatgacagcggtagcctgaccacggccaatgcccttggtctcgcgggtgatgcagatagaaccgccgccaatgccgatcttcacgaagtctgcaccagcctcggccaggaagcggaagccctcggcatccacaacgttgcctgcgcccaccttgacggtatcgccgtagtgctcacggatccagccgatggtgcggctctgccactcggagtaaccctcggaagagtcgatgcacagcacatccacaccggcatccaccagtgcgggcacgcgctcagcgtaatcgcgggtgttgatgcctgcgcccaccacatagctcttgttcttatccagcagttcgttggcgttcttcttgtgggagtcgtagtccttacggaacaccatatacttcaggttgccctcggcatccaccagaggcagggtgttgatcttgttatcccagatgatgttgttgcagtcgtgcagggaggtgttctccggtgcagtgaccagcttttcaagcggggtcatgaaggtggtgacaggggcatcatccggagtgtggttgatgcggtagtcacgagatgcaacaatgcccagcagcttgccgctcggagtgccatcggcagtgatggcaatggtggagtggccagtgcgtgccttcagctccagcacatcgtgcagggtggcagtgggggccagattggaatcggacacgacataaccagccttgaagctcttgacgcggcgcaccatggcggcctcgttctcaatgctctgagagccgtagatgaaggacacgccgccctgacgggccagtgcaatggccagcttatcgccagagaccgcctgcatgatggcgctgatcatgggaatattcatctgcagggggcattcctcctcgcccttgcggtacttgaccaacggggtcttgaggctgacagccgtggggatattctctgcagaggaatagccggggatcagcagatattcaccgaaagtgcgggaaggttctttatagaaataagccatgttcaaactccttttctcttaacgcatcaacatcaatcggattcatgtttgcaacctataaattgattgtatatactgtaccacaaagccagccggaatacaaacccccgccgcgccaaactttgtaaatgtcctttgcagaaaaacaggcaaattgcccaccaaaatggcgtaaggtcatactttcccgcatgagaagccggtttttgcgtgatttatggatgcaaaaaagctcgtccagaacggacgagcttttttgcacacgaagcgggataccgcctgtgcggcacatggatcacgactgtgaaggagaacagccggaggaggagaacctgtgcccgatatccccaaaaacaagaagaaaaagatttcacactcagcagggtcatttgcccttgctgtaaccatattgtaactcttttgaaaccaatttgcaatagcttttctgtaatttctttgtaataatttttgaactttttgtggacacatataaaacccctgccagaaaatttccggcaagggctttgcagatcattctttattttcttaatagcactttttgcaagcagtgaagccttccgcttttgctttcgataatgtaaccttttccgggtctttcatattgctgcaggtagacttgctgtgatattttttgccgccgtgcgttgggacccagaccatctgctccgtctttttgccggcagaaatggtctgaacggttgcagcggacggcttgcaggccgcagtctgtacactggcggcagatgccgccgggcacagcagactgaagcacagtaccagaatggccgcaaggactcggagatgttttttcatttgttttatcctcctttggacaatcagaagatccttctaataaaagagtactccctgttcctcagagg

SEQ ID NO: 1124 - DNA, 22366 bp, Unknown
  gut microbiota DNA sequence
tttacacgtttgtctttcccacctccagatagcactcaaagctggtctggccgttgtgctttccgaccacataccagccatccgccgaaggggcataaaacacctctgccgtttctcccatcgggatctcacggtggtagttgatagaagcaaaggtcacggggcctttgcgcatcacttccagcggcagcgcatcgcagacaaggtccagatagaatgcgttgttcaaatggccgttcaaatcgcactgggaataatgcgccgtccactcccctgcactggtcagaccatccttgcacttgtgcagctgcaaaggcagctcgtcctccaccgtatcgttccagaaattctccaccgtccagcccggctcccgcaggatacggccctcggcaaggcttgccacgatccagcggcagtccaccatagccacctctttaccctcggcatcggtcagggtggtgatgcgtttgaccgaaccgtgtttgctgacctgcgcccgggaggtaagggtcagcgtttcggcacgctggggcacacggtcaaatttcagggcctgcttgcccaccagaaaggtcacaccgcgatctttgaagaactggtcatccataccaaaggcgcgggcgtggtctgtcgaaatctgctccacatagcgcagcagggcgctgggcttgagcaggctgcggaagtcggcatctgcgttcatgactgtcatggtctcggtgtaaaagaactgttccatgttttttcctttctataaaaagagaccactgcacgttgttctgtgcagcagcctcctttgcgtttaatactgattgcggttgcgcctgcggaccttgcgccagatgttgaagcaggccagcgctaccatggctgccagcagcgcaaggaacagcagactgctgccaccctcgtcgtagctcttcatttcgctccacttcacgtccagctcgctgttcacatcgtcgctcagggaagtgaacaccttttccttggcggctttctcttcgggcggataagcgatctcgctctccttcagatcctcgtccagcacctcccacacatcctgcatgggggtggtgtagccgatgtactcggcgtttgccttgccgatgtccgtctcacacatgaagttgatgaacatttccgcagcttcctgatgttcgctggcagcaggaatggccatgcagtccacggaaagcacgctgccctcctccgggaacacccatgcaaggtcggggttgtcgtcgatcatggtgatggcatcgccggagtagtacacaccaacggctgcctcgccgccgatcatcttatcaaagatctcgtccatgacgtaggcctgcaccagcggtttctgagccttcagctcttccaccacctcatccacctcttcggtggactgcgggttgatatcgtggccgctcttaaaagcagcaatggcgtaggcatcgcggctgttgttgaacatcaggatattgcctgcgtactgctcgtcccacaggtcggcccagctggtgggcgctttgtccaccatggtggtgttataaatgatgccggtggtgcagagcatatagggcacggtgtaggcattctgcggatcgtaatccggattcacgtattcctgattgatctttttgaagttcgggatattgtcgtagttcagaggcttgagcatcccctcggcgatcatttttgccaccatgtaatccgacggaatgaccacatcgtagttggctgcgccggacttgagctttgcgtacatggactcgttggagtcgaaggtggtgtagttcaccttgatgccggtgagcttttcaaaggccgccaccacgtccacgctgtcgtccgagccgttggagatgtactcgccccagttatagacattgatggccacgttctggcccttgaagcgggtccagtcgtaatcgtccgacaccgagacatcctcggtcacctcaatggtgccggcggcaaaggcgggcattgcacagcagaccgccattgccagcgccagcagcaacacagcaaaacgtttcatcacacgccctcccctctcagcgccttctggtcgcggcggtagctgcggctctccattgcgttggagatcagaatgatgcacagaatgaccacgaacatgatggtggacagcgcatagatctccgggctgacctttttacgggtcatggagtagatggcgatgggcagcgtttccaccgtgccgcagttgaaataggagatcatgaagtcgtcgatggaataggtcaggcagatgaggaatgccgacaggatggccgggctgatctccggcaggatgaccttgaagaaggcctgcttggggtcgcagccaaggtcgagcgctgcctcatacagcttgatatccaattgcttgagcttgggcgtgacgttgaagatgacatacggcacattgaacgcgatatgcgcaatgagcagcgtcgggaagcccatgatggtatccggcagccaggagacgcccccggcaaagcgctggtaggccacaaacagcagcatgagcgagatgccggtgatgatctccgggttgaccaccgggatataggtgatgttggtgacgacaaggcggctcccgcggcccatggacgcaatgcccagacttgccgctgtacccagcacagtggcaatgaccgcagagatcagagccacttccagcgagaccagcagcgcatgcaggatggaggagttgtgcagcaggctggagtaccacttgagggtaaagccggtgaagagcgaatagcccttggactggttgaagctgaatacgatcatgtatgcaatgggcaggtacatgaagcagaaaaacagcacgatatagacgcgctgcatcaggcgcagatgtttcgttttcatcaggacacgccctccatttcatcttcatcaaagctggaggtgaagctcatgcacagcagaacgatgatcatcagcacaaggctcatggcagaacccacgttcagattgtagctgttgcccagaaactgcatctcgatcagatcgccaatgagcaggttggagccgccgcccagcatacggctgataacaaaggtggacaccgccgggacgaacaccatggtgatgccggtgctgatgccgggcacgctcatgggaatgagcacccggagaagggtcttggtggtggaagcgcccagatcctgcgcagcttccaccaggctctggtcgatcttggtcatgctggtgtacagcggtaggatcatatagggcacatagttatacaccatgcccagcaccaccgcaccggaggtgttgagcatattgaaggggccaaggccgaacacgcccagaacagcgttcaccgggccgttgatgctgagcaggcccatccatgcgtaggtgcgcagcaggaagttcatccacatgggcagcatgaccagcatgagcatgatgtgctgcttgttcacccgcaggcgggaaagaaaatagcccaccgggaacgcaatgaccagacaaatgaccgtggcaatgagggccagcagcaggctgcgggcaaacaccgagccgtagccgctgatggaggtgaggttatccagcgtgaaagctccgtttgcatccgtaaatgcatagtacaccacgatgatcaaaggcaccactgtgaacagcgtcatccatacaaagtacggataggccagctttttatcgtaaatcttcatcattgcggctcacccctctgaacgcgccataatgtggatctcgttggggccgatgcgcataccaatggtctcaccgggggtgcaggcgcgggtggaatggatcagccattcgcggccctcgcactccacatgcatctcaaagtggacacccttgaagatgacatcgttcacaacgccgacaagctggccttccacaggagagaccacctcgatatcctcggggcgcaccactacctgcacgctctgctcgcgggcaaagccgcggtccacacaggggaagtccacgccggagaaggacaccagaaaatcccggtgcatcacgccgtccacaatgttggaatcgccaatgaagtctgcaacaaaggcattcttcggctcattgtaaatatcctccggcgtgccgatctgctgcaccttgccgccgttcatgaccacgacggtatcggacatggtaagggcttcctcctgatcgtgggtaacataaataaaggtaatgttcatttcgcgctgcaggcgcttcagctccagctgcatctccttgcgcagcttgaggtccagtgcgccaaggggttcatccagcagaaggatctccggctcgttcaccagactgcgggcgatggccacgcgctgctgctggccgccggacatctggctgatgctgcggcgctcgaagcctttcaggccaacaacttccaacatgttgcgcaccttgcggcggatggtctcttcgtccatctttttgagccgcagaccgaaggccacattctcgaacacgttcaggtgcgggaacagtgcgtatttctgaaaaacggtgttcaccgggcgcttatagggcggcacgccggtaatgtcctcacctttcagcagcactttgccggaattgggttccagaaaacctgcgatcagacgcagggtggtggttttgccgcagccggaagggcccagcagcgttacgaactctttgtcatggatgtcgaggttcagcccatccagaatgcgctgaccgtcaaattccactacgatatcccgcagtgaaacgatcaccgagttgtccattttttactttatcctccttgtaactcagatacgaaaaaagacagggccatgccccatccctcgtaccagggcgacccagccccgcacaacatccatgacgaccggagaacctgcaaaagcaggctcttatattgcgcagttattctgccctgtctcgtctatcttaatcaatctttgctgaaatgtcaatcactctgccaatgtttgccgaagctttacacgccgcaacaaaaaaacatgcgccgcagcgggctttccgcatacggcgcacaaaggtttttattcagcttttaaggcagcggccgttatcagaagggcctgcacagtgtcaaggtcaaccgcatagacggaactgtccccctccaccatcatccagcagccgtctgcattttcggcgtagtggagggtcacagtcccatcggcagaggcggcccgcaccgttgcaagcggtgcatcaaagccataggccgaagggtcggcatccgtgatttgtgcggtcacatagcctgccagagcagagaggatgctctgcaccttgctgtcgtccagatcggcagagggttcatcggccagccgccacacggtctgataggtggtggaatcggccgcactttccgaggaatcgctctccgcttccgcaggctcagagactgcattcagtgcaagggtgccgctgcccgtcgtaatggaaacactttccagcgcggaggctgtcagtcccgccgggttgaacgcgccaaaaaggtccgctttggtcagctcaaagcaggccgccttgttgccagaaacggtgtacacggcatcgtcccctgccttctgcacatacagatctcctgtgaccgggttctcggtgccaaaggcaaaggtgttcgtctcgcctgccgccgtcactgtgaccgtaacagccggatcggcaaggccgtagtcctcgccgggctgagccgtgagctgacgtttggcgttcagggatgccagcgccgtgaccatggtattgcaggcagatgcatccagatgatagtccgggtcatccgccagcgtccagctgccggaatcgtaatttagggtaagcgtttcgccgccataggcataccggatgctggtcacatcgcccgccgcaaaagaagaaagcaggatgctgccctctgcggcggcgctggaagcagcctcttctgcggcattgctgcggctgacaaaccacagcagcccgcccagcacaagtaccagcaccagaagcaccgcaagggtgcgctgttttgttttcatggcagtgcccccttacctgcggcggcgcagcagcacctccacagcacctgcaatgagcactgctgcgggcagcacgaatacgaacaccatgcccagcgtcatggatgcggaagccgggaccgtgatgggtgcggcttccagtgctttggtgtcgatgagcaggctctgccctaccagcgaagcggcacagccctgcaggaaggtcaggttgcccgggatggactggtacacctgctcgttgtccatgttggggcagccgatccagatcacctcggcaccggtggaatcattgcgcgcccatacggccagcgagaacgggccgtcggtatcgccggcttcctttgcggaagaagagctggcatcaaagtcctgcttgctgtaggcatcctcggtggtatacagcagcggttccgccgtcacatcgtctgtctcggtaatggtgatgccctgtgccaccgagagcatcacatgggtgctctgattcacgccgtccagcgcggtgctttcgtcggcggccgcatagtccgggaacagcgagtacgggtagccgtacagcgcgtggcccgcatcgccctccaccacaaggcccggctcacgcgcaaggccgaactgtgccatcactgcatccagattgggcgtttcggtataaccgctggtggtcagcagcaccttgccgccgttttccagataggcctgcagctgcgcgatctcatccacaaggccgtcagctgcaaaatccgaagcggggttgctgatgatgagcagatcacagtcctccgggatggtgccggtgagcagatccagcggctgggcatcgatattctgcgccttgagcgcctcggtcagcgaggaggtaagcgcctgctcgccgtggttggtggtgtagtaggcatgactttctgctgcggcagtcagcttgtagatggcagagctgatctgcttttcgccgccaaaggtcacattggcagcgccggtggtgtagtaatcggagtaatcgtactcgtaaagttcggcggcgttcagcacttcgctgttctcaccgctgaccacgatcagactgccggtggatgcattctctgcaccgtactgcgctgcaaaggtcgggtaaagcgccgggtccttctgctcccagtggaagtgaccgctctcgtcggcgtagtgatccagcagcttggtgataatggcatcctcgctgccggtctcacagagataataaacggtcacgtcctgatccaggctctgcatcagctgcctggagctgtcgcccagcgtgtacattttggcggcagagaggtcgaattcggtgtattttttcgggatggcccccaccagcagattgatcagcacggccaacacgatggctgctgccagaatggccgtggagtacagcccattgcggaacaccttgccgtttgcagaggaagaaaatttgaaatttttcatgttgttcccctcccctcagttccagcggcgcttttccagcccctgcgccgtgaagaacaaaaacagcatggtcacggtcaggtagtacaccagcgtcgggatggaaaagctgttgttgacaaactcttcaaacggcgtgaacaggcacagcccgctgagcaccgcgctgaacgcttcggtcagccagctgctctgcagcaggaacagtgccgtcagcaccacacagcagcccgcaaaggtcaggcagcccagcgtaaagctgcgggtacgcaggcctgccaccacactgagcactgccgcaatggcggtgaacagggccagcgccactgcgctgcctgccgtgaacatgctgcgcaggctgggcatcatgtaggccagcagcagtgcggcaacacctgccaccgcagcaatgatctgattctcggtcaggctggaaagaaacacgccaatggcaatggcggcgcagcccatgagataatagcacagcagagcggccaagtttgccagcgtggccgtgccggtggcacccagtgcggccagtacaaggatcatgaccgcaccggcaaggcacggcagtgcaaagatgacgcacagggcaaagaatttgcccagcacgatctcccacacagacaccgggctggtaagcagcagctgatcggtgcgggtgcggcgttcctctgcaaaggagcgcatggtgagaaccgggatatacaaaagcagcacaaacgtggtgcggtaaagcgtgtaatagccaaaatccgtcaggccgtagcccagattcagggcaacaaaatagatggccgttgccgccagcataaaggcggtgagcacgtagccgatcatgccatgaaagctgctgcggacttcgcgtttgaaaatggcggtcattccgttttctcctccccttcatccgatggtgtttcagactcgttttcggtcagtgcaaggaacacttcctccagcgtcctgttttccgctgccagcgccagcaccgtgcatccggcctgcgaaagggcgcgggacacctcggcgcggcggtcagaagcatcggcactttctgcggtaaaggtcacctgtccgtcggcctcggattcgatctccaccttgcggatgcccggaatggagccgaccgttttcagcacggtcttccccccgcccagagcggtagcgcgcagacggctgccgggattcagcttttcggccagctgttccggcgcacccaccgccaccagatgccccttggaaaggatcagtacctgactgcacaccgcctgcacctcgctgaggatgtggctggacaggatgaccgtgtggcttttccccagctcccggatcagtctgcggatctcgatgacctgtgcagggtcaaggcccacggtaggctcgtccagaatgatgagctgcggtgcgcccagcagtgcctgcgcaatgcccacgcgctggcggtagcccttggacagactgcggatgagccggggcagcacctcttccagcccggtgcggcgggcagctttgcgcacctgttctttgcggtcagccttctttttgatgcctttcagctctgcagcaaaatccagatattcctgcaccgtcatttccgggtagagcggcggctgctcgggcagatagcccacacaggccttggcctgctgggcttgctccggcaggctgaagcccgccaccttcacttcaccggaggtgggggcaaggtagccggtgaggatattcatgatcgtggatttgcccgcgccgtttgggccgagcaggccgaagatctggccgtcgcccaccgtaaaggacaaatcttcaatggcagggtgcgtgccatactttttgctcagatgcgatacttcgatcacagcaaacgctcctttttcatctagttcaatgctggtatattttagaccgaaaatgtgtaaaaattaagacaatcctgtggcgggatgcaaaaagaattcttaagaatgattaaggccgccctttcatatgccaaaaaggcagcaaaaaagcaccgtctcccaaaggaaacggtgctcagaaaaccataattacttacggccgaaacgcttgttgaagcgctcaacacgtccgccggtgtcaaccagcttctgcttgccagtgtagaaaggatggcacttggagcaaacttcgacgtggatctcaggcttggtggaacgagtcttgatgacgttgccgcatgcgcaggtgatggtgcagtcaacgtagttcggatggataccctgtttcattcttttcacctcatttctggttctgacttattggggccatattataaatgtatgtgcccatcacaaccttcaatatcggctaccccgtcgagcggccttggaaacgattgccttactattatagcacgattccgacagaatgcaagagggaaaataaagtttttagcatacaaaaagtcccctgcactttcatgcagaggactttaacggttttaccttacgccgtcaggccatcagtggatgaacacaggacccagcgggttggtgatggggctgacgtagccgcccagcagcttggggatcgccaggctgatgtcgggcacgaaggtcagcagcagcagtgcaacgaacatgcacaggtagaacggcagggtcgccttgacgaccttttccatcgggcgctttgcaacggcagagccgatgaacagcacagcgccgacaggaggagtcagcaggccgatgccgcagttcagaaccacgatgataccgaactggatgggatcgataccgatggaggttgcgatgggcagcaggatgggagtagcgatcaggatgatgggagccatatccatgatgcagcccagaaccagaatgatcaggtcgatcagcagagcgatgatgtaggggttatcggtgacgctggtgatggcatttgcagccagatccggcacatgcagcatggtcaggcagttgccgaagactgcagaggtagcgatcaggatcagcacgatggacagagtgttcacgcactcatccagtgcatgccagacacccttccagtccagacccttgtagacgaacaccgacacgaacagagagtagataactgcaatagctgcagactcggtagcggtgaacacaccgccaacaacgccgaacacaacgataataacagcggccagtgcccagatggaagtgcccagctgcttaacgaagcccttgatgctgaacggagagcccttggggtaattctccttgaccgagatgatgtaggaaccgatcatcaggacgatggccagcagagcaccgggcagataacctgccagaaacaggctgccgaccgagatgccgccggcagtggtggcataaatgaccatgttgtggctcggaggaaccagcagaccctcgcaggaggaggtgatggtaacagcagtggagaagtcggcatcgtagccctgatcgaccatcatggggatcatgatggagccgatggaagcggtatctgcagatgcagaaccggaaataccgccgaagaagtaggaagcaacgatgttgaccattgccatgccgccgcgcatccagcccacgcaggcatcagccagagcgatcagcttttcagaaatgccgccggagcccatgagtacgcccatggtgatgaagaacggcacggccatcaggctgaaggaagagatgcccttgaccatcagacggcagacatcggtcagtgcttgaccctgcaccatcatgcacagcacgctggaaagaccaacggcgtatgcaatggggaaacgcaggaagatcattacaaagaagctgacaagaaggacaatgattgccagtgtctgaactgtcatattacacttcctcctttacaaaaatgctcttgatgtggttgtacagtgcctcgatctcgaagatgatcatggcaacaccggccagcggcaccgggaagtacatccagaagcggctcagccagggcatggacacgtagaagccgcggccgcccagagtggtggcatagttccagccgaccaccatcatgatgacacccagaatgcacacggcaagatcggccagaatatccagcaccttgacggcgattttgggcagatacacgtcaaacgcagtcatgcggatatgggcaccgcggcggatggccagagcagcactcagcacggccatgtagctcatacaggtcagcacaacctcttccgaccatgccgggtccgggatgaacgagacgtaacgaccgatgaccgacatggtagtgatgaggatatctgcgatcagcagcagcttgcagataaacaggaccactttgtaggtgatgtcgtacaccggcttgatcttatccaaagtggtaaagattttcggcatatgaattcctccatataaaaagcccggcaggtctgcgggcgtatcccgtagtcccccgccgggctatatactatctcagaacaggaaaggctttttcaattatgccttcatgtccagcagctgctgatacagctcagcctgatcggaggtgttctcgctgatgaccttctggcaagcttcctgccaaggtgccttatcgggaacatccacgacattgcagccggagctcttcagctcatccagaaccttgttctcagcggtctcggacaggtctgcattgaaggcctgcgtatcagcaccggcctccatgatggcagcctgctggttctcggtcagcttgccccatgcgttatcagtgataacagcctgaacagcgcccagagtgtggccgtccaggatcaggttgttggcaacctcggggaatgcattggacttgtagtttgcgatgggctgctcagcaccatccacaacgccggtctgcagtgcgctgtacagctcaccgaaggaaacgacggtggggttagcgcccagaccctcgaccaggccgttcatgacggggtcgttggacacgcgcagcttcaggcccttgaaatcatcgatgccggaaaccgggttgaccgtgaagaagtgacggaagccctcttcgccgtagaagacaccacgaacgggcaggcccagctcctgaggctcgttcaggaactcaggtgccagatcgctgttggcgaagttccagaagtgtgcgcggttctcgaaggtgaaggggatagacagcagcttggacttgttgcagccgtagctggtcagtgcgaaagcggagatacggctcatatcgatggaggtagaaccgcccagaattgcatccagaacgtcgttctcagaacccagaacgccggaagcctgcacgtcgatgacgacggaaccgccggtcagctcctcgaccttctccttgaagtgggtagcggtctgaccaacgatggtatccagcgggttgacctcggcgtagaccagagtcaccttgggatcgtttgcagcagcagtagcatcaccagcagcagaagctgcggtggaagaagctgcggtagaggtggaagcagcagcagaattgctggagccaccacatgcggtcagagccagagcagcggcggaaacaccggctgctgccagaaagctgcgacgagtgatctttttcataataaatcgtcctccttaaatctcccgaacagcacggtctgcacaggacccgcatgccgttcatttactgtacacactttagcaaatttttttaaacgaaacaagggctttcaaaaaatgtcctgttttttgaaaaaatgtcagaatttcttttgtgaaaaatgccaagtgctttgctttttgtttgtgcaccttcgcctaacagatggatacatttctgtattccagatagaagcaaagcgctggatgcccttccctttggggttcagagcacacagcgctttgccggttctttattctgttttcctgatttctttgcccatcttttccgggctttgctgtggggcttatgcctgccggatgcgggcgatcaattcgccctgctgggcaaaccgatcatacatcggctgcacagcagcacggaacctcgccttttcttcttcgtccagctctgtcacctcaatgcctgctgcacgcagatcactttccgattccgcctcctgctgcgcccagagcctgcgctccaccttggcgctctcccgggcacacaggcggatgatctccgggtagcgctcgtccagtgcggccagtttttccatcacagcagggcttgcaagctgcacctccggcacgcgggtgtgctcatcctttaaaaagtatggtgccacctcgtagtgacccatggcttcgtagctgggccagttgttctctgcgccatcgatctcaccgttgtgcagggcggcatacaccttgctgtacactacctttaccggctttgcgccgaggtcggtgatcatttcgctcatcatgtccgattcctgcacgcggatggtcaggccttgcagatccgcaaggcctgtcaccttctgccgggtgtagatgctgcgcacaccggcatcaaaccatgacagtcccgtcagctccagcgactccagcgtggagaggaactcgtcgccgatggtcccatccagcacgcgccacatctggtcggcatcggtataaagatacggcagctgcaatacgctcagcgccggttcatactctgccagctggctgagggacacacgggagaagtcaatgccgccaaactgcatctgctggatcacgctctgctccgcgcccagttctcccccgctgtacaccagcactttcacgcggccatcggtgcgctgggccacaagatccgcaaaggctagcgccgcctgcgtagtaggataatcctccggctggttctccgcatagcgcaggatcagttccgccccctgttgctcctgcaccggctggtggccgcagcccgccaccggcagtgccagcacggctgcgccaaacagggcggtgagcatctgacggcgggtcacaggtgggcctcccgtgcagccttggccgcttccctgcggtactgggtgggggtcatgccggtgcgttttttaaaggtgcgggcaaaataactggaatcctcgtagcccaccatggaagccacctctgctgccgaacggaacgggtcggtgagcagctccttggcagcgttgatacgcagttcggtcaggcagtccagaaagttcatcttctggtacttcttgaactgtgccgagagatacgccgggctgatatgcaggatctcgctcacactgtccagcgagaggtcgaacatatagttatcctccatatacttgcgcacatgggccatgaccagtgcattgcggtcgttctcccctgcttcggcggcatcgctctccggatcagcttccggctccggttccaccggagccagctctgcaaggcggcggcccgcctcgatctgacggatggccttgcggatggaagcttccacttcgtccgggttcaccggcttgagcagataatcgcaggcacccagatgcatggcctcgtgggcgtactggaacagactgtaggccgtaacaaagatcaccttgcactccgggcgctgttccagcacggcgcgggctgcatccagaccgttcataccgggcatctcaatgtccatcaggatcaggtctgcgccccacagcaccgccgtatccgctgccttgcggccgttctcggcagtctcgatggtcacttcgtgctcaaagcggcgggccacgatgtccgccagcgtttcccgttccagtgcttcatcatccgcgatcaacagacgaatcattcctcaaactcctcctcattctccaccaatggcagatacagcaccaccgccgtaccgcgtcccggatgggaccgtatcacaaagcggctgttccgatccagcagacgcaggcgggccgcaacattataaatgccgatatgctcccagcgctcaccgggctggctgagcgccccgcgcagctgtcgtaattgatccagctggatgcccacgccgttatccaccacgcggatgcacagcagtcccttctcccgcagagggttcacgcggatgcgcaccacaccgccctcctctttggggcagatgccgtgcttgaaggcattttccacaacgggctgtaaaataaaggacggcaccatggtctcggtaagatccagcgaatcggaaatgcgccactccatacgcacccgctcaccaaagcggacatggtagatggagtaatattcatccacgatgcgcacctcacgggagagcggcacctgttcatcgttgctcatcaggctgtagcgcagcaggtgcgaaagcgccatgatgagcgcctgcgtacggtaggccgtctcggtaccggcggtctgctggatcacattcagggtgttgaacagaaagtgcgggtcgatctggctgcgcagctgctgcagccggctgcgctccatgcggttctgcagctccagtgcttcggtcttctggcggtgcagctcccgctcgatctcgtttttctcctgcagggtggtcacctgctgggccatggagtgcttcatgatgttgaaggactcggccagctgagcgatctccggctgcttgggcagcgggatgtccggggtgtcgaactcacttttgccaatggcgcgggaggcagcgatcatctgctgcaccggcgtgagcagacgcatgaccatcaaaccggtaacgcagcccagcgccacgcacagcgccaccaccaccgtctgcagcatggtgatgcgctcgttcagggccgagatggtggtgtaggtggtctgggaatcctgaatggcggtttccagcaattgcagggtgtactggctcaggtaatcgccgcagggcaccacctttgcataatacagctgggaagctgcggcatcgttgccgctgagcaggtcgttttccagctcatccagcaggccggtgtaggtctgatagaccgtatccactgcgctgtagagcacccgctgctcatcgctgacgctttccagactgttcaggctggtaccgatgcgccagagccatgcgttgcaggtggaagatgccgactgcagtcggtcaatgatctcctccggctcgctgttctcccagcggtagttctccagcacggaaatagagctttccacaccgccctgaaagcggctgatggcgttgaagcagcccatctgcgcgtcctgtactgcctgcactgctctggactggtagccattgagcgtgagctgcatggcaaaggccgcaaaaaatgctgccagacacaagcccatgcgctgcttgagggtgatctgccgcttgcggtgctgcaaagcctgccgcctcctttcgtttggtaacgatttattgtaccacgctttgggccggattggcaaggtttgcatgtttttctcttgcctaaaccgcgcaattgtggtacgatgcctgtaaatacaaaggaggcgactttatgtcccagaccatctccgtttccaccaccatgggtgaacagggcttccgcgattttgccgtgttcgatgcattccatcaccgcaaagcatggctgcgtcccgctgtttttgccgccatcatgctggcttttgccgccgtctgcctttcgcagctgggcaagcgcccgggtgccgggctgctggctgctgtgcttgccattgtgggcatcggcctgccggtgagctacttttactcgttcttccgcagcgtttcccggcagatcaaacagatgcacctgccgcgtgccttctaccgtgtggagctggccgacaccggcattgctgtgtggatgtacggccagcaggacaagcccgaacccaccagccgccacgcatgggacagcttttactgcgcctaccgcacggacaatgcggtgtacctctacgtagaaaaagagaaagcttacttactgaacgaccgcatggaagtggtgtggaagtttttggccggcatcctgcccaaagaaaagctccacgactgcagaaaaggttaagcccaaaaaatatgcacacgcaaaaaaagaactgctgacatttcgttcagcagttcttttcttttataaagacccacgctgcggcaaagcaaagcgcagcgcgggtgcgaagatagcttatgttcttgcgtcaaccgatcagcgggccagcgtatacttgtgcagggtcttgcgcacagcgccggggcctgcaaacagctccttggccattgcctcgatcttctcgcccagaccaacggcatacagatccacgccgaacacgtcaacacggctgtacagcttcttcaggcagctgaagtcctgctcgccttccttgacctccagcggagcaacgatggcctgcagctcagccagcagcggatcggtggaaggctcaaaagcctgaccattgtcgtcgatgcccttcaggtagcgggcgtagcctgccagcaccagcgggatcaggatcaggttgctcttgtccagaccgcgtgcctcgtaggccttgatggtctcaccaaagcggatggccagcttctgggaggtatcggttacaatacgctggggagcatccggcatgaaggggttgggcagacggcggttgatgacagcgccgatgaactcataggggttcagcacgccgggatcaacgaccacaggcatggcctcgatatagccgatcttctggatgaaagcacgcagatcttcatcggccatctcggcggagatgagggtgtagcccagcatgcagccatagatggacatggcagtgtgcagggggttcaggcaggtgcacaccttcatcttctcgatcttgtccacggtctcgcggtcgcagtacagcacaccgcccagctccagcggaggacggccattggtgtagtgatcctcgatgcacaggtactgggtctcttcggcgttgacgaagggagcggtgaaggtgtgcttctcggtgacgatggtgtagttgtcctcaaagccgtcgtcggccagcatctgctggaccttggcatccgggcgcggggtgatcttgtcgatcatgctccacgggaaggtgatcttggtctcgtcctgcacataggcaaggaactcggcgggcaccagaccctgctccacccacttggcagcataggcgtggacagcgttcttgaccttatcgccgttgtgggagcagttatccatgctctggacggtcaggggcagcttgccggccttgaagcgctcgtacagcagagcagtgaccttgcccatggccagcacgggggtcaggccgcgctccaaatcagcaggagcaacgccgtagcccttctcagtgatggtgaaggagatcatctgcaggctggggttctggaagatctccaccagacgtgcccagtcctcgccgaaggagtagtcagccttcaggctctcggtaacggaagccaccaccttcttctcgatctcgccggtggacttcaggcagaccagcaggctcatattgtcgtagggacgataagccttgtcgatgatctcgtagtcaaagctctcggccacgatgacaccacggtcatacttgccggtgttcagcgcatcgttcaggatggcagccgggaatgcacggaagatattgcctgcgccgaagtgcacccaggtgggttcagcgtgggtcttggccttgacagcctcgatatcgaatttgggcagctcatagcccttctttgcccactcggcggacagattgccgtttttgatctcagacagcttcatatttatcagcccttctttttctcttcatccagacgatccagcagatcccagacacccagcatgtactgaacgcccagagcacggtcatacttgccgtaaccggggcggcagttgccggggccttcctcccacagctgacggccgtggtcgggacggatgtagccctcaaagccgcagtcatggtaagcacgcagcacctcgatgatgccggtctcgccgcagcagtcgcggtgagcagcctcggagaagtcgccgttggggaagtggtggatgttgcggatgtggccaaaggcaatgcggtcgcagtgcttgcgcacgatctcggcacagttgttgttggggtttgcgttcaggctgccggtgcacagggtcaggcagttgtacggatcatccaccatgctcaggaagcggtcgatgctctgggcatccaccagcagacggggcaggccgaagatatcccaagggggatcatcctgatggatagccattttgatgccgcactcatggcaggtgggcatcagtgcttccaggaagtacttcaggttttcccacagcttttccttggtgacaggggcgtaagccttgaacagctcgtccagctttgccatgcgctccggctcccagccggggaaggtcatgttatacttctcagtgaaggacatgatgtactcagccatagccttgtaatcgcccttgatcttatccttctcatagaacagtgcagtggagccgtcgcccacggggtggaacagatcggtacgggtccagtcgaacaccggcatgaagttgtagcagatgaccttgacaccgaacttggacagattgcggatgcactgcttgtagttctcgatgtacttgtcacgggtgggcaggccgatcttgatgtcatcgtggacattgaccgactcgaccacgtccatgtcgaagccgtaggcgtggatctgatcggctaccttctggatctcgtcgatctcccagatctcgccgggcatcttgtcgtgcaacgcccagacgatgctggtcacgccggggatctgcttgatgtcgctcaggctgatgggatcgttgccctcgccataccagcgccaacccattttcataggcataggaaaatcctcctgttttatattttctgctttgcattttccgcgcagccgtgtgccgcgctcttgtacttatattctagtatatcagttgcgttttttcaatggtcgctttgccggtttttaatgtttgttcttgtatactttagacaaaaagaacaaaaatccgtcggacatcacccgtccgacggattttcacacgattcaaaatgccggtttcagcgtttcagcttctgccggatggacggagccagcacatccttgaaatattcaaaggtgtccaattccagaatggcagagcctgtcagataaatgcccagaccaaccaccacctgaatgatcaccgtcagcagatccggcaggtgcaggaaaatgaccagatacatgcacaggcccgcgcccgctgccagcagcagggtcggcaggatatcacgcatctgttccagatagccatagccgatcagctttttgttgagctgtgcatccaggatctgggtcacaacattcgtgatcagcataccatatgcaatggcctcgacgctgacacggaatgttgccagcagaagaaggatgcacaccccttcgttcaaaagctgacatttcaggtaaagatcgctgcggcccaccgccttggctgcattcatgtttgccgtgatgatcggccagcacacataccccagacagaacaccctgaggaacagcacacagggcagccacttctcggtgaggatcaggcgcaccagcggttcggcacagaacgcagtgctcatcatcaccggcgcaataatataggtacaggtcttgatggagcggcgggtcatgttcttgacctgcgcacggtcatcctgcagtgaggacatgaccgggaacaaaacgctctcaatggaagtatccacgcttgacgcgatattataagtcaggttatcgccctgattgtaatacgccagatccgccgaggtgtacatcttgccgatgatcaggctgcgcaggttgttgtagatgacgctgctcagcgacgaggccagcagcttccagccataagagagcagccctttcaggtgctgccacgaaaactccatcttaggccgccaggaggacagcttccacaacaccagcgtgtccaccgtgatattggatacctgctgcaccaccagcgcccagactccaaagcccatataggcaaggcccaggcccaggaccgtggatacgatcgcgcccgcaaaggcggaatagaaaaaatactggaacttcatattccgggtcacatgcgcctgctggatcgttttgatgccgcagaccgccactgtcaggctgatgccgcgaaagatcggggtcatgctggggtcattgtagaaagcagccagatacggtgccgccacgaacattcccccatacagcacaaagctgatcacaatgctgaaaaagaacgccgacgagtaatccagctcgtccacttccttcttctgcaccagcgcggtgccaatgccgcagtccagcaggacatacatgatattgttgaacaccgtcaccagtgccaccttgccgtaatcatcgggtgtaaggatgcgcgccagaaggatggacaccaccgctgagatcagctgcacaccgcaccgctctgcaaagcgccagaaaaaaccgtttacaataacattttcttttttctcgttcattcctgcgtccactcaaattcctttcaaaaaaccggtcggtctgcaccctgcgcagaaatgcatttccgccgtatccttatcatcttcttccctgctgccaaaacaactgagcagagatagttagttttataatatcacacccatccatgcatttcaaccaacatattcttaagaaatgacggcccaaaaatttcatttaaaaagagaaaaagcgcttgactatctgccgggaacgtggtaatatattcaagcagtccgcatcacggtctttcacctcagagatttcagggctgcgaaaacaatacggtatgcgagggtggcggaactggcagacgcgcacgtttgaggtgcgtgtggtttatccttgggggttcgagtcccctccctcgcaccaaaaaccagtacacatcgtgtgctggtttttctttttgtgcgagggaggggatctcgaacaaggcggcggcatttatgccgcaagcaaagccacagtgcaacaacgacgaccgcagcctgcgg

SEQ ID NO: 1125 - DNA, 19623 bp, Unknown
  gut microbiota DNA sequence
catttttcttgatttttctcttcaaaaacacaggaccggacagcctgcgggctgcccggtcctattgcttcaaaaatattttcgctattacagctcgatcttgccaaagctgaaatcggcaaaatcatccacgcgctcggtgcgcttgggtgctaccggtgctgcattctcggcatcacggggtgcataggtgcgctccggcacgccggaaggccgcgggccgcggggtgcaccattgcggctgccacggtaaccgccgcggtttccattgtggtcgccatgctcagaacggttcccgccgcgatagccgccattgcggctgccgccgggacgacggccattgccgcgtccgccgcggggacggcgctcgccataggtgttctcggtctgtgcatcgggtgcggtggagtagatgaccacacggcggtcacggccttcgcccttgctctcgctgcgcacgccctccatcttgctgatggcagagtggatgatgcggcgctcgtaggggttcatgggttccatggcaaagctgcggccggtcttgcgcaccttggcaccaatgcgctgtgccagtgcggtcaggtcgctctcgcgcttatcgcggtagccggccacatccagacccagcttgatgtaatcgccctccagacggtttgccacaaggcttgccagataggaaaggctctccatggtctcgccgcggcggccgatgagggcacccagcttttcaccgtccagacggatgatggtagcttcgcccttctgcacagcgctgaaggtgacattctccacgcccatcagggcaatgacctcacgcaggtagtccacagcagccttgatcttagcgttctcttcgatcacgatggggacttccggctcctcttcctcggcagcgggccgctctgcagcagcttctgcagcgggggcagcaggctcttcggcctttgcttccggctgtgctgccgcagcggcaggctcctctgccacgggagcggccttgacagcctcctgcacgggagtctttttctcaacaacaggctcagcgggtgctgcagccggagcgtccggctcctccacgctcacgcacaccttagcgggggtgagcttcaggcccagaaaaccagtcttctggggcatttccagcacttcgcagctgacattcagatcatcggcctgcacgcccagcagagcgcaggcttttgcgcgggcttcatcgaccgttttgccggtcgcttcctgcttacggatcataaccgttcatcctcctcttattctttatcctgcttgttcagctcgctcagcggcacggtacgctcgtccttgtagcgctcctcgtccagctggcgggcatactccagacggcgcttgttcatctcgctggcagaaaggttcttttccgtggtcttgccggtcttgggatcggtgaccttgacggtagtgttcttcacaccgcgtttttcctgctttttcttttctgcgatctgcgcttcgatctccttgcgcatcttatcggggtcgtacaccttgcgcatgacctgagtctgcacggtcatcacgatgttggaaatgacgtagtacagagagaatgccagaggataggtgaagcagaagaacaggtacatcagcggcatcatatacatggtcagcttcatgctgccctgcatctgctggccgctggccttcatgctgatatgggtggacaggagcatggtgatgaccgacagcagcggcagcacaatgtccagagaaaggcccagcttggggatgcgggtcaggtcgatgccgaggaagttcatgtgctggctgaactcggtaatggtagcgatctgctcggcgctgaagcagcccagcacaccgccgttgccagcaaccacctgtgcgatgatgttggtatcgcgggtgatggcggtaaaggcgacgccggaggcggtcagagcctcaccggcggcggtcagagccgcagcgctgatgtggaagatgcgctccagcggattgtacacgacaccgataacgccgaacatgacaaggaagttcaacagcatgggcacgcagcctgcggtggggctatagccgtagtcctgctgcagcttgagcatttcttcctgctgcttttcgggcttgtccttgtacttggtctggatctccatcatcatgggctggaaggccgacattttagccatgctcttctgctggctcagctgcagagggatcttgacgatgttgatgagcagcgtgaagatgatgatgtcccagccgtagctcgggagcagcttgtagatccactccatgacatagccgagaggaccgctcaggatgtaaaagaagttcatacctttgtccattctgccccgtctgtggcacgggacttgttatttttatcgtaggacacgctgcccacagtgcaccgcgtcacaagaagcatatttacttttccaccttttgcttgtgccgtgtggaaaacagccttgcgggctgcagccggcgggcagggttctgccagcggcccggctccggcaccgggtcaaagccccatttgccgaagggattgcaccgggcgatgcgccatgcccccagcaggatgccctttacgcacccatgggtcatgatggcctgcatggtgtagttgctgcagctgggcgtaaaacggcagctgcggccgatccatgggctgagagtgtactggtaggcccggatgggcacgcacagcgcgcggcggcagatgtactgcaggcggttcatgcgtccggcttttccgcctgtgccctgcgtgccgggggcacggtggcagggggcggcgcatccggccgtttggccttatccggcagaccggcctgtgcaaacagctttgccacaacgctgctcagctgccagctcttcagccgcggggtcataccgcgggctacaaagatcagatcgtagccgccgatgttgtagtccagatgctcgtcgatggccgccttcatcacgcggcgggcgcggttgcgctgcacggcgtggccgatctttttggtggcggtcagacccacgcgggtctttttgctgcgggtcttgagcacatacatcacaagaccggggttcacataggatttgccgcgggcatacactctgccaaactcgctgttgcggcggatgggacgatagcgcatgattccgcgcctcctttctgtggctgagaacacgccccgaagggtgcattcttcagccagtatatcaaaaatttttcgactttgaaagcccatgcgggcatttttacgaaaattctttcaattttcaaaaaaaaataagaccgctaatccaatatcagcggtcttttgtgcgcatattcatttctgcgccggatcccgtcataaaaggccggatcagacagtcaggctcttgcggccctttgcacggcgagcattgatgaccttacggccgttcttggtgctcatgcgggtcagaaagccatgaacttccttgcgctgacgcttcttgggctgaaaagttctcttcatggttgtatcctccgtaaaaacttatccccggtatggggtctgatgtggtcccagattggggacaggcttgcaattcaacagtatatcgcatagtatggcgttctgtcaagcatttttttcgctttccttcaaacttttttgtgaaaagattttcaactttttcaccattctgccgtggaaaactcttttgccacaagatattgtggccctgttttgcccatgccacaacggccgtgcaggggcttttcttatgtattataaattacattatagaaatatggacgcacagcgttttttgtggtatactaacctagtatcagcagcattgttgaaaactttaacggagtggatgttttatggattcttttaaggacgttttagaggccgcccaggcgtactgcaaaacgcagatggccgagccgacctataatctctatatcgacggactggagccgatcagctttgaggattccagccacatcaccctttcggtgcgcaacgacttcatctgcaagatcgtgacggaccgctaccttggcctgctcaaggaagccttcaagaccgtgctgggcttcgacgtggacatcacgctggtggtgcccagcacgccgccgcacgaggtggtgctggcccagcagtacgaggcgaaccccgcctccccgcagggcaactacgagttcacatttgaaaacttcatcaaaggcccttccaaccagtttgcgtttgctgctgcacaggcggttgcggccaatccctccggcgcatacaacccgctgttcatctacggcggctccggccttggcaagacccatctgctcacggccatccagaccgagatcaagcgcacccaccccgatttcgtcatcatgtacgttacctgcgagcagttcaccaatgagctgatcgccgccatccgcgccggcagcaccgaggacttccgcatgaagtaccgcgtggcagacctgctgctggtggacgatatccagttcatcgccggcaaggagtccacgcaggaggagttcttccacaccttcaactccctgcacgatgcccacaagcagatcgtcattgcctccgaccgcccggccaaggagatcaaaagtctggaagagcgtctgcgcacccgctttgagtggggcctgaccgccgatgtgcagccgccggattttgagacccgcgtggccatcgtcaagcgcaaggcagagcttttgcatctggacctgcccgaggatgtggccgagttcattgccaaccacctgaagaacaacatccgccagctggaaggcgctgtaaaaaaactgaacgcctactacatgctggagggcatccagccggtcatcagtgtggcccagaatgccatcaaggacatcctcaacgagacccagccggtgcccgtgaccatcgagaagatcatcggcgaggtgtcccgcaccttcaacgtctcccctgccgacatccgcggcaccaagcgcaacgccaacgttgcctctgcccgccgcgtggccatctacatcctgcgcgaggtcaccggcatgagcatggaagagatcggccgtgaattctccggccgtgaccactccaccatcgtctactccctcaagaccatggagcgtgacatgaagaacgaccagcacctgcgcgagaccgtgagcgacatcatcaagaacgtgaaggcctgaccgcagaaatcgtgcaaaagtcgtactcatttatgggtgaaaccccaaaatatggggagaaaacggaacaaaacggggaaaaagaacctatatcttgtggtaaaaacgcaaacctttccacactttccacagagttttcaacattcaacctccgttctccacatggtctgtggaaagaaagacctattccaacctttccacgatccattcacaacacattcacaaccccgtggaaaccaaaacccccgcattccgacaaggcttttcggggttttccacaagttccccaccccctactacggttactacaacaagttcaataagatagaccggttctgaaactgttttgaaacacaaaacaacatcagaaacgaaaaacaaaggagagaattcagtttgaacatcgtatgtgataaagttctgctgagcgcagccatcgatggtgtgtccaaagccgtcaccatgcgttctgccatccctgtgctggaaggcatcctgctgaaagccgaaggcttccagctcaacctcaccggctacgatctggaaatgggcatcgtgaccaccatcgaagccaatgtcaaggaagccggcgaggtagtgctgaatgcaaagctgctcagcagcatgatcagccggatgcccgccggtcaggtcagcatcctctctgccgagaacggcaagaccaccatccagagcggcgtagtccagttcgagatccagtccatgccggccaacgatttccccgagctgcccaataccggagcggaagagaccctgaccatcaagaccggcgtactgaaagatatgatcgatcgtacgttatatgctgtcagtcaggacgagaaaaagcccgcccacaccggtgagctgttcgagatcctgcccgacaagctgactgtagtggcactggacggctaccgtctggccatcgtggaacgcccggtgacggcggtaaaggatatccgcatcatcgtgcccagcaagaccatgaccgaggtcgcccacctgctgcccaacgacgacgaagagccggtgcatatcagcgccaaccgccgctatgtggtctttatggccggcggctacaccatcatgagccgtctgatcgagggcgagttcctcaactaccgcaatgtgatccccgccgacagccgcacccgcgtgaccatcgataccaaggaattcatcgagaccatcgagcgtgcttcgctgattattacagagcgtttaaaaaatcctctccgcatctcctttacagagggtagagtcgtggtgcgctgccagaccaaccttggccgcgtggtggacgagttcaacgccgactgcgagggcgacgaggtggagatcggcttcaacaaccgttatctgctggatgcgctgcgcaacgcccgcaccgagaaggtccgcatggagatcagcggccctctgagcccggtcaaggtgctgcctgccgagggcaacgactttttgtatctggtgctgccggtgcgcttcaagaacgattaagagggcgaaattatgcagaaaattctcatccatacggaatttatcaagctggatgccctgctgaaatatgcaggcctgtgcgagaccggcggcgaagccaaggagctggtgcagggcggtgccgtgaaggtgaacggcgaggtgtgcaccatgcgcggcaagaagtgccgtgccggtgatgtgatcgagctggacggccagaccgtggaagtgggtcagggccagtaatgcgtctgctttcactggaagttgcgaattaccgcaatattgcggcagcgcagctggaacctggccgggagctgaccgtgatctgcggcaacaacggtcagggcaaaacgaacctgctggaggccatctggctgctgaccggcggcaaaagcttccggggcggcaaggatgccgagcttgtgcgccgcggagaaacattcgcggtactggaggccgtcacccagcgcacccggcaggaggatcaggaaccggacgaaccggcaaatgtgcgcattacggtgggcacgccggatgcacagcgccccggccggtatgcatcggtcaacggctctccgcccaagcgggcggcgggccttgcgggcagctttccggctgtggtgttcgaccccgggcacctgagccttgtaaaaggtgcaccggaaggacggcggcggtttctggacgcggcgctgtgccagctgtaccccggctaccttgccacctaccgtcgctatgtgcgggcattgcagcagaaaaacgcgcttctgcgtcattctgcaggcggcacggagcgcccgtgggcagaaaaatgcgccctgctggaagtgctgaacgtggagcttgcagcacagggcgaggccatccagaagcggcggcgggagtatctggccctgctcacaccgctggcctgcgccaactatgccgagctttcccacggggcagagcgcatggcggtgcgctatgccgcccagtttgagccgggcgggctgtccgcacttttgaagcagcgccggaacgaagagctgcgcgccgggcagagcctgtgcggcatccaccgcgaggacgttgagctgctgctggacgaccagcctgcaaaggtgtttgcaagtcagggacagcagcgcagcgtggtgctgagcctgaaaatggccgaagcggctgccgctgcccggatcaccggagagcacccggtgctcctgctggacgatgtgctcagcgagctggacgagggccgcaagcagtatctgctcacccgcatgaaggaaaagcagacctttgtgaccagctgtgatgataccgcgttcctgaaaacggacggcgaagtgtaccgcatgaacggcggtgtgctgagcaaagcatgaagaaatgatgcaaaagtacatgcagctgccggtgaataaacggcgttttatgcatgaactgccagaatgaggaaaatactgtatgtatattcatctgggccgtgactacgtgctgaatgaccgggacattatcggcatcttcaatctggaaaccaccaccatcaccccccggggccgggagtttctgaactacgcccagaagaacggcgcggtggtgagcctttcggacgagctgccccagagctatgttctggcagacggggccgtggtggacacggtgtatctttcagagctgtcgcctgctgccatgcggcgcagagccgaaaaaatgatcgagtaaaccagccaacaggcggagaatatgctctgcttttacgatagatcgaacaaaaatgcaaacattgaacaaaagggagaaaggaaatggcagaagaaatcattaccagcacaaatgccgaaaccgctaccgaccatgagtataatgccagcgagatccaggtcctgaagggtctggaggcggtgcgcaagcgcccgggcatgtatatcggttccaccggcgagcgcggcctgcatcatctggtctacgagatcgtggacaacgccatcgatgaagcactggccggctactgcgaccacatcgaggtcaagatcctgaaaggcaacatcattcaggtcacggataacggccgcggcattcctgtggacattcaggccgacaccggcctgcccgccgtcaccgtcgtttacaccatcctgcacgccggcggcaagttcggcggcgagaactccggctacaaggtggccggcggcctgcacggcgtgggcgcttcggtggtcaacgcctgctccgagtggctcaccgtcaacgtgcgccgcgacggccacgagtacgagcagaccttccgccgcggcgacccggacggcccgctcaagtgcatcggcaccgtagccgacggcgttaccggcacccgggtcaccttcaagccggacccggagatgttccgggataccaccgtgtacgacttcgacacgctggaaaagcgcctgcgggaggaaagcttcctgaacgccggtgtcaagatcaccctgaccgacgagcgcgagatgtacacccccgtgctggaggacggcaaggagggggaaccctgctaccgcaccgaggtcatgtgctacgagggcggcatcaagagcttcgtcacctatctgggcgagaagcgcaagctggacgtgctgcaccccaatgtgatctacctcaagggccagaccgaccgcggcatggcagagatcgcactgcagtacaattccagctacaacgagctgctgctgagctttgccaacaacgtcaacaccccggacggcggcacccacgaggagggcttcaagaacagtctgacccgcgtgttcaacgattatggccgcagccacggcctgctgaaggataaggacgagaacctgtccggtgcggacgtgcgcgagggcctgatctgcgtgatctctgtcaagctgcaggaggcggagtttgagggccagaccaaggcaaagctgggcaataccgagatccgcacccttgtttccaacatggtctactccaagctgatggaattctttgaggagaaccccggcgtggcaaaggccatctttgaaaaggccacccaggccgcccgcgcccgcgccgctgccaaaaaggcccgcgaactggtgcgccgcaagagcgcattggagaccagccggatgcccggcaagctggcagactgccgcgaaaaagaccccagccgcaccgaaatcttcatcgtcgagggcgattctgcaggcggttccgccaagatgggccgtgattctgccattcaggccatcctgccgctgtggggcaagatgctgaacgtggaaaaggcccgcgccgataaaatttacggcaacgacaagttgatgcccgttgtgctggcactgggctgcggcattggtgacgagttcgatatctccaagctgcgctacgataaagtgttcatcatggccgatgccgatgtggatggttcccatatctgcaccctgatgctcaccttcttcttccgctatatgcgcccgctcattgagcagggccatgtgtatgtggcccagccgcctctgttcaaggtgcagaagggcaacaccatcaagtacgcctacaacgatgccgaaatggccgtgctttcgcaggaaatgcccggcgcaaaggtgaaccgctataagggccttggtgagatgaaccccgaacagctgtgggagaccactatgaaccccgataaccgcgtgatcgtacagatcaccattgacgatgccgagaaggccgatgaagcctttaccatcctgatgggcgatcaggtggagccgcgccgccgctttatcgagaccaacgcccagtacgcaaagctggacgtgtaattggaggaaacaatggaagaagattatgtgatgataccgggcagcggaaccaaaaagatcatccgcgatgtcaaaaaggagatcgagaccgcatttctggactactccatgtcggtcatcgtgtcccgcgccctgcccgatgtgcgcgacggtttgaagcctgttcaccgccgcattctgtacaccatgcacgagcgcggcaacgaccccagccatccctaccgcaaatccgccgacaccgttggtgcggtgctgggctcctaccatccccacggcgacgcatcggtctacgatgccatggtccgtctggcacaggacttctctctgcgctatccgctggtggatggtcagggtaactttggttctgtggatggcgaccccccggctgcctaccgttacaccgaggcccgcatgagccgcatggcggtggagatgctgaccgatatcgagaaggacaccatcgactgggaccccaactttgacgagaccaagaaggaacccagcgtgctgccctgccgcttccccaacctgctggtcaacggcagtcagggcattgcagtcggcatggccaccaacatcccgccccacaacctgagcgaggtcattgacggctgcatcgcctatatcgacaacccggacatcgacctgcccggcctgatggaatacatcaagggcccggacttccccactgccggcatcatcatgggccgcagcggcatccgcgccgcctacgccaccggccggggcaagatcaccctgcggggccgcgccaccatcgaggagaccaagaacggccgcacccagatcatcattaccgagatcccgtatatggtcaacaaggcccgcctcatcgagaacatggccgaccttgtcaaggagaagcgcattgagggcatcactggcctgaacgatgagaccaaccgcaagggcatgcgcatcgtggtggacatccgcaaggatgccaatgcacaggtcatcctgaaccagctgtaccagtacacccagctgcaggataccgtgggcgttatcatgctggccatcgaccacaaggtgccgaaagtcctcaccctgaagcagatgctccagaaatacgtggaatttcaggacgaggtggtgcgccgccgcacccagtacgacctgaaaaaggccaaggagcgcgcccacattctggaaggcctgaagaaggccaccgacatcgtggacgagctgatcgccaccatccgcgcctgcaagggcggcatggcagaggccaaggctgccatcatggagcagttcggctttgacgacccgcaggcagatgccatcgtcaagctgcagctgggccgtctggcaggccttgagatcctgaagatcgaggaagagcttgccagcctgcaggccaagatcgagaactgggaagccattctggccgacgatgcccgggtgcttgccatcgtcaaggaagagctgctggaaatgaaaaagcgcttcggcgacgagcgccgcaccgagattcagtccgtgaccggtgaggtggatatcgaggatctgatcgccgaggagcagtgtgtgtacaccctgaccgaggccggctatatcaagcgccagctcaaggccacctatcaggcacagcgccgcggcggacgcggcatctccggcatgacccgcaaggaagaggacatcgtgcaggagatgttcgtaggctccacccacgactatgtgctctttgtcaccgaccggggccgtctgttccgcatcaagggctacaccattgccgagggcagccgcaccagcaagggcagcaacatcgtcaacctgctgcagctggccgagggcgaaaaggtcaccaacatgatctgccagtcgaaggaagccgacaccgagggcggctttgtgaccatggtcacgaagcagggcctcatcaagcgcaccccgctggaacagtatgctaacatccgtaagtccggcctgatcggcattgccctgaacgagggcgatgcactggcatggacccgcctgacctccggccacgatatgctcatcgttgccacccgcaacggtcaggccatccgcttcaacgaagccgatgcacgtcccatgggccgcagcggccacggcgtgcgcgccatccgtctggccgagggcgatgaagttgtgggcgtgtgcatctgccgcgagggcggcacggtgctcaccgtcaccgagaacggcaagggccgccggtcggacatcgacacctaccgtatcaccgcccgcggcggcaagggcatccgcaactacgatgccgccaaggataaggtggctgcggtcaagatcgtggacgacgtggatgatgtgctgctgagcagtcaggagggcatcatcatccgcctgcacgccaatgagatcccgctgcagagccgctacggttccggcgtgcgggtgatgcgcttgggtgagaacgacaaggtgatggtgcttgcccgcaccgaccacgacgacgaggcccagaccgagcagatcgacacctccgatgccgatgcagagccgactgccgagcagcttgccgccatggaagctgcagatgctgccgccgctgcagaagccccggaagccgacgataagggcgaagagtaaaccttgaaaacacaataagatttgaaagaagccgccgcgcagagatttctgtacggcggcttcttttcaaatccatccaaaccatgtataatagaaatagcgtgtgaggaataaaaataaacacagaaagtggtttaaggaacatgacagagcaaaaaaaatccccggagatcagcatcatcgtgccggtgtataaggtggaaaaatacctgaacgaatgcattgattccattctggcacagacctttacggattttgagctgattctggtggacgatggctccccggacaactgccctgccctgtgtgatgcagcggcggaaaaagacagccgcgtgcgggtaatccataaaatcaacggaggtgtaagcacagctcgcaatgcgggtttggcagctgcacagggaaattggatcggctttgtggacccggatgactttgtagacaagacttactacgaaaaaatgctgcgggcagcaaagcaggcaggtgctgaacttgcagtttgcaacgaagtttttatggaagaggatggaagcctttgtgattatcaggaacagcctttacgtacagaagtgctttcccgtgaggaagcaatacaccgcatccgccttacgccgttgattcaggcagcaacaagactgcatcggagagatgtgctggaaggaatcgtttttcctgtgggcaaaaactatgaagatgcatttaccacaccggaaatcattgaacatgcaacagctgtggcttgtataaaggaaaaactgtaccattaccggctgcatccggcaagcatcatgcatggaaaggttaccttgaaaaatctggatgagatcgatgcaaactacggccttcttgcttgtgcactcaagtatggaaaaaaagacacagcattcctgcagtatgtactgatgaaacgcatgctccgaaacacaaaaaaaaatctgccgcccagacagagaaacagtgaacgggttcagcaggcggaagcgtgcttgaaaaaagcaggcagagaggttcgtcaacagggggcctgtaccctgcgcaacgcagcagaaaccgcactctgcattgcaaacccgcagttctacttcaacttcaagtaccggaaataaaactgaattccgaatgggagaaatactgtgagtgaaagaacagaaagtggaaaaccggagatcagcatcatcgtgccagtgtatcaggtggaaaaatatctgaatgagtgcatcgattccatcctcgctcagacctttacagattttgaactgatccttgtggacgatggatcaccggacaactgccctgccctgtgtgatgcagcagcggaaaaagacagccgcgtgcgggtgatccataagcaaaacggcggtgtaagcacagcccgcaatgcgggtctggatgcagcacagggaaattggatcgcatttgtggattcggatgatacagcagcaccagaatatctggaaaaaatgcataaggcagtgctggaaacgggtgcagattttgcaatctgcagcagtcagtgcattgatgaaacgggcaaaacgcttgcgggcggagaacatcgccttttgaacgagtttttgccgcaggaggaagttctgcgccggatggtggtgtcggattttcaggttccgtggaataagctttatcgccgaaaactgctggaaaatctgcgctatccagaaaacaaggcgtttgaagatacctgtctcatgccggtcatttacgcaagagcggcttctgcctgcggtgtatgggattttttatacaattaccgcatcgttaccggcagtgccatgcaccgcaagactaccttgaaaacactggactgggtggaagcatggtaccgcctgtttgatgtgctgtaccaaaacggcatccgggatgctttgtgtgcagcctatcgcccgattttgactgccgtgtgggatatctggctgcacctgacaccggaagagcgcaaaagcccccggatgaaggaagcctttgcgtatgagcgtacagcccgccatcggctgatgcaagcccgcggcgtaacactaaaaaatttgtgggcggcagtggtctgcgctgcatcggcctgcagttatctggatctatgccgcaaaagggcggaaagacggcagaaaacgacctgaagcaatgaggagtttattgtgcaggaacaacataaaaaacagccggagatcagcatcatcgtgccggtatataagacagagcgttttctgagcgcctgcatctcttccatccttgcccagaccttcacggattttgagctgatcctggtggacgatggctctccggacagctgccctgctttgtgcgatgccgcagcggcaaaggacagccgcatccgggtcatccaccagaagaatcgtggcctgagcggggcacgcaatgccgggctggacgcggcagagggcgaatggatcgcctttgtggattcagacgacaccatcacgccggacttctgcgcaaagctttaccatgcggcgcaggaggccggtgcacagatggccgtgtgcaattaccggcaggtggacgaagccctgacccccatccgggagcagtatctgcatgtgcggcgggaggtgctgaccccggagcaggcgttggagcacagcacccttctgccctacatggtggtgtggaacaagctgtaccaccgcagcatttttgcgcagctgcgctttgcagagggcaagctgaacgaggacaccctgctgatcgcctacgcctacgaaaaagcggacagaatcgcgaatatcccggatgcgctgtacctttaccgcaaggtggcgggcagcatcgtcaacagcaaagtcaccctgcgcaatctcgatcgtgtggaagcaaactataccgtgtttgagtgcgtacgccgccatggcatcacgggctcgctgtgtgagctgtactgggcactgctgcactccctgatcgatgtgggaatgcacctgaccgccgaagagcgccggagtgcccggatgcagcaggcgcgggagtacgagcgctgcgcccgccgggccttgcgtcaggaacatgctgttaccctgagagcactgggcaacaccctgtgttttattatttcacaggactggtattttgcccgccgatggaaaaataccgtgtaaccgcgcaggtttgtctggacttccctgcaaagatatgctacaatggcaaaacaatcacaaatacccgtgggggagtagcaggcgcttttgcagggcgcagcaagtcaacatgatgaccgttggttccggtctggcttgctttcatttgcgagactcatgtgtttttggcgcatagaacagcgcccgtgcacatggagttggtttcaaaaaaatcacccggtcccggacgtacatgtgcgcccgggaccgggttttgtattgcccgatattctggtcagattcaggaggcagacaatatggaatggagttttgtatttttcctcaacagtgccctgctgggcgtgggccttgcaatggatgcgttctcggtgtccatggcaaacggcctgcacgacccccgcatgagcaggggaaccatgtgcaggatcgcgggcacctttgccctttttcaggccgtgatgcccatgacgggctgggtgtgcgtgcacaccattgtggagctgttctcttcgtttgaaaagttcatcccgtggatcgcgctggcactgctgggctatatcggcggcaagatgctggtggatggcatcaagggcgaagaggccaaagaagcaggagagctgagtgcgggtgcactgctcatgcagggcgtggctaccagcattgatgcgctttcggtgggcttcaccatttcggaatacggctggctgatggcacttgcggcatcgctcatcattgcggtggtcaccttctttatctgcatggcgggcctgcgcatcggcaaaaagtttggcaccaagctctccggcaaggcatccattctgggcggcatcatcctcattggcataggtctggaaatttttatttccggggtgttctgaaattcagacagcataaaacaaaagggcacggcgctgcaatgcgctgtgccctttcgttttataaaatgttccacatagaacaattacttttccggctcaaaataatcggcatattcctcggtcagcttggagccaagccgccggatgccgccgtacaggtgccgttccaccaacggttcaaaggcggaaaggtcgcaccgctcgatggcgttcatcaggttgcggtggtctgcgatcacctcggcaaggccgccggtggtcatggtgtccagcatccggaagcggctgtagtcggcgtgggcgttctgcagggtgctccacaggtacattttatccatggccgcaaaccatgtcccgtgcagggcacggtcggcttcgtacagcttgttgtaatccgggctctccatggccgcaagggcctcgtaggcttccacccgcctgcggatcaacgcccgctgctccggggtgcaccggggcgaaaaatcccgcaatacgcgggcttccacggcggtgcgctcgtagatcagctcgtccacgatgcggcggttcagtcgggtaacggtggtgcccttgtaaggcacgatctttaccagcccgttttcctgcagcttctgcagcaccacccggatcagggtgcgcggtgcgccaaagcgggcacagagcggattttcgctcagcgaagagccggggcggatggtcaggtcaatgatctcccgctccagcacagcatagatctcagcatcagttttgtattgttccatacctctcacctaatgaaaatgatgtattcctatagcgggctcgccctctcagtcaaagcctgtcggctttgccagctctcccaaagggagagcctttggcagtccacgcggactgtatctctatgccaaggcctctccctttgggagaggtgtcaccgcaggtgacggagagggctaggatgctgaccgtatacaacaatcttattctaaaaactctttccacggtgcggcgtccggcagcggcagcgtgaatgccatgggctttccggtctccgggtgcaaaaactgcaggccacagctctgcagggcaatgctgccttttacgcggcttccgtatttgccgtctccggtcagcggatgcttccgggatgcaaactgcacccggatctgatgggtgcggccggtgtgcagcgtgatctcagcaaggctcatctctcctgccgttttcacgatgcggtattccagcacggcttcccgtacacctctgcgcgggcggctcacagggaatacccggccccggcggctgtccttgaacagccagtcccgcagggtgccttcggcgggcagtgcttcgtccggcccgcctgcaatgacggcgcggtactgcttgatgaactgcggctcttctgccctgccctcggcccggccgtcctgcacagcgtaggcgttctggctctggatgatctgacggctgagtgcggccgcagccccgggcgttctggcaaacaccatcaggccggacacacccgtgtccaaccggtgcaccacccccacaaaggcatccggctggccccacagctgccgcagggctgcgggcacgccctcttcgctggaaagtccggcgggcttgtccagcaccacaagggcggcatcttcgtacaggatgttcacagcctgccctcggcgatcagggccttgagcttcaggataccggcaatggtcttgccgtcccggatctcgccgctcatgaccatctcataagctttatccagcggcacacggtcaggggtcaggaattcatcggcatccagatgcatctgggtcttgtgcaggccggtggcgacccatgtatagatcacttcggtgtcatagcccacggtggggaaaaactggcccagagagatataattgtccgcggtcaggccgcactcctcgcccagctcccgcttggcggcttcaaaggggtcctcacccttttccagcttgccggcaggcagctcccacagctcctgctgcatggcgtagcggaactggcgcaccatgcagatggtgccgtcctcaaaatagggcaggatgcacgcaccgccgtggtgatgcaccacttcgcgttcggcggtcttgccgttttccagcagagcagtgtcttttgtcagggtgatcacccggccctcgaagagcacctcactggtgagtgttttttcgtaatgcacggtcttctccattttattaccctctttgcccggcacagcgccggttttctatggcttcagtttacggcaaaatgaggtttgttgtcaataaagagatgataaatataagaggatgggacgatttgaaatgcgcgccgcatttgctttgcgcataatcagcggaaagaatatttataatttcgcaattctggaaaatctgcggagcttgtcggggcaaagcccctccatctgctaacgcagaccgctctgccgcttgaaagccccactggggctttcattgctacacaaacgcggattttccagaattgccttttcacaggaggggtcgtaacggaaagcagcatttgcagcgccgctgcgggaaacgaaccctctcaggctc

SEQ ID NO: 1126 - DNA, 33286 bp, Unknown
  gut microbiota DNA sequence
tcttttcaagggcttcctgctgaggcttcggaagtcattcttttgcctcagcgcttggcgctcaagtataataccacacccccgcctccttgtcaacactttttgacaacttttttcatcttttttgcgttcaccccaagacagcagcaggccgcaggaaaaactgcgccgcagctgcaatgcagctgcggcggcaaaagcggaagagtcctgtcccggaactattcaggttttcagggtcttcgcagggtcagccagactgcagcagccagcatgggcagcattccgatcaggccaatgggtgccgggcccaatacattgtaatagctgtctgccgggttcgtcagaaccacaaacagcgctgccaccgcattgaacgcgccgtgcgcaatggacggcacccagatgcacccagtcttttcatagagccagtccaacagggtattgagcgcaaagcagactatgcaccacacgaaaaggcccagcaccggcgcacccaaatagttggtgccgtattcgtagcccaccagcagcatcagcggccagtgccagacaccccagatcacgccgcccagcaggcggccgttgagcaggccgagctgcttcttcaggtggggcatcatatacccgcgccagccggcttcctcgcccaaagctgcgaacatattgatgaccggagccagcgtgaccgcaaacagacctgtttccagcatgtagctgaggttggatatgcccagctccctgcgcagggtctgagcgtccatctcgccgccgtaggccgctgccagccagctgccggagaggtccagtcgatgcgggaacaccgcaaaatagagcactgcggccagcaccgtaaataccgccgggccgaaccacgccgccagccagtagcggcgcttgccctgcaccttccagccgatgccggtgggctggcgcagaaagaccttttgcaccagcagcaccgccagcagcgggcagagcatggtggcgaccagcgccaactgatacagcacggcattctgcttttgcagcagcaccatgcagccgccgacctgacacagccatgccagaccaaatgctaacaggaaataaaggccgaagccctgcttttcttttgtggtcatacgaacttcaccgccgttccataagcaataacctctgctgcgccctgcatgacgctggcggaagcgtagcgcatccctacaactgcatccgcaccaagggcctctgcatccttgaccatgcgtcctgtggcaatctgccgggcttcggtgagcatatccgcatagtcggtcacttcaccgcccaccagcgtgcggaaccccgccatcagatcgtggcccagattgcggctctgcaccgtgctgccgcgcaccacgcccagcgcttccagctttttgccgggcacctcgttaatagttacgataagcatcttcttctcccttcctgatctcttcaatgcgttccagcaacaccttcagcgtgcccacgatgcaccccaccgggatgccgaacaatacgatgagcagcggcagcggcggcgcttcctgcgggtcgctgtaaaaggcccacgccatcgttgcgatcacaaaagccatcagcgccacaaaaagggcagcgccgatacaggcaccgcggatgcgctcgccttttcggtctgtgcgttcaatgttcacaaaggtcactccctgttcctcccgtgcagcaaggcgcgcaagcgtctgctccacatccagttcttccagactgccggagtccttttggagcagcttgcaaaagccgatggcttcgtccagatccttgcggcgggtgctcagacgttccagctgctgggccattccctcggccagcgtcttctgcccttccagcatttcccggatctcggccagcggcacatccagcttgcgcagcagcttgatgcggcgcaggcgttccacgtccgcctgcgagtagctgcggtagccgttgcccggctcgcggctgggggtaatgagcccctcctcctcgtaaaagcggatgttctttttggtcacgcccacagcggcttccacttcgttgatcttcatggttccggtgcctccttacgtgcctatgttacaccttccagaaaggggaaggtcaatagattttaatagaaaagtgagactcccccagtctgcttcgcagacagccccctcggagatggggcctttggcaaaacataaaactttgccgcactgccaaaggctccctccttgagggagctggcgagcgaatgcgagactgaaggagttcttattttatcagaagtagcacttgatctggaaccggtcggcgctgtcctgctttttctccaccacaatgtgctcatggttgaagtcaaagtgcaccggggtgcacaggtcggtattgcgggtcaagcgcagcagttcctgcacccgctttttctcctccggcacatagaacaggtagctcacgccctcctttttggcacggccggtgcggccgatgcggtgggtgtaatgttcgttctcactgggcacatcgtagttgatcacggcatccacatccgaaacatcgatgccgcgggcggcaacgtcggtggctaccagaatagccagcttgccgtcccggaagttctgcatgatctggttgcgctccttctgggagaggtcgccgtggaggcagtctaccgagaagcccagccgtgccagctggttggccagagtggcagtgttgaacttggtatcgcagaacaccatcacccgcttgtagttctcaccaatgatgatctgtgcaaggtcggaaagcttgttgcggccggaggtctccagcatgtactgggtgatcttgggctggctctcctcacggggctggacagtgatctcctcagcgttgtgctggtacagccagccgatgtccattacctcgcggctgatggtggccgagaacatggaaagggacttgcgggccttcatcatttcaatgatatgccgcacatccttatagaagcccatgttcagcatttcgtcggcctcgtccagcacgatctgggtcacatgggagatatcaatggaatggtgcttgtagtggtccatcagacggcccggcgttgccaccacgatctggcagccctcggcaaggcgctttgcctgcttttccatgttggcaccgccgtacacgcaggccacctgcacttcgggcataaaataggtcagctcttccagctcctgcgcgatctgctgggccagctcccgggtgggggccatgatcacggcctgcgggtacttgttttccggtaagatatgctccgccaccgggatgccgaaagcacaggtcttgccggtgccggtgggggcttttgcgatcacgtcatagcccgccatcatgacggggatagtcttttcctgaatttcggtcatttcggcaaagcccatgcgctccacggccttgtggatggcgtcgctgcactgcaactcactgtaaagcatctgattctccgttcctttgtcattttatattctgaacccagtatagcatgaaatgccgcacttgtcagcaggttcttaacgaactccttccgtcatcgctaatgcgatgccaccttccttccagagggagacttttccgcacggcgaggctctctctccgagggagctgttgagcaaaagcgaaactgagggagttacaaacaaaaagagctgcgccccgagtggagggcacagctctttgcatttgatttgaggatcagacagcttcctcagtcttggcagccttgcccgcttccagcttctgcttgaagcggccgctggccttgaagccggggatggaggtggactccagacggctggaaaccttggtcttggggttggtgtaggccttgggcttgcggggacgcatctcaaaacggccaaagcctgcgatggtcaccttctcgtctgcgcgcaggcagtcggcgatctggtcaaacattgcatccatcgtggtctcgacctgtgcttcggtgaagccggtcttgcgtgccacagtctcgatcatctgggaacgggtcatgtatctatatcctcctggagtgtccaaaagtaacgtcttttggcaaattttgcgttgttgagtataacataattcacacactgtttgcgacagattgcgcacaaaacgtcatttattgcgcacgaacttatgtaatctctctccgtccttcacaaatacagcgcccgctgttttggcgggcgctgcaaaaaagcattttacgggtaattcgtgaggtaattatttgcggtgatacagggtggcaatatccaccagcgggatattttccagactgtgatcactgcgcaggcagtccaccagagcgttggcggtatccactgcggtgatgcaggggatgctcagctccacagccttgcggcgcaggcggacggagtcgcgcttggggtcacggcccttagcgctggtagagaacacataatccaccagaccgctctgcagcaggtccacgatgttgggcgactcgccggacatattgcgcacctcgttgcagggcaccatgtgcttgttgagccatgcgcaggtgccggaggtaccgtacagcttgtagcccatgctcttgagcttccatgcgatatccacgaactccggcttgtcgctgtccttcacggtgaagatgcagcagcttgcagggccgggggtcttgaaggtgtagcccgcgccgatgaggcccttgagcagggcatcgtggtagttgggggcaatgcccagcacttcgccggtggacttcatctcggggccgaactgggtatccacaccgtgcagcttttcaaagctgaacacaggcaccttgacggccacataaggtgcgttggggtgcaggccggtgccgtagcccatatctgccagcttttcgcccagacaacagcgcaccgccagatccaccatgggcacgccggtgaccttggagatatacggcacggtacgggaggaacgggggttcacctcaatgacgtacaccttgccgttggagacagcgtactgcacattcaccagaccgttgacatgcagctcgcgggcaaagcggccggtgtaatccaccatggtgtcgatctcggcctgagtcaggtgctgtgccgggtagacacagatggagtcgccagagtgcacgccggtgcgctccacctgctccataatgccggggatcaggaagttttcgccgtcgcagatggcatccacttcgcactcggtgcccagaatatacttatccaacagcacagggtgatccatgtccacatgctcggtgataacgcccatgtactcgatcacgtccgccttggtgtaggccacgatcatgttctgaccgcccagcacgtaggagggacgcatcagcaccggcaggccgatctcgtcggcggcagccagagcctcgtccagattgaagacagtgcggcccggtgcgcgggggatcctgcagcgctccagcagctcgtcgaagcgctcacgatcctctgcttcatcgatggcatctgccggggtgcccagaatgggcaggccgatctcgtccatgtgctttgccagcttgatggcagtctggccgccgaactgcaccacgcaggcatccggcttctcggtggcaatgatgttgtccacgctctccgggttcagcgggtcaaagtacagacggtcgccggtgtcaaagtcggtggagacggtctcggggttgttgttgaccagaatggcttcgcaaccgtgcttcttcagggtccacacgcagtgcaccgagcagtagtcgaactcgatgccctgaccgatgcggatggggccggaaccaaagaccagaaccttctttttcttgggctcgcccttggcagatgcttcggcttccttctcggcaatgaactcagcagcttcgttgtcgccgtcgtaggtggagtagaaatagggggtgttggccgagaactcggcagcacaggtatccaccatcttgaagccggcgcggtagttctccacgggcagggtgtccacctgagccagacgcttgatggtcttatcctggaagccgtacttcttggcagtcttgtactgctcttcggtcagcacgccgttgcacttggcaagacccttttccagatctgccagatgctgcatcttgtccaggaaccaccagtcgatcttggtgatgcggtagatggtctggtggtcgatgccgcgcttgagggcctcgtacacgcagaacacgcgctccgcgtcctgaacatacatgtgagccacgatctcgtcatcggtcagctcctcaaagggcttgtgggtcagggtatccatgcccagctcgatggaggagactgccttcatcatggcagcctcgaagctgttgccaatgctcatcacctcgccggtggccatcatctgggtgcccagagacttgtcggcgtagacgaacttatcaaagggccacttcgggtacttgaccacgatgtagtccagcgcaggctcaaagcaggcgcaggtcttgccggtgacgtcgttggtgatctcgtccagcgtgtaaccaatggcgatcttggtagccaccttggcaatgggatagccggtagccttggaagccagtgcagaagagcgggacacacgggggttgacctcgatgaccgcataatcaaagctgtccggcttcagagcaaactggcagttgcagccgccctcgatgcccaactcggtgatgatatccagagcagcggtgcgcagcatctggtattcgtggtcagtcagggtttgggagggagccacgaccaccgagtcgccggtgtggatgcccacagggtccaggttttccatgttacacacggtgatcacgttacccttgtggtcgcgcatgacctcatactcgatctctttccagccggcgatgcacttttccacaagaatctgatggatgggggaaaggcgcaggccgttggtgccgatctcgatgagcttttcgcgggtctcgcagatgccgccgccggtgccgcccatggtaaaggccgggcgcacgatgaccgggtagccaatgcggtctgcgcaggccagagcgtcctgcagcgtttccaccacctcagaggggatgatgggctggtgcagcttttccatggtctccttgaacagttcgcggtcctcggcacggtcgatggtctcgggcttgcaggccagcagacggatgccggtgcggtccagatagccggagcgggccagctccatggacaggttcaggcccatctggccgccgaggttcggcagcacagagtccggcttttcgatgtccagaatgcgctccacgacttccagcgtcatgggctcgatgtaaacatggtcggccacatccgggtcggtcatgatggttgcggggttggagttcagcagaacggtctcgatgccctctgccttcagggcgcggcaggcctgcgtgccggagtagtcgaactccgcagcctgaccaatgatgatggggccggagccaatgaccagcaccttcttgattctagggtccttcggcatttcagcgtgcctccttttttgctgctttgacgttgttcaggaagcggtcgaacagaaactcggtatccttggggccgccgtttgcttccgggtggaactgcacggtaaagcagttccacttcttgtacttgatgccctcacaggtgccgtcgttggcgttcacctgtgccacctcgcccatctcggcgggcagctcgtcgcccaccacagcatagccgtggttctggctggtgatgaaggtgcggccggactcaaaatcggtcacgggctggttggcaccgcggtggccgtatttgagcttcatggtcttggcaccggctgccagagcactcagctggtggcccagacagatgccgaatgtggggatgttcagctcaaagatgtgcttgaggttctcgatgacctccacgggttccgccgggtcgccgggaccattggacagcatgatgccgtccggagcaagggccttgatttcctctgccgttgcaaaggcgggcatgaccgtcaccttgcagccgcgcttgacaaggcagcgcacgatgttgcgcttgcagccgtagtgcatcagcacgatatgggtctcgccctgcgggttgaacacctcgggcttttcacaggtaacattcttcaccgcatcggtgacggcgtaggcgcggatctgagccagcagagcctcggtctcggccttgttggccgggtcggcggggtcgaaggtggtcaggatggcaccgttcatcacaccactttcgcggatgatgcgggtcaggtggcgggtgtcgatgccctcaatgccgatggtgttgttctttttcaaaaagctgtccagcgtttcctcgcagcgccagttggagggggtggtgcaggcctcgcgcacgatgtagccctttgcccagatgcggtcggactccatgtcgtccttattcatgccgtagttgccgataagggggtaggtctgggtgatgatctggccatagtagctggggtcggtcagggtctcctgaaagcccaccatgccggtggcaaagaccacctcgcccacggtgacgccctcggcacccaccgactggccggcaaagaccatgccatttgccaaaagaagatatgcgttcatagttttcctcgtttcaacacattacagggtctgctttgcttcctgcttcatcttgcggctgcccagatgcaccagcggcagcttgccttccttgcagatggggcactcttccggtgcgtagttgggcaggtccagcttgagggcgcttgccacgatgggaatgggagacggagcctcgggcttggtgcggtccaccacgcaggtgatgcccacgcagatgccgccgttctcttcaatcacgcgcttggtctccagagaggagataccggtggtgaccacgtcctcagcgatgaggcacttctcacccgggtggatggcgaagcgcttcagggtcatcacattgtccacgcgctcggtaaagatggcgcgcttgccggtctggcgggccagctcataggcgtacacgatgccgcccatggccgggccgacgatcacatccacgtccatttccttgaccttatctgccacggtcttcatcacctcggcgcagcggtcggggtactgctgcagataagccatctggcagtatgcgctggaatggcggccggaggacagcaggaagtggccttccaggaacgcgtcacagctcttcaggatctcaagtgcttcactcattgtacttctccctctcttttataaaaatgtcttttgaacggtattgtaccacgcttttgcgtgatttgcaaatttatgcagtggctttgtttttatgcgtataaatcagcattttgctggtatatcaattggattattcagcattccgggcacatccgcggatctcgtccagcgttttcacgccgttcttgtccatccatgcggccatctcgtccgcaatggtctccatggcgcgggggttggcaaagtttgcggcacccacctgcaccgccgcagcaccggccatgatgaactccagtgcatcgcggcccgtggcgatgccgcccagacccaccaccgggatgttcacagcgcccacggcctgccacaccatgcgcaaggcgatgggccgcaccgccgggccggacaggcccgcaaagatgttgttgaacaccgggcggcgcttttccagatcgatggcgcaggcctggaaggtgttggtcaggctgatggcatccgcaccggcggcttccacggccttgcacatctcagggatgttctcggcctgcgggctcagcttgaccatcaggggctttttgcaggcagcgcgcaccatgcgcaccacctcaccggcagcttcagctttcacgccgtaggccatgccgcccaccttgacgttggggcaggagatgttcagctccacgatgtccactgcgctgtcgctcagcatcgcggcaccttccacatactcttcctcactgtggccgccaaggttggcaatggccaccgtgccgtacttctgcttcagttccagcatctcgggcagctccacgtcaatgaagtgctgcacgccggggttctgcaggccgatgctgttgatgaggccggagggggtctcccacaggcgctcgcccttgttgccgtactggccgtgcagggtcaggcccttgccggagatgccgccgatcttggcaaagtctgccagctcttcgtactccacaccgtagcccacagtgccggatgcgccgatgaccgggctgttcatcacaaagcccagcaggttggttttcaggtcagccatcagaagaacacctccgttgcatcaaataccgggccgttcttgcacacgctcttgccctcgccgcccctggtctcgcaggtacagccaaggcaggcaccaatgccgcaggccatcttcttttccatgctcacaaagcagggggtgcccttctcggcacacaggcgggcggcgttcttcatcatgaccgtggggccgcacaccagcaccacatcgtagtcggcggggtcgtacagctgggtgacaaagccgtggaagcccactgcgccggtgtcggtggacaccttgacaaggtttgcgatctcgcggtactcctccatgcagtagggggcatcccggaagccgaagaacacatccggcttcacacctgccgctgccagctcgcgggtgagctggaacatgggcgcggtgccgatgccgccgcccaccacagcgatttttttgtacttgctcaggatgtccggcacatcaaagccgttgcccatagggccggtgagctggaaggtatccttcattttgagctgcgcgatcttttcagtgccctcgcccaccacctgatacagaaactcgatggtgctgctgtccgggttccagcggtgcacgctgatgggccgggacaggaagggggcttcgtctgcgccccatgcacgcagggtaaagaactggcctgcgtggggtgcgtgatcgcgatccggccagaccaccgtcagcaggcggatgtccggggcaatgacctcattgcgcagaacagtggcttcacagcaggctgcacgcatgagcaatggcctccttcatattcacacattcgttgtaagcggcttcgtcaaaggcagtgcccggctgcttcttataggccagcaggatgccgcggctggagttgaccacgccgccgttgcccttggtgaggtactgggcaatgtcctcagccttgccgccctgtgcgccgtagccggggatcaggaagaagctgtcccgatactttgcacggatctcggtggcctcctcgatgtgggtgccgccgatgaccagaccgatggaggagtagccgtgctcgcccatgtagtccttgcccagagcgttcagcttgtcgcccaccagatcgtagacgtggcggccgtcggccagcttctcgtactcaaagtccttggcaccgccgttggaggtgcggcagagcacgaacatgcccttgccctgcttttcggcgtagggcaggtaggggctgatggagtccagacccatatagggtgccagcgtgacgaaatcactctcgaaatcgccggtaaagtgacccatggcgtacatctcggcggtcttggcaatgtcgccgcgcttgatgtcggcgatcaccggcacaccggcctcgcgcaccgccttcagggtgtcggcgtaggccttcatgccctcaaggcccagagactcgtagtaagcgatctgcaccttgtagcagcctgccacggccttggtggcgtcgatgagcttcctgttgaagcgcacgatgttctcaccgcgggacagggtgctgtccacgaagtcctcgggcaggtagctgaaatcggtatccagacctacgcacaccgggccgcgggcttccactgcttcgtacagtttgtccatgttcgtcatttgggtgtacctcctgtttgctctcttatctattttatatcatattattttgtgaaacattttctcagttctctgcctgataggtcagcttgccgcccttgatggtggcgcacaccttgccgtacagctcagcgccgtcgaacggggtgttgtgagatttggagtgcagcttgtccttgtccacggtgtagggggtatccagatccaccagcaccatgtcggcatcgtagcccggctccagctggcccttggcaaggcccagaatttctgccgggcgggtgctcatcaggtgcaccagcacttccagcggcaggccttcctgcttgcagagcttggtgtagcagacgccgaaagcggtctcactgcccaccataccggccatgcccttgagcttgtcctcttcggagtggggcgcgtggtcggttgcaatggcatccacgatgccggtgcggatgccgtccaccagcgcctgcacatcgtcggcggtgcggatgggcgggttcacacggtaatcgcaggtatcattggtgaaccacaggtggtgcggggtcacctcgcaggtgacgggtgcaccccgcagctttgccatctggatggcatccagcgcaccgcgggtggacacgtggcacatgtgcagcttagtctggtagtattcgctcagccagcagttgcgcaccgtctcgatgtcctcagccagacggtagtcccacgggctgatctccatatcctcggcatggctcatcacggtgatatccttctgggtgcagatggcgaaagcctttgccatggtggcattgtcctgcacgccgtggccgtcctcggtgatgaacttcacaccggcaggcagggtcttgaggtggtcgatgctcacaccgtcaaagttctcggtgatggagacggtctggttcacatcgcacaggcctacttcggcagccttctgctccaccatgaacgcctgtgccgcagaagagcacaccggctttgtgttgggcatcaggttcacgaaggtgtaaccgccggcggctgcggcgcggctgccggtctcgatgtcctccttgtactcaaagcccggggtacgccagtggcagtgcaggtccacaaaggcgggcagcacggtcagcccgccggcatcaatgaccgtttcgttctccccggccagtgcctccagctcctgacctacagcagcgatcctgccgtcctttacaaaaatctcaagcggtcttccttcggtgttcacagcatttacaagcagcatcgcagttccctcctgatttgcgtttgtctggttcggctttccggcttacgggcaaaaaaaaacttttccccgcaaagggaaaagctcattccacaaaaaaaggaaacaacgaacccacggcaaaaccggatgcgaactgcttgttcagtttggtgcacatcgcgcttttctgcatggtgctgtctccttttacaagtctggaatcttttcataatattttagcatagaagcgcgaaatgtgtcaatgcttccgcatatattttgttgcaaaaaggtttgccgcttccctcccggaattttagctactctacccaaaagcagtttttccccgccagattcagggttagccatgtcaattcctagcatattgctgtacattcccgtccgggtgtgctattataatatggtcaaaagagtcagaggctgttttcatggcagaggcgtgattcttattcagagcagcttcatcggaatcaggaaagagagggttttcccatgggtttgttggaggacgcgcggaacatccagcgcaaggaccccgctgcacgcaacgtgctggaagtcattttgctgtatccgggctttcacattctggtgtatcaccgcattgcgcactggctgtaccagcacaagcggttctttctggcccggtgggtcagccagcatggccgccgccgcaccggcatcgagatccaccccggtgccaccatcggcagatgcctgtttatcgaccacggcatgggcatcgtgttcggtgagacctgtgagatcggggacaactgcaccatctaccacggtgtcactctgggcggcaccggcaaggacaccggcaagcgccaccccactctgggcaacaacgtgctgatcggtgcaggcaccaaggtccttggcccggtgtatatcggggacaactcccgcatcggcgcaggcagcgttgtactgcgcaatctgcccgccaactgcaccgccgtgggcgtgcccgccgaggtggtgcgcatcaacaacaaggccgtgaacccggcggacgatctggatcagcaggatctgccggatatcgtagcccagcgcctgaccgatctggaccgccgtctcggcgcgctggaaaacgctgcacagggcgacaccccgcccacggcagcgcagatcgccgcacgacagaagtcgtaaccattttaatgccctccgcttgcgctctgggcattattcaaggaatttatattttttagaagcaagtcggaaaatcctgcgggattttccgacttgccttttcactggagcgggcacaatgaagaagtggcctgtttcccggctgtgcggctgtttccgcaggaaacaagcacagacagatcaagtttccctcttggtctccttccgtgaaaatgcaacagcggacagcccgcaggctgtccgctgttgctctattataagatatttttccgctgaagatgcccagagcgcaagcggagggcattttcaataagccctttttccgcagccttccccggcgcagagagctttcaccttctgcaccgcagcggccaccagatcactgataggctgctccggcacacccacgatatagttttcgcagtggttcaccgggatgagcacccgcgtcgcatggctctggcacacggctgtagccatggcgggcgtgatctcgcccagcagcgcatccgcaacgacgatgccgatgggccccacgatgatatccgcgctgcggcagttcaccaccacggcgttctcaccggtggcggcacgcggggcaccggccttgcgcatggcgtttgccgccagactgttggtgcccaccgcagtgagccgggcctccggacactgcgtgctcagggctgccaccagctgtttgccaaggcccccgccctgcccgtcgatgacgagcacattcatcggctgcatcagaagtcgatttcctcaaggcgcagcagcgcgatgatatagatcttcacggcttccagcagcttgtcgatgggtgccgcttcgtttgcaccgtgcatcgggccgccaaattccggcagcggcaggtccacatgctcggggccaaagctgaccgcataggggaagtggcgggcataggtgccgccgcccatggtgaagggcttggcgttctcgccggtcacttcgttgtaggtgttgatgcaggccagaatggcggggctgtctgcttcaatatagaagggctcggcagcggtcacatcgcgcagctcagcgccatcgcccagtgcggcacggatctgctcggtcatctttttgccgttggtgcaggtggggaagcggctgtccatggtctggaaaatgcggccatcttccatgtagatgcggccgccgatcacggtcagcgggccaaaggggccgtcggcgcagttgatgcccagaccctcaccggcggtggaagcgtgcagcttgcgcacggcctccagataggcgcgctcggtctcattgcacaggccgttgtccagcaggtagttcaccaccagaccaatggcgttcacggtgccctgcggcatggctgcgtggccggacttgccccagccgcggatgcgcacgccgtcgccttccggctccagcgtgatgttgggggcattcttcagcttagagatatcggttctgaccagcgcgcttgcacggtcgggcacggcgttgtttgccacaccgccctcgatctccacgatgacgccgttgcacaccgggctgacgatcttggcaccgaatagacccttctcgccgttgcacaccgggaactcggcatccggggtaaagcagaaagcgggagccgggtagttcttgaggtagtagtccacatcctgcatgtgggtttcctcgttggtgcctgccagtgcgcggatggggtagcgcagctcatagccctgctccttgaggaacttcagggcatacagggtagccaccatggggcctttgtcgtcggcaacgccgcggcccagcagccagccgtcctgaatgcgcatggtgaaggggtcggccgtccagccgttgcccacgggcaccacgtccacatggcagatggtcgccagatacttttcagggtccttgccggccagctctgcatagccgatgtagttttcacagttgcgggtggcaaggcccatgcctgcagccagctccagcgtcttgtccagtgcggcgcgggggcctgcgccatagggtgcgccctcttccggggtgccctctacgctgttgactgccaccagagcggcaatatccttcagcagctgttccttgttttgcgcaatatatgcgtcgattttctgattcagtgcctgatccatgatcttatcgttcctttctgtccggcagctttgcgccgccggtttcaaaacacctttttattttagcatactcagcggcaaaatgccattgtcaattgttgttctttgccagaacacagtctttttttctcagcccaccgagaacagggtgctcagcgcacccagtaggcccgcgctggccagacccatgatgatgcccgccagcagcacgccgcccatgcaggccttgaccacgtccttgaacttcatatccaggatcgagcccgccagcgtcccggtccacgcgccggtgcccggcagcgggatacccacgaacagcagcagcgccaccacaaggccgcggcccgccttggcttccagtgcgcggccgcctttctcgcccttgacgatgcagaacttgcagattggcccgataaggggcttgtggtagccccagatcaggaatttgcgtgcaaacagatagatgaacggcaccgggatcatgttgcccaccacgcacaccagataggtgggcaggatgggcaggcccatgccaagcccgatgggaatggctccgcgcagttcaatgagcggcaccatggaaacaaaaaataccagcagatagcttttgagcatagagtctcctttttcctactctttccgggagagcaggcatttttttacaggtcacaggtcaatgtccagctccaccgggcagtggtctgagccgaagatctcgttgtggatctccgccgcgcggatcttatcggcaatgcggcgggacacgatgaagtaatcgatgcgccagcccgcattcttctcgcgggcgtggaagcggtagctccaccagctgtacttcacctcgtccgggtgcagcacgcggaagctgtcggcaaagcctgcgtccagcagttcggtcattttaccgcgctcctgatcggtaaagcctgcgctcatgtggttggtcttgtcgttcttgatgtcgatctccctatgggcaacattcagatcgccgcacaggatcaccggcttttttgcgtccagtgccagcaggtaggtacggaaggcatcctcccactccatgcggtagtccagacgcttcagcccgtcctgactgttgggggtatagcagttcaccagccagaaccccgggtattccagcgtgagcacacggccctcgtggtcgtgcggctcaatgccaatgccggcggtcacggtcagcggctgctcacggcaccagcaggccgtgccggagtagcccttcttctcggcagaataggtatactcggtgtagccatccggcgcaaaatccgcctgaccgggctgcatcttggtctcctgcaccgaaaagatatcggcatccagagccgcaaagctctcggcaaagccatgggtcaggcaggcgcgcaggccattgacgttccagctgatcagtttcataggtatactcctctttatgttatgcctgatatttggttttccatacaccgctgcggaagcggagcacaaagcatgtcacgcggcaaacccagtcaatgatcattgcgatccacacgcccacagcgccccagcccatgcgcacgcacagcaggtagctgaagcccagccgccacaccgccatgcttaagatggacacgatcatggtgaacttcacatcgttggctgcacgcagggcgttgggcagcacgaaggacagggtccacagcaggatggcaaagcctgcatggatacgtaccagcagctcagaaagcaccatcgtctcaccggacagcgcgtagatgccgatgagcttgtgcaaaaacagcaggatggcaccgttggaaagactcattgcgatgtaagaccacaccgtcagcttgcgggtataataaacagcctgctcgtcgtcccgcgcaccgatgcagcggcccaccaccgtgatcatggcaaggctgagggccttgccggggatcacgcccatgccgtccagattgtttgccacggcgtttgctgcgatctgcactgtgccgaaggtggagatcatgctcaccaccagaatgcgtccagcttcgaacaggctgttctcaaaggcggacggaatgccgatgcccagaatgcgctttgtcatctttgcatccagccgggtggtctttggcaccgtgatggcattgcccttctggtagcacttgcgcaggataagggccgctgccaccacacgagacagcacgctgggccatgcaacaccgtctacgcccattttaaatccgaagatgcacactgcgttgcccacaatgttgatcacgttcatcaaaaagctgatctgcatggagatcttggagttgcccatgctgcggaacagtgccgcaccgccgttatacagtgccagaaacggataactgatggcgatgatgcgcaggtacagcacgctggcatccagcacatcggcatcgatggcaccgtagaacagccggatcatcggtcttgcaaaaacaaaacagaatgcccccaccagcaaaccgaatacgccgctgagcaaaagcagctggccagagcttgcatcggcctccttctgctcccgcgcacccaaaaactggcttaccaccactgcgccgccagtggccagcgccgcaaacagcacgatgatgaggttgttgatcatgtccacaaggctgacaccggaaatggccgcttcgccgcagcgggacaccatcatggtatcggccatacccacggtcacttccagcagctgctccaccagcagcgggccggtcagcagcagcagttccttttgtgtgaacagcggcttccgccctccgaagagcggcttttttgttccgctcaccgcctgattttccattgatatgctcctttccccgtgccgggccatcccgctcggacacatacgcccacccttcgcagggcagccttcccattgaatgtattcatcttagcacacggaccggttcttgtaaagaactgtcgcattctgcgtcttttttgccgccgttctgggccgcaccggctcatttttatgcttgttcgtcagtttgccgggaacttctcgttgaatttgtgcgtttctccaaaaatgcgatttttcgcacgtttattggtgaaaaatcgaaaaaagggcttgtaattcttccaaaaaagtggtatgttgtatccaacaaaggcattacgttggatacatgagcttctacgagcggttcttcgctcagcacaaagcctttgttcttaaaattgctattttcttcatttaccttcttatcatttaccctgcctgccccgcaaggggcaagaaaagcgatgactcaacctgcacgagtcaccgctttttctttttgtctgtgctatcgcaggcctaaccatttaaatgccctccgtttcactctgggcatttttagcggaaaattattttttattgcaaataagccagccctgcggagctggcttgtttgctttttcacagaaaaagttgcttcttgtgcagagagcagtcgcgtgggacaggcttcatagcttttataaaaatcatcgccgccggggacgctccgctgggccagaggcagggaggggtgtttcgagtcccccctccctgcctctggactccacccaccccgcaacgagaaaggggctgctcgcccctagtaaccccaaagctgttgggctccatacaaaaaatccaagtcgcttcgctaaaggattttttgtgttccgccgatttaaagtcgcttacgcgacaagccgtgcgggcaagctttcgctttatccgctgcgcgacagccgcaggctgacagcagcaagatgccgtcagccgttacggctcttaccgtgaaaaaagcaaatcaggaaaatccgcagattttcctgatttgcaaatataaaaatatttttccgctgatgatggcgcagcgcacgcggagccattttaaatcttcagcccttcacaagttccgcaaacgccttccgcacatcgccagagaaatacagcgtgcccagtgcgcacaccgggccttcgccgcccagctccaccgcccgggccacgcccgcttcaatggaagctgccgcttccgccctgcagccataggcccggatgtgttctgccagggtttcggcaggcatggagcgcggcgtgtgcgccgccaccgtgacgaaccgcaccgccagcggtgccagcaggctgagcatctggtccacatccttgtctgccatgatgctgaccagaaaaacgaacttctgcccggggaagcggtctctcaggctctgcaccgtggcccgcattccgtgggcgttgtggctgccgtccagtagaaacgccggttcgtgccgcagcagttcaaagcggcccggccagctcaccgtttcaagaccggtacggatggcattttccgggatgttccagccatgggtgcgcatcacccgcagagccgtgatagccagcgccgcatttcggggctggtagctgccgatcaggggcaggtgcacatccgtcaggccgtcaaagtcgaactccaccgcgtcaaggctgccgccctcgtatttcagcctgctgaaatccacctcagttagctcggcatgcttttcagcacagacgcggcggataacaatatctgcctccggcacgccgccgtagctcaccaccgggcactcttccttgatgatccccgccttggcggcggcaatgtccgcaagagtggggccaagctccttcacatgatccatgcccagtgccgtgatgactgcgcactccggggcatcaatgacgttggtggaatccagcgtgccgccaaggcccacctccagcaccacgatctcacatttctgctgggcaaaatagagcattcccagcgctgtgatgatctcaaactcggtgggcacatcttccatggcatcggcggcgggctttacctgctccaccagtttcaccagctcttcgtccgggatctgcaccccgttgacctggatgcgctcgttgaagcggttgatgaagggcgaggtgtacaggcccacccgatagcccgcggtctgcaggcaggatgccatcatggcggcggtgctgcccttgccgttggtgcctgcaacatgcacgaatctgagctgtttgtgcgggtcgcccagtgcggccagcagggtgcgggtgcgcgtcaggccgggcttgtggccggcccactggaccgcatggatgtattccattgcctgttcgtaattcattgtaatgcctctttttactttttcaccatcttcatcagggtacggttctccagcaggatgcgcagcagcacagtgttcaccgcagccaggatcagtgcattggggatgcgcactgccagcgctgcccacgggtagccgtagaagatgcgcagtgccagcgaggtgatgaccatggaacccacaaagtgtcccagcagcacgctgatctgcagccgcaggccgatgcgcagcccgggcatcttctgccatgcaagccccgccaccagaccaatggcacccgcgcccagcgtgatgagcgggttgatggcgtagcctgccagcacgccgccgatcatatcggccacagcgcccacggcaaagccggcaccggggccgaacagcagcgctgccagcagcaccggcaggctgcccagattgaaccgcacaaagccggtggagatgctcagcacccggctgaacacgatgctcattgccaccagcaaggccagcatggtgagcgtgcggacggaatttttcgagttgttcatatcaactgtcctccttgcaaaaggaataccgggtgggcggtctgcacaaacaaaaacgccctccctgtgacaaaccgcacaaaggagggcgtgaatccaacaactttcacttccgggcgggacgcaagccgtctcgcctgcacccaagtccatgcagcagcgggatgcagaccatgcaccgcgggtacaccttcgtccacagcacaactccccgttgatgcggcacttaacgcacatggtcttactctgttgatggttttattatagtccttttgccgcagccatgcaaccgcctgcacagacaactttgccaaaccacctcgtcaaattttagcagttgtgcatagcatctgccgggttttggcctgtgtccccttttcatttgccgcataacgtggtaagatgggtttaaccttaaatatggagtcttctcccggaaaggaatgtttcccgatgaaattcaacgaaatgacttatacccgcccggacatcgatgccctgctggcccggtgcagggagctggccgcaaaggccgctgccgcaccggacggcgatgcccttgtccggctatactatgagcagagcgaagcctttgcagagtacaacaccgccgcgaaccttgccaacatccactacacctgcgacacccgcgacgcttactggaaggccgagcaggacttctttgatgccaacggccccgctgtgaccaacgccagcgtggagatcagccgcgctttccttgcgaacccgcatgtggatgtcctgaccgcgaagttcggcaccacctgtgtggccggtatgaagaatgccgttctgggcatggatgaccgcaccgtggagctgcagcagcagttcaatgctctggtgagccgctaccagcagatctacggcggcgcactggtggagctggacggcaaacagctcaccatcccgcagctgggcccttacaaggaggatctggaccccgctgtgcgccgcgccgcctacgaggccgaggccggttattttgacgcccaccgtgccgagctggacgagctgtacggcgagatcgtgaaaaacctgaatgcacaggcccgggtgatgggctatcacgactacagtgagctttcctatgtgcgcatgaaccgcatcggctacggcccggaggagatccggaaattccgcgatcaggtggcaaacgatgtggtgccccagctgcaaaaggtgatggccatgcgtgcaaagcgcaccggcattgcccgccccaccttcaccgatctgcccatcatgttcaaggacggcaatcccaagcccattcccggctacaaagcccgtatggatgccgcccgcaccatgtaccatgagcttagcccggaaaccgccgagttcatcgactttatgcaggacaacgagctgttcgatgtggagagccgccccggcaagatgtccggcggctatatgaccagcctgcccagctacaaggcccccttcatttttgccaactggaacaacacctccggcgatgtggacgtgctgacccacgagtgcggccacgcctttgagggctatgtggccgagcgtgatcccgaagtgcctgccgatctggaatgccccggcatggagagcgccgagatccactccatggccatggagtttctgaccgcaccgtggcatcatctgctcttcggccgggataccgacaaatacgctctgctccacgctgaggacagttttgtgttccttgcttacggatgcgaagtggacgagttccagcacatcatgtaccagaacccggacctgacccccgatgaacgcaatgccgagtggctcaagctggaaaagaagtaccgcccgtggatcgattttgccggtcttcccttctatggccgcggtgcaggctggcagcgtcagctgcacatttatgagtgccccttctactatatcgactactgcctgtccaccatggccgcactgcagttctttctgctgagcctgaccgaccacaaggacgcatgggcgcgctatctgcgccttgtgcgccgtgcaggcatggccagctacaccgagctgctggagaccgccgggctgaaagttccctttgaggagggcagcattaagggcatcgcccagcagatgaccgactggctggagacccatcaggtataagaagccgttttcatccgcactgcacaccatctgaacggtcgttttgatgcatctgaggggcgattcatgccgttttgctgtcagggaccgtaaaatctggtatgctctggacagagaaaaagcatttctgtgaagcgaaaggagatccttatgaaactgaccggactgttcaagcgcggtgccgcctgcctgtgcaccgccgccatcctgatgggcggcgtctccgcctttgccctgagccccgctcttccggacgagcctgccccggtagagctttctgtgaccaatgcggtgtcggaggcgcagctgcgctctgccctgtccaagctcactgtcacctatgacagcgaggctgagggctggcagatcgattctccctacgaggatgccagcatggaaaaggcctcctgcggtctgtacccctacctgttcgttaccaacgatgatcccaccgtgtatctcagtctgggcatgacctacttcggcaataaaaagctggacatgaaatctgttcgggtagagaccgaggataactactacgacttcacctgtgatgaagagttcatcggcggctacgacaatgacctcaaggcatggttcgcctatgagctgttcgacatggacgacagcaccagctggctgaacgagtggcttgccgccaagagcgtcaccgccacctttaccggcaaagacggctccaccaagacctacaccctgaccaaggacaacctgcaggccatccgcgacatcctgaatgcctacgacaccctgctcggttccgacgtttccactgcccgcgttgtgctgcgcagccttgtaaagtaaacattatctgcttacagcaaaagcccccggaacggtaatccgttccgggggctttgtgttatgccttattcaggttcaggcgcttctcttacaggttgaagtagcgctttgcgttgtcgaagcagatgcccttgacgatcttctccagagccttctcgtcgttgggatactcgccatcctcgacccactggccgatgatgttgcacaggatgcggcggaagtagtcatgacgggtgtagctcaggaagctgcggctgtcggtcagcatgccaacgaagttgcccagcaggcccaggcttgccagacgggtcatctgctcttccatgccgatcttgtggtcattgaaccaccatgcggatccgtgctggatcttgcccggcacctcgctgttctggaagcagcccagaatggtgccgatctgtgcgtcgtcggcggggttcaggctgtagatgatggtcttggggcactcgtcggtgtcgttcagggcgctcagcaggcttgcgatctcgccaccgcaggtagcggtgttgatcatatcatagccggtgtcgggtcccagcagagcgttcatcttgcggttcacgccgcgcaggcagttgtagtggatctgcatggcgatgcccagacggtgatactgcttgcccagatggatcaggatgtaggtctggtacttctcagcctcttcggtggtgcaggtctcgcccttcatcaccttctggtaaatagcgttgacctcttccttggtggcctcacggtaggggatgtaatccagaccgtggtcagaagcgcggcagcccatctcggcaaagaactcgatgcgcttggtcagagcgtcggtgacgcagtcgatgcaggccagcttttccttgcccacaacagcggccagcttgcccatgtactctgcaaagccgggcttgttgatgttgatggccttatcgggacggaaggaaggagccacgatgaacttgatggtggagtcttccttgatcttcttgtgccagtacagatcatcgatggggtcatcggtggtgccgatgaaggccacgttggactgctcgatcaggccgcggacagtcagcttgggatcgtgctgcagcttgtcgttgcacaggttccacactttctcagcggtgtcgccgttcagcacgccgtcgtagccaaagaacacatgcagctcgaggttggtccagtggtacatcgggttgccgatggccatgggcagagcctctgcaaacttctggaagcgctcgcggtcgggcttatcaccggtgatgtactcctcgggcacaccgttggaacgcatcacgcgccacttgtagtggtcgccaaagtagctgccgtccgggttgcggccgcccagccatacctgagcgatgttctcaaagcggcggttctcgtagatctcacggggagggatgtggcagtggtagtcgcagataggcatatccgcagcgtagtcgtggtacagatgctgagcagtgggagactggagcatgaattccttatccataaatgctttcatgggtcgataactccttttctctgatggtttttgttaaaaatccgtcaaaccttgtgtacaacgggacgcccgcctgcacgggcaggtttgtcttacctttagtataacggaaaacacgcatgtatacaactgaaaaagtgacaaattttctagcacacaattgtgcttttcgctggaaatgccccaaatcgtcatcttaaggctaaaaatattgcacaaagctcttgacttatttgtatacaacagcataaaatagggtaaggagcagagggcagacaaagaggctctctgataagcaaagcaagtttataaaggagatcaacaagatggaaactttgaactacaaggttctggaaggcaccggctacaacggctacatcctgaaggatgcacccgtcaaggtcatgcagtttggcgagggcaacttcctgcgtgctttcgtggattacttctatgacatcgcaaacgagaaggccggctacaacggcaaggtcaagctggtgcagcccatcagcaactttccccagatggcagactggatcaacgagcaggagggcctgtacaccctgtacctgcgcggcagcgagaagggccagaaggtcgatgcaaagcgcgtgatctcctgcgtgtccgactgtgtgtgcccctacatcgacggcaagtgggacgaagtgctggaactggcacgttctgccgatctcgagaccatcgtttccaacaccactgaggccggcatcgcctacacgcagggcgacagccagttcgatcaggttcctcccaacagcttccccgcaaagctgacccgcgtgctgttcgagcgctacaaggcattcaacggcgctgctgacaagggtctggccatcctgtcctgcgagctgatcgacaacaacggcaaggagctgcagaagtgctgcaacaactacgccaaggattggaatctggagcctgccttcatcgactggatgaacaacgcaaacaccttctgctccactctggtggaccgcatcgttccgggccgcatccgcgatcccaaggaactggctgccatggaagaggccaacggctaccatgatgccgctctggacgtgggcgaagtgttcggcgtgtgggtcatcgaaggccccgctgagctggaggacaagctgccgttcaagaaggccggcgtgaacgtcatggtcgtgcccgatgttaccccctacaagaagcgcaaggtccgcatcctgaacggtgcacacaccggcttcgttctgggcgcatatctggccggcttcgacattgtgcgtgactgcatgcacaacgacaccatccgcggcttcatgaacaagatgctgcacgaggagatcatccccaccctgccgctggacaagaaggatctggaagagtttgcttccgctgttgaggaccgcttcaacaaccccttcgttaaccacgagctgatgagcatctccctgaactccacctccaagtggaaggcccgcaacatgccttccttcctggcttacatcgaggagcagaagcagctgcccaagtgcctgaccatgtctctggcagcctacattgccttctattccagcgacattcaggagcgcaccgccgacggcctgatctgcaagcgtcctgccggcaacacctacaagatccaggatgacgcatgggctctggacttctactatgcacacaaggacgacaccgcagcccagctggtgcacgctgtactgaccaacacccagatgtgggatcaggatctgaccaagatcgagggtctcgaggccgctgttctggctgatctggaaatgatccgcactcagggtgccgaggctgcttacaagagctgcctgtaagcctgaaaaaccaacctacccgcacaacaaagggctgctgctttgggcagcagcccttttgtgcgatacgataaggagaactactatgccgcaggcaattcatatcagccccatcgacaacgtggtcgttgccctgcaccccattgccaagggcacgctggtggaagtggacggtctttctgtgactgctctggaggacattccgcagggccacaagatggccgtgaagcccatcaagaacggtgagaacgtgatcaagtacggctttcccatcggccacgccaccgcagatgccgctcccggcagctggatgcacacccacaacgtgcacaccaacctgtccggtgaggtagagtacagctacaaccccgccccggatctggctcccctgcccaaggtcgagccggagacctttatgggcttccgccgcaaggacggccgtgccgccatccgcaatgagatctggatcatccccaccgtgggctgcgtcaacgacatcgccaagaagatcgttgccgacaatcaggatctggtcaccggctccatcgagggcctgtacaccttcacccatcccttcggctgcagccagaccggccacgaccatgcacagacccgcaagctgctggctgcgctggtgcgccaccccaatgctgctgccgttctggtgctgcatctgggctgcgagaacctgcagcacgatcagttcgtggaagagctgggcgagtacgaccacgaccgtgtgaagttcctcacctgtcaggaggtggacgacgagttcaccgctgcccgcgatatcctcaaggagctggctgcctatgccgggcagttcaagcgtgagcctatctccgtgtccgatctggtggtgggcatgaagtgcggcggctcggacggcctgtccggcatcaccgccaaccccaccatcggccgcttttccgacatgatgggccagcgcggcggttccaccgtgctgaccgaggtacccgagatgttcggtgccgagggcttcctgatggatcgctgcatcaaccatgatgtttttgtcaaggctgagcacatgatcaacggcttcaaggattacttcatcagccacaacgaggtggtctacgataacccctctccgggcaacaaacagggcggtatcaccacgctggaagacaagagctgcggctgcgtccagaagggcggcaccgcccccatcatggacgtgatcggctacggtgatcccgttgtcaccaagggcctgaacatgctgtacggccccggcaacgatctggtttctgccacggccatgaccgccgcaggcgcacacctgatcctgttctccaccggccgcggcactccgttctcggccccggctcccaccctgaagatctccaccaacaccccgctggcccagaagaaatccggctggatcgacttcaacaccggcgtgatcgccgatggcgaaaagaccatcgacgaggctgcaaaggacctgctggatctggtcatccgcgttgcaagcggtgagcagaccaaggccgagaagcacggcttccgcgagatctccatcttcaaggacggcgtcgttctgtaatcgtttcgaggctgctgtatggcactttggctgtacggcagcctctttgtgcatgaaaacggaagggaagtgtttttatggctatgaccactcgcatgatgatctatgcgtttctgctttacggcggcatttttgccgctatcgtggccgttattgcaaggatcataaaatatctcatccgctatggcattgattattattttgaaaaactggcacagaaccagaaacataaggaggactgaactatgaatcagatcaccacccgttatgtcaccgaaaacggtgcctgctatgagcagtacgttatcaccgatgctgaggcaaagaccgagctggtcatcaccccggagcgcggcggcatgatcaccggcttctccctgaacggcgaggagtacatctggacccgccaccccaatttttccgagtgcaaccgcccccgcttcggcgtgccggtgctgttccccaactgcggcctgccggataacggcgtgcacatctttgacggcaaggcataccccatggagaaccacggctttgccgacctgtgcgcatgggatgtggaaagcgtcggcccggacggcgtgaccctgattttggagtccaccccgctgaccaagttcctctatcccttcgatttcaccgtgctgatgaactataaccttgagggcaacactgccgccatcaacatgaccgtgatcaacgagggcgacaccaacatgcccttcagcttcggcttccacccctacttcaaggcttccaagctggagaatgtggacttcgatatcaagtgcgccacctgttccgagagcgccaagggcgagcagcccgctgccccggaaaagatcaccctcacccgcaaggaaggtgctgacaacagcgtgcgcctgctgaccggcgtgcagttccccatgaccctcaccgacagcggcaacggccacaaggtgactgtggatgccgacgacagcttcgaccacgccgtgctgtggcagcaggatgccgagagctttgtgtgcatggagccgtggaacggctgggccaacagcgtcaatgaggaaggcaagcacgaagtgctggagccggacgaggccatgaccgctgattggagcatcaccatcgagaaggtctaagcttcatatcgtataacaaaaaggacacaccgttgtggtgtgtcctttttgttataattcagttctttgccggaatcataaagctcttattttccgccgggtcccagtagagcagttccaccctgccgccctgtgccagcagtttttcctttggctcctgcttttgccagcagcgttccagcagcttttccatgtcggcatcggcagacaccttctccgggcagagggtactgccctgccatctgccgtcggcatacaggctcagcgcaccggcattgcccgccagaatcgcggcaacgtccttcttcatgcggtcgtagtcatactccacggccttgtactgcccatgccacaggccgaagaacaccgagaactcgccgcccagttcaatgagcaaattctcatcattgtgcgggttcttgaccacaaaagccacatccccgttttccatgtagtcgaagtccggttcctcattcgtgtgcacggtcacatgctggctgctcagcgccgcaagcaggtcctcctgcacggcactggtatccgggatctcatcataattgatatttgcgttcatgggatgctccttttctctgtactatttgtgttgttatttttcaccagactgcacaggtcttcttattttccttcatattgctggatcatttttatacgctgtgtaacagaatatatagaacggttcaccctgcttcaccttagatcaatgctttttgaatctaaccatcgaacacacgacctcgacacgatcctgattgtccaaactcaattcaaggtcatggtcgatgatgggcagcttgaaccggacggacttcagccactgtccattaggctggcgttccgggtagatctgcacctcgtcaatcaaaatctccaccagtctgcggcgttccgcctcggtcatggtggcataaagcttgtcaaagcaaatcaggatcttatagatgttgtcgcctgtgattttgtcggcttcaatggtctgcttctttgcccgggcatccatcagtccattttccacctcttcgattttatcgtacatcttataaaggcggtcgtcaaggtcggattttcgggcgataaagtgccggtcgtccgggtcaaggctgtcgatctcctccataagccgggattttgtggagtagtgctgccgcagctgcttctcataggcggcgatctcctgctcaatggcagtggtatctaccttcatgtgtagaccttggtcttttctgctgccatttccagcacctcccgttcgtaccgtcttgttcggaatagactttgcaagcaaagtcgtgtgccaaagggcgctgctctcgcctgtcggctcggtcaagcgcttcaaaatgcaacgcattttgaggttgccactggcgacccgcgcccctttggattctccgttcacattgtcctacggacgatgtgattttattgttgtagcgattcgcttcatcccggtttcgtcccggtttgcagaatgcccttgcaatccgaaaggagccgtgctataatgccgctgtaattgaatcagaaatcttcagggcagggtgcgattccctaccggtggtacagcccacgagccgtaaggcatgattcggtgaaactccgaagccgacagtacagtctggatgaaagaagataccaagcgcagagcccgcacggttctgcgcttgtggaggctgctctgggatgcgtttgcattctggagctttcttttttgcacaagggtcccttgtgtcttttcggcttgccctgaacgtttttgttcagggctttttcttttggaggcgacacgatgaacgacaaagagtatatgcgtctggctttgcagcttgcaaaaaagggttgcggatggacatctcccaacccgatggtgggtgccgtggtcgcaaaagagggcaggatcatcggacagggctggcaccagagatacggtcaggctcatgcggagcgcaatgcgctggcatcctgcaccgaagagccgcagggagcgaccctgtatgtgacattggagccgtgctgccattacggaaagcagccgccctgcgtggatgcgattctggacgcggg

SEQ ID NO: 1127 - DNA, 14572 bp, Unknown
  gut microbiota DNA sequence
tggaagcctgattttattagctgaaaccgaaaattctgctaatggcattagctggctaattttggtgataggttcaaaatgaaaaatgcgaagatcgtctttcacatggaaaaatgaccttcgcattttcttaaagggataccccagacaggattcgaacctgcggtctcctccttaggagggaggcgctttatccagctaagctactgaggcatattatgtattatcgttgattttttgaaattcaacgcacttggaaacaaatgtgtggaatgcttttcacaccgaagtgaccgactgcattgcaaccgggacgatggtaaagttgttgcatcaaaatttgtttggaaaatctcgatccccagccttgcttttgattagagcaatcacttccgcacccaaggtatcaggttgaccgaattcttaggaggcttgcgctctatccatctgagctacggagacgaatgccctattataatacagcattttgcggataaaatcaagttgaaccggagggcaaaatggtgtatgctatagaggaaatgaaaatagccgcggcaggctttgccgcgtgcggaggaacttatggaaaaggcaaaagggaaaaagctgttttaccgcccggcgggcaagcgcaaggggatgtatacgcctacgcagatcatctgtgcgagctttgtcatcgtgatcgcgctgggcacctttctgctcagcctgcctgttgccagcaagcacgggcggctggatgtactggatgccatgttcaccgctacaagcgctacctgcgttactggtctgatcgtgcgggatacctggacccagttcacctactttgggcaggcggtgatcctgctgctcattcaggtgggtggtctggggttggtcaccctcaccagcttcttcgcgctggctatgcggcggcgcatgggcttccgcgatctgcggctgctgggagaaagcgtctcagcggacggatatgcgcaggccaaggacgtgctgaagatcgtggtgggactggctggcctgtttgaaggcattggcattgtgctgctgctgttcgcctttgtgccgcagttcgggctggaaggcatctgggtgagcgtgttcacggccatctcggctttctgtaacgcgggctttgatctgtttggccggttcggccagtattcctcactggcaccctatgtgaacaattactatgttcaggccgttgtgatgttcatgatcatttccggcggtctgggcttcatggtatgggtggagatcggtcaataccgcaaaaagcaccggctttccctgcaggccaaggtggtgctgagcttctcggtgatcctgtggctcggcggcgcggcgctcatcgcgctgatggagtggaacaatcctgccagcatgggcgggctctctgtgcccggcaagctgatggcggcactgttccagtcggtgtccactcgtactgcgggcatgaataccatcgaccttgcggcctgcggccccatcaccaaactgctgatgagcgcgctgcagttcattggtgcggcacccggctctaccggcggcggcgtgaaggtgactacgttcgctgtgatcatcctgacgatccgcagtgtggctcagggtcgcgacgactgtgtgatcgcagagcaccacatcgagtccaagacggtttatcgtgctttgaccattatcgtgctcggcgggctggcggcggttggctcggctgtggtggtgttctataacacctcggacgctgtgtcggtcattgacgctattttcgagtcctgctctgcctttggcacagttggcctttcggtgggcgttaccgctcagctgaaccggggcgcaaaaatcctgtatatgctggtcatgttcatgggccgtgtcggcccggtgtcgctggccatgagcctgacagcaaagccggacgacaacaaacggaagatcatgccggtggggcatatcaacgttggttaaacgattttgaatgccctcctagagttgcggctcccagcatccacttcatgccttgagcggcattcgtgtcttgctggccgcggccccaacaactcctccctgcttctgccgcaggcagcggtcgtcgttgttgtactctgggcatgttcagtggaatttgatttttatttttcgcatttgtcgcagccctgacgcttgtcagggcgaatcccttccatctgctaacgcagaccgctcgcctgcttgaaagccccactggggctttcattgctacgcaaccgcagggctgctccaaatgcattttcacgagtggagtcgtagagataagcgtcagagtataacaaaagtgggtgctatccgaaaatagcacccacttttttgtatattgaaaaataaaatttactctgcgtacagctttatgatgttcagcaagatctcagtgcagcggtccatgcgctcagcggtgatgcactcgcatacgccgtggaaattgaagccgccggtgcccagattggggcagggcaggcctttccagctcagcatagcaccgtcggtgccgccgcgcaccggaatttcttccggttccagcccggccatgcgggtggccttgcgggcggtctctactaagtggaaatgcggcttgattttttccagcatgttgcggtagctgtccttgatctccacggtcacagtgccttcgccgtactttccgttcaaaaattcggcaatatccagcatgttgtccttcttgaactgtagctttgcggcatcgtggtcgcgcaggatgtagcccagctttgcggtggtcacatcgccgtacatctggcacaggtggtagaagccctgccggccctcggtcgtttcggggcgggcggtgatgggcagcgcctgatgaaactccatggccacattggaagcgttgatcatggtgtccttggcggtgcccgggtgcaccgagaagccgcggatggtcacggtggcggaagcggcgttgaagttctcgtactcaatggagccggcatcgccgccgtccaccgtataggcaaagtcggcaccgaagcccggaatatcgaacagctctgcaccctcgccgatctcttcatccggagtaaaggcgatacacagcttgccgtggggcaggcctttttcctgaatggtttcaacagcggtcaaaatttcggcaataccggccttatcgtcggcacccagcagggtggtaccgtctgaggtgatgagggtctcgcccttcatggaagtaaggaaggggaacacagagggcttcatcaccatgccggtggcgggcagagttacgtcgccgccgttgtagttttcccacacaacgggctgcacattctcaccgctggcatcgtcggcagtgtccatgtgggcaatcaggcccagagcgtgttgatcctcacagccgggcgtggcaggcagggtgccatagacgtagcagtgctcgtccacatgggcatcctccatgccaagggccttcatctcatccaccagctggcgggcaaggtcaaactcccgttcagcggaaggatgcgtaccggagttttcgtccgaggtggtatgcacccggacataattcaaaagccgttcataagcgcgcataaggcacactccttttatatttcagtgatgtatacttctcagttcctttatcataccctcttttccgacaatttacaactgttttgcgcgtattcatatgaaaagatgaatcctcatttttaaggtgaacaaaattcacgcagtaaaatgcatccatctgtgcagaacgtgctacaataggtacaaaataagctgggagggaagttttatggcaacaaaagtctttttttacaccctgcgcccctacgatgagctgggcatcgcgcagcggctggcaccgcagctggacgttgagtttggctctacgcaggagtatccaacgctggaaaacgctgaactggcaaagggctatgatgccgtgtcggtaacgccttgtgatatgagcgcgcccatggtcaagcggtttcacgagctgggcgtaaagtccatctgctgccgttccatcggctatgaccacgtagaccgcgagacggcccgggaactgggcatgaaggtggccaatgtggactacccgccaaacggcgttgcaaactttgccattatgctcatgctgatgagcctgcgcaaggcagggcacatcctcaagcgcggcgaagcgcaggactactccctgcagggaaaaatcggccgcgatatttccacctgcactgtgggtgtgatcggtacaggccgcattggccgcacggtgctgcagcatctgtccggctttggctgccgcctgctggcctacgacctgtaccccaacgacgaggtaaagaagatcgccgagtatgtgccgctggagaccctgctggcggaaagcgatgtcatcactctgcacaccaacgctacggaggagaatcaccatctcatcgacaccaaagcaattgagagcatgaagccgggcgtgaccatcatcaacaccgcccgcggcaagctgatcgacagcgatgcactgatcgccgggctggaaagcggcaagattggcgcggcgggcctggacgtgctggaaaatgagaacggcctgtactattataatcgcatgggcgatgtgatcccgaacccggagctggcggctctgcgcagcatgcccaatgtgatcctgaccgaccacacggctttctacacccacgaggatgtggagagcatggtgcgcggtgtgctggaaagcgcggttgcctttgaaaaaggccagcccacccggcatgatgtgacggacctttgatttgtccggcggacgattttgaatggccaccgttgcactctggccatcttcagcggaaacagtatttctgaatagagcagatcccggcagactacggtctgccgggatctgcattttcacgggaggaggtgcagcggaaaacggcattccgtttgtttgaagcatctgccggttgggacccttccggtgaaaaagggattcctgaaaatccgcagattttcaggaatccccaataaaaaataatgattccgctaaatatgctcagagcaaagcggagagcattcaaatggtaatcaacccagactgatgcccatgcggcgggcgacggtgagcaggtcgcagttctccggcacgttgcgggtcttgcctgcaatgtcggccagacggttctgggtgacatggcggttcaccatggcaacggtcacgccgtagcgctcaatctccaccagctttgccgcatagctgccgaactgggtggccagcacacggtcgtaggcgctggggctgccgccgcgctgcatgtggcccgggatgcacacacgggtctccatgccggtttttttctgcacggcctgtgcaatgcggttggtggcggtggtgccaaagcctgcctcggcgcgctttgccatccattccttgcgcttcatgccggcttcctcgcagttgatggcaccctcggccacagcgatgatggagaagttggaacccttctttgcgcggcgttccacggcagagcacacacggtcgatatcatagggctgttccggcagcagaataatatctgcaccacctgcaatgccggaatacagcgtcagccagccggccttgttgcccatgatctcaatgcacatcacgcggctgtggctgcctgcggtggtgtggatgcggtcgatcacatcggtggcaatgtccacggcggtgtggaagccgaaggttacgtcggtaccatagatatcgttatcaatggtcttgggcaggccgatgatgttcagaccctcctgcgagagcaggtttgcggttttgtgggtgccattgccgcccaggcacagcaggcagtccagcttggcttccttgtaggtctttttcatggcggcaactttatcaatgttgtcgtcctccaccacacgcatcattttaaagggggtgcgcttggtgcccagaatggtgccgcccagcgtcaggatgccgcggaaatcgtcctcgcacatctccttgtagtcgccgttaatcaggccgctgtatccgttcaggatgccaatgatctccacgttatcgcccatgcgggcatacagtgcttttgctacgccgcggatggtggcgttcagacccggacagtcgccgccggaggtcaggattccaacacgttttttcattcaaaagccctctttcatttggtattcagcgccgcgcgttctgcctttcaaagtcagtctgcccggagacctacctgtttatagtataagattattccggatgggggctgctgtcaagagaagcgcagaaaatttacacgcttccacggtgcatttctgcgggcaggagaacagcgggaaaacttttgcagaaaaaataaaaaaatggttgacaagcgcgggccttttgagtataatatcccttgtcagcagcgcacggcgcggcagacgaactgaataatggggatttgcatagtggtagtgcggtagactctgactctacttgtgggagttcgattctctcatccccaaccaagaaaaccgcagtctcaactggctgcggtattttcggggcatagcgcagttggtagcgcgcctcgttcgggacgaggaggccgtgggttcaaatcccgctgctccgaccaaaaagaaccagtacacattcgtgtactggttcttttttgtctccgcgcgggatttgaacagggcggcggtgcgaagcaccgcaaacaaagccatagtatggctttgtttagcccgcgggttccaccggctaggaatgtctaacaaggtgcatgctgctaggagcagcgggatctgcaacccgaaaagttttgacttgtgttctaaatatgatatactggaaaagcaaagccatatttggctgcagaacggacaaaaaaagcgaggaaaaacagaaactatgcaggaaataaaaaagaaaaaacgggcggtcgcgctttttgtgatcgttctgatctgcctttgcggctggtgggctgtgcggaaagagggtttctttctggatgagatctactcctacggccttgcaaacagcagctatgcgccgtttttgaattggtattataatggtgagcattcgtttgatggaaatctcccggaagcagtttttgaacaacaggattttgtgaattatatttcggttcagaaaaatgatcgcttcaactatgcgtcggtctactataatcagacgcaggacattcatccgccgctgttttattttctgttgaatacagtatgctcgctgttcccgggcagctttacaaaatggacgggtctggggatgaattttgtgctgctgggcggcacgctggcagcgctgtatgcgctgggcatggagctgtttgcagactggaaaaaagcattgttcgtctgtgcattgtatgcgttcaaccgtgaaatgatctcgaatgtgacgatggtgcgcatgtatatgctcatgaccttgctgacaatcctgcttgcgctgctggtggcaaagtctcttcgcaggccgtctgtgcccaaatatcttctgatcggtgtaaccatctatcttggcatgatgacccagtatttctttgtggtctatgccttcctgctgtgcgcagcatatgacctttacctgatgttccggcgcgaatggaaaaatgctgctgcattttcgcttccggcacttgcgggcgttggcggaatgctgctcacctttccgtgctggtatgcacagctgcactcgcagaatacgaactcactggatgctacaacgcgcaatctttttgatctggcgcagtaccccaaaggcccgctggagctgatcggctggagcattgtcggctttgctgtaggcgcaggcattatggccgtgctgatcctgacgaagctggggcagcgctggctgccgggcaagttgcgcggcactacgctgatccccggggatgtcaagctgattgcggtcccggcgcttgctgcatttctggttatcgcggtgatctcgccgtataagtcgctgcggtatgtgtaccatctgcagccactggaagcgttgttttgtggctgcggccttttctccattctggatacgctgcgtgcaggcaccagaaagcgcattctgcagatcgtgtgccttgcaatggtcgtgcttgcatttgtgatcgagccggagcgcatgtacagcggtacttataagatagacaaagaactggaacaatacagtcaggccgcctgcgtggatattaccggggaccttggcagtttcacttccggcgtgcaggagcttctcaaatttcaggaggtctgtgtggtgccggacgattccagtgagctgctggtgcagtataacaccggcgaaaatgatacgctggtgctgttcattggaggccgggggctgtggcagttcgtgacggcagaacaggtggagcagatcacggcccagaatatggaaactgcgtggaacgttgcccgacagggcggctatgaggatgtttcgctgctggcaacgcaggagtttgaacagatctttgttttgaaaaagtgaacgctttgcggcacagcagaagggaaaaatgccttttttgcgcgtgctatatcgttttaaggtaaagtgtgctagaatagtaccatcaacgattcaggagggtatcccatgctcaaacgactgcgcaaagcgcacccaatcttattctgtgttctggcagaagtggtctttctggcaagcctgttcgtaacagatcttgtctttaccattgcattggttctttttcgggcggattttgcgtccattgatacatacctctacagcactctgcaggagctggtgggggccatggtggcagtgctgtttctggtacggacagaccgtgctgggctgctgcgccgccgcggcagcggctttttcaatggcctgctggtgggcatgtacccgctggtgttcattggctacaatgcctttgggtcgctggtgctgggccggccggagaacggcgtgctgcagcctgcgacacgtatctgcaccttccttgtcagcatggccatggtgggtgtggccgaggaattcatcttccgcggtgtcattgcccagaccctgctggagcactttggcaccagccgcgccggtgtgtggaaggcctgccttttgtccggtgtgctgtttggtgcggcgcacctgaccaatatcctcagttcggcacccttcggtgtgctgatgcagtgcgtgtttgcagcatcgctgggcactctttttgcggcgatctacttccgcaccggcaatttgtgggtgacggtattcctgcacggtgccatggatatttcgtccatgctcatcggtgggctgtacggcaccactaccgtggccgatgcggtaagcggctacgatgcatccatgctgctttcggtgctgctgtatctgatccccaccgcagttctgctgcgcaaaaagaagctgccggaggtacagctgtactggcaccagtacgtaaaaaaataaaggcaggatgcaaaaaatatccttgcattttgcacagggttctggtatactgtatctgttaccgtggtacggggttgggagtatgcccgctttttgggaatgccgtttcccgccgctgttccattggcacataaaattttataaagaggtatgtaactatgaacaagcaggaagttatggccaaagtcgctctgaccgagaaggacactggctctcccgaagtgcaggttgctctgctgaccgctcacatcaacgagctgaacgagcacctgaagaagaacccgaacgatcaccacagccgccgcggcctgatgaagatggttggccgccgccgcaatctgctggcttatctccagaagaaggacatcgagcgttaccgtgctctgatcgcaactctgggtctgcgtaagtaatttaaacagagggcaggtaccgcaaaggtgcctgccttttgcttttgtatacaaatggcagcggctgcgtattgcagcagtaaatcgaacgcctgtgccccgaatgctttttcatggcgcgggcggctcacatcaacggcagagatattcccccggtggggggaaatatctcaaacaaaaccggatgtgaacggcacggacgctggatttattgctatgatgcgcgtgccaccgccttttggatagaaaaaatccgaaaaaacaaggaggcaaaaacaatggcaattgaatttggttcccgcagagagacctttgagaactacaaggtctacgagaccatgctggcaggccgcccgttcaaggtagaaatgggcaaaatgtgcggtctgtccaacgccagtgcgctgatccgctacggtgagacctgcgttctgtgcaatgtggtcatgagccccaagccccgcgagggcgtggatttcttccccctgaacgtggagtatgaggaaaagctctacgccgcaggccgcatccccggcagctttatgcgccgtgagggccgccccggtgagcgcgccatcctgaccagccgcgtggtggaccgccccatgcgcccgctgttccccaaggaaatgcgcaacgatgtgtgcatcaccatgaccgtcatgagtctggaccccgactgcagccctgagatcgccggtatgatcggtgcttctctggtcactgccgtgtccgacatcccgtggaacggccccatcggcggcgtgcaggtgggtctggtggacggcgagatcgtgctgaaccccacgcaggagcagcgcaaggtgagcgaccttgccctgaccgttgccgccaccatggataagatcgtcatgatcgaggccggtgccaacgaggtggacgaggacaccatgctgaacgctatcaaggccgctcacgtggagatcaaaaagaccattgagttcatcaaccgcatcgtggccgagcgcggtaagccgaagatcgattttcaggtggtgggtctggatatggacgtgttccacgccatccagaacaagtatctggacgacttcaaggccgctatggacaccgacgacaagaatgtgcgcgatgccgctctgctgcccatcatggacaagatcgccgaggagtaccccgacctgaccgctgcagaccttgatctggtcagctacaagatgcagaagttcgtggtgcgccgctggctgctggacgagggcaagcgcgtggacggccgcggcatcaacgagatccgcccgctggctgccgaagtgggcatcctgcctcgcgtgcacggctccggcatgttcacccgcggccagacgcaggtgctcaccacctgcactctgggcggcaccaaggacaaccagctcatggacgacctgaccgacgagcagaccaagcgctatatccatcactacaacttcccgccgtactctgtgggcgaggcccgcgcaccgcgcagccccggccgccgcgagatcggccatggcgcactggcagagcgtgctctggtgcccgtgctgccctctctggaagaatttccctacaccatccgctgcgtgtctgaggtgctctcctccaacggttccacctctcaggcatctatctgcggctctacgctggccctgatggatgcaggcgtgcccatcaaggcacccgttgccggcatttcctgtggtctgatcaccgagggcgaccgctggatgaccatgctggacattcagggcgtggaggacttccacggcgatatggacttcaaggtgggcggcacccgcaagggcatcactgccatccagatggacatcaagatcgatggcctgacctacgacatcattgccgaggctttcgagaagtgccgtaagggccgcctgtatattctggacgagatcatcaagccggtgatcgcagagccccgccacgagctgagccgctacgcacccaagatgttcagcatgatgatccccaccgataagatcaaggacgtgatcggtaagggcggcaaggtcattcaggacatctgcgctacctgcaactgcaagatcgacgtgcaggaggacggccatgtgttcgtctctgctgtggatcaggaggacgcaaagcgcgccatctttaccatcaagaccattgtggaggaccccgagatcggtgccatctacaagggcaaggtgacccgcctgatgaactttggtgccttcgttgagatcgcaccgggcaaggaaggtctggtgcacatctccaagctggacaccaagcgtgtggagcgcgtggaggatgtggtggctgtgggcgatgccatcgtggtcaaggtgaccgatatcgaccagcagggccgtatcaacctgagccgccgcgatgccattctggctctggaagccaagcgcgccgagcagcaggcacagcagcagtaaaccctgactgcataaaagaaaccgaaaaagaggacccgatgcatctgcatcgggtcctctttgttgtatcagaaggaaattatactgtacggtatttacgatccagcgcccagccgaatgcaaacagcaccacaccgctgacagccagcaccggcacgggccagttcagctgaccggtctgcggcagaccgctcattaccgggttatccgggtggcccggagccacgggattgtccggattaccgggtgctaccggatgatccgggtggcccggagccacgggattgtccggatggcccggagccacgggattgtccggattaccgggagagaccgggttatccgggttgtccggcggggtaggcgtatcaggataatcgggcgtaggcggggtagggggcgtaggcggcgtgtccggcttggtgggggtgtaagcacccaccttggggctggcatctaccgcataattccacttgccatcctccgccatgggcagagagacaaggaacggattgatcggctcatagcccttggaagcctcggtctgcacgatcagatacaggcccagctccagaccacggaaggtcacgttgccgtccgcatcaatggtctttgtggtgccctcggcgctttggggcagatactcctgcagctgggccgcaagggtgctgtcggtcaaatcacccagcgcaatgccgcagccgtagaaatcgccgcagtattcgtagctcaggttgccgttttggcgctttacctcggccacacggtacaaagtgagcttgccgccgctcagcgccttatcgttggcgctgtcgtacagcgtaacgcggatggtgccggtagtgggattgccgctgctgtccaccagcttgatgtttgcgctggtggcaagggcaggcagcgcacttgttaccagaaggcacagcaccaaaagcagggccgcagcgtgctttttgagatcagtgcgtttcatgtttttcacctcttgtagatttgcgtttgcggttggagaacagcagccagagcagcagcaccagcagcaggggcagtgccatgatgggagctgtgatgatcggttcgatcttgatggcatcggctgttacacggatgtgcttgagcttgtccggcgtttcgatgcgccgtccccgcaccagaaggcggtgggagttgatgccgtagggggtgcaggtcatcagggtgacgtaatccttgccgtccaccaccttgaggttgtccgtctcggtgggcagtacaatggagatctggtccacctcataggtcagcacccggtccagcaccgtgatggtgaaggtgtcgcccacttccagctggtccagattggtgaacagcttggcgctgggcaggccgcggtgggccgaaatgaccgcgtgggtgctctcgccgcccaccggcaggctggtgccctccaagtggcctgcggcgatctgcagcacgccatcgctggtgccgtggtagatgggcagctccacaccgatcttttcaatggtgatgtagcccataatgccggtgccggtcacatccagcgtgctttcgtaggtgggaaagcgctgcgggaaatacaacgcgtccgggtcggcggcgatctgcgcattgaacgcatctgccgcctcgaaataggcgctgtagtcggcatcggtcagattgtccacatcctcggcataggtggccacagcacgggactgatgcagctggttgacgtaatcgctgagggtggggtataacatcacggatagacccacgaaaaagacgaggatcaggatgacggtgcttttgttctttttcatgggctactccctaatgttataaggataggagcgggggccttgcggcccctttgctccgggttcttgggggaaatggagcttacttgttctccatgcgcttcttggtgaccagcagaacgatggccgcaaccatcaggccgccgccgaccacatagaacagggtagtgccgatgccgccggtggagggcagggtaatgccgccggcttttttgttgatgatggtggtggacagtttggagctatcaagctcaacacgatttccgttgtgatttgctgtgatggtcacaggggggatcacagagcagggggtgaaatcggcaggagtggtggtctccttcaggtagtaggtgccagcgtccagacccttgacattgaactgaccattagcggcggatttcatttcaacagcttctttgtatgtatcggttgcgtctttgatggggtagtagaattcgccgt

SEQ ID NO: 1128 - DNA, 7340 bp, Unknown
  gut microbiota DNA sequence
cttttcacatagaagacattaagtgcttcattccctgagactttgctgatgtgtgataaagaagtagtagaagtgtaaaaaattttgccgttcctatccggcgtttgcgcattgcgccggataggtcgggcggtcattcgggcaggtctaccttgccaacgaaagagtaataaatatcaatgtcctgtctgcgtgtgccgttctcgtcatagctgcactcatgcacaacgattttctccacaaactcacgcaaaagggtaggggtaagttcttcaaagctggtgtacttgcggacaacattcataaacttttctgcgtttaccgtggcttcctgcgctttggaaagctctgcccggatagcggcggctctctctttcagttctttctgctcggcttcatagtctgccgacagctccgtgaaacgctcgtctgaaatgcgcccggtcacgctgtcctcatacagccgcttgaagatagcggataactcgctgatacgcttctcggcggcttccagctcctttttccttgcggcgttcctgcgcttgcccccgtcctcgttctgctcgatcagcagcttcataaaccgggcttcgtgcttcgctgcatagctggtgactttccgcagattgtcggtcactccggcggtcaacaggtcggtgcggataaagtgcgccgtacagtcacgggtacgcttcttgtagctcccgcagatataacaatcctgcttgcgggtggcgttctggtaacgctgctggtaaaggacgctgccgcagtcggcacaaaagagtatgccggagaataagcccacttcatcatagcggttcgggcgtttgcgctgcttgcgtaactcctgcacacgctcccacatctgggtgtcaatgataggctcatggtggttctcgaaaatcgcctgtttctcaatggggttctctacgctgtgcttggtcttgtaggacggcttctccgtcttgaagtttaccagacagcccgtgtactccctgttttcaaggatatgtaccacggtattggtcgcccacttgcactcatagccggggtggtagcggcgggtgcttcccgtccgacggtattccagcgttcccggcgtggggatctcctgctctgtgagcatacgggctatcttggtcggcccgttcccggcaaggcacaagctgtaaatctgccgcacaacaggggcggcttccccgtcaatgataaaattttcgtcctcgtccataaagtagccgtatacgggtttgctcgtgacgggcttcccgctcatacccttagaccgttttactgctttgattttcttgctcgtatctctcaccagccattcgttaaaaatgttccgcagaggggcaaaatcattgtcgccctgtgcgctgtccactccgtcattgatagcgataaagcggacgcctttctgtgggaaaatcatttccgtatacattcccacttgcagatagtttcgccctaaccgtgacatatccttgacgataacggtgccgacttttccggcttcaatgtccgcaagcatggcttgaaaaccgggtctttggaagttcgccccagaataaccgtcatctgtgtaccattgcagattggaaaagccgttctgcttcgcataggtttcaagaatacgcttctggtttgaaatagaattgctctcaccttgcagctcgtcctcgtgggataatctcggataaagggcggtaataaggtttcgggtggtctgtcttaacatagtgtcctccatttccgacagccagccccactattccgtatgactatcataccacacgccggggctggctgtacagtcctttctgcttctttacgtcccgtcaaattgccgatttttgtgtagcagcttccgcttccagcactttcagcattttatcggcggcggtggcggtggtgtcctgcttgaaatagccggaaacgacaaggacagaattacctatgcggatttccgtcacgcaatccgggcggcgggtgctgcggtcattctttggggtgttggtcataggcggctctcctttctgttcatcagctttttcagttgtcccattttctcctgcgccgtggcttttcggaagttgctcccggtaaagcggacaggagaacacatttcaatcagacggtcataaatgcgggcgtgggcggtgtcctccgggtgctgcaagtcctccagcgtgagattagtcgtgacgatcagcggcctgccgctgcggtaacggctgtcaatcacgttgtagacctgctctaagccgtattccgttccccgttccattccaaaatcgtcaaggataagcagcgggaagctgcaaagtcgggagatatattcattcctgccctcaaagctggcggcaaggtcacccaatatcaatgcaaagtttgtcatgcacacggggatttcacgctccataagggcatttgcgatacagcccgcaaaatagctcttgcctgtgccaacgccgccccatagcagatagccaatgttgcgctctttcatggtttcccagttctccacatagaaatgggcgtgttccatttgcgggcacttgccgttgtcgttctcaaacgtccagccctgcatagccgggtctgtaaagccccgccgcttcaaccgctcgacagtttcaaggtgactgcgctgtttctctgcggcttcccgttcctcacgctctgcccgctggcagtcacattctgccgggtggcggtcacgccccagccatgcggcggtttctttggggaaatagccctctttgggcttgtggcacttcccgcagtataaaagcccgtcctcgccggtgtagtcctccggctccggcgtggtgtcggtcatattcaaaatcatttcatcaaatccattcgtcataagctctcgccctccttacaggtataatcgggtatgccctttttcggggctttcttggctgcgtcctcctgcgcccacttgaaaatcgtggctgcatggctcttgtatttcctcccgctggaagcgatatggcaggataggcggtcaatgtaatactcccacttgccgggaagctctgttttcagcccgtcaagctccgtatcggaaagaatgacattgtggtatctgccataggcggcgggggcggggtgtcccgtttctaactctctctctttttctatttctatatctatctctttctctatctctatctctggtggacaaatgtccgctcgatatggtggacatttgtccgcccctgtctgcggcagggctttttgttcctgcaaagccagccgcgccctgcgcttgcgctccccctcggtagaggactggccgattaaaagctcaatgttgctcatgtagagtgcgccgcttggcaaaggctccacaagccccagcttcataaagattttcaaagctctctctacggtacctacctgctggcgggtaatggtcgcaatcatctgggcggtgtaggggatattctcgtcaagctgcaatttcccgccgtttttcagcgatttcaagtacagcttcaagagaatgttggaatagataacgccgtcctgcatactttccagcagaacgattgcatcatcgtcaaaatagctctctttcagcttgaggtagtaatatttgcggttatctgccataggctgcgtcctcctttttccagcgtttggaataatagcgagggcatagtatgataaccgcccggaagctctgtttgcagtcacgggtgcagccccggcataggtcgttgtaagtgatacggttgcggtggttgaggaagaaagaccattccagccgccgcttcttgctcattctcggcaatggtaagctcctttctgccgttcctatcggtgtagcgggatagggggcattttctgtatgttctcggtatcattttcgggctttttctgccctgtaagccccgtttggaagtcggggagtattgcggtaagggttcatatcatacctgtatttttgtagggtttcggtatcatttcggggcggtctttaacgctcctgttcacgctttttctgctggctcggtgcgccccttaaaatctggtcgatattgcgtctgactgtctgaagctcctgcgcccgctggcgtttctcccggtagtcgttatatccggcgttcttctggacggtaagctgctcaatctccctttgcagggctttgctggctggcagcttggttattccatgctcccggaaataacgggcggctgtgtccgctatgataaaatcgctttcgtgctgttcccggtaggctctccgggctttctccgatttctgcgctttcagaccgtcacgggcgggcttcgtgccgatatagcccaaaaggttgcgctgcaattcctttttctcccggatagcggcttccagccctttcagtccggcaaggctctcctgcgtggcggtgttggctgcggaaatggcagcgtccagctcgtccggggaagaaaagccatactgctggtagagcatgagggtagccgacatctgtttgaggttgtgcatggtcgcccacttctcatagccccgtcctttcccctcggctcgcttggcggctatgtctaccatgcgctgtacagcgtcattgttcggggcgtttttcgcttcttttttcgtccgtaagcggtctttgatactgccggggtattccgctatggctgcgggtttttcggcggctctggcggcgttctgctccaaaacggagaggacagcagcccggtcaaaatcgtcccccagcttccgggcggtaattggcttcgtcctgtccggcgtgaggtaacttagccgcccccggctctccttgacggtcacaccatgccggagaagcagggcggcaaactcatcaaagccggaagcagcggcaagggcttcccggatagtccggcgcagcttcgccttatccgtttcaaacttggtctgccggggcgcgataccgtccgcagcaataggggcgttggctctgtcaagggcagcctgtcctttcttctgcgcccaatactcacgctcggtaatgcgttctttgctgccgttcaaaaggtctatctggtaaagcccctcgctgtggcacatctccatgacttcggctttcagatagttcatagctgcgtccgtacagcggtgcttgcagcctgctttcctgtccgctggcctgtccatgtggggcagcatgggaacctccgcaatccgcagactgttaatgacgatatgcacatggatattttcggtgtggctgtgtccgtccgggtgggtgcagacaagggcctggtgtccggggaaatgctcggcgcagaacttctcgcccagctcctgcgcccgatcaacggtcaagccgttgtccgggccgtcccgtgggtcaaagctgatgatgtagtggtggctctttacgtcctcccgtttctggttcttgccgtagcggagattggagcgcatacaggcaacggcaaaatcctccccgccacaattcagagaggatatgcggtagtctaccctcggtatgagccgcccgtctgcgtcaagggtgggcttcatggtaaactcgtcatgctcgaatgtgaggtatttttcagcgtccccgtagttggcatttttagagctgatatgtttgagtatcgccaacggcttcacctactttctgcaagacttcaaacttcaaggcggcaaggtcggcggcggctccccgcacttccttttccagcccccggtaggggcttccgtattcgttcaggctccgggcaatctggtttaagttgccgccgattttcccgtactctgccgtgagcttggagagggcggcaagcagcccgtcattgaccggggaaacggtgacaatggggcgtatggtcgctttccgtatggcttgccggataaactcggactggctgatttcataagccgccagccgcccggtgaagtcggcgtattcttcatcggtcatgcgggtctttaccacatgacggcggtggggcgtattgtatttctttcgcatggtctgtgacctcctttctcgcccgacagggcgcatagcagggtttggggaaggcactccccaacaagattcccgcaggggcaaaaataagcggagagcgaattttggcacctcggtagaatcttgctctgaaaaactccggcgttccccggctcccgtcctttccgctaacaaaacgtttcaaaagggctttgctacccgctattccggcttatcttgaaaattttcctttcactacctacaacaccacgcaaagcaaaatggacggagatttttagaatttcccctctattccctacaacaccacgcaagccggaataggcggacaatggcagtatttttttctttgataccctctacggataagtaagggattttgccaactgcggcggctattttcccttttgttttttcatactggggattttcaaaaatgccaaacaggaacgaaaaaaagcagcaaatctgttgaatagatttactgctttctggttgccggcgaagcggcggttattcagttgtaggcggtagggctatctcccaaagcggaacttgaaaatagctgtgagaagcgtctgggtgatgtagtcctctgtatcttggtctacccgtccattcacacgggcggcacattgtatgcggcggcggtaatactgcaatacagttcccaccgcttccggctccccgctggcggcttggacgattgtttcataggggagaagcctattatttctcatatgccattccctccatttccgcttggagctgccgtagggcttttcggatatggtagcccgctgtgctgcggctgcgcccgtactgtctgccaatttcgtgctgtggaatacgcttgaaaaaggacaggtaaatcatttcccgctcccgttcgtccagccgtgacagggcttccgcaagtaaaccgctgctgaaaatgaccgtatcgccgcaaagggtaagtatgtattcctcgtccggctccggggcttggaaatattcatctgtcgtgcctaaagggtagtgcttttcgtctgtgaggtattcaagggatatttctcttttgtgcttcctgctccgtgtcctcgctgcgttgatcgttgcatttcggataacgactttgcaaaaggcatggaaagtgtactcgatatgttcccgatattcttctgtacaggtcatggaaaatccccctttcctcccaaaagggctgtggctggttagtagttgctttttatgatagtaaggggcggcagcactttaggctgtcgctccttgactgcctaactgcaaaaccgggcggggctgtcaacggcgggcgaagcccgttcatcttgaccgttgactggctcg

SEQ ID NO: 1129 - DNA, 26390 bp, Unknown
  gut microbiota DNA sequence
gcagagatattcagattttcattcaatgcactgctttagaacatcgcagaacgccatatcatcatctacggcggcgattgcggcgttgatcaaagttccccggtcagtgttgccccagttaatatgcagaccatattccaacgccatgcagcgaatcaattcacgggtgctacggccatttccctcacggaatggatggatgatgttcagtccggccatcgtctgcgacagattttgaatctgcttttctttatcctgttcggcaagcagcttcttggagtgaatggttttgaacacccgctctaattctcggtcaatcaggtctggcgggtagaacatcgtgtcgcccttgctgatttgctccttgcggatgtgccctgcaaacgggtacacatcctcaaaaaggaagcggtgaatccgaaataggtgagttttggtaaaacgtcccttgattggctcctgtaacagagccatctgttttacagccgtaaattcttcttcggcctgtttgagttcggctttatcatgaatgttcaacttgttgatcagaacatccgtatccgggtagcagtacatggactgcactgtggtgtagacatcatactttgagaacataatcagcccttcttcgcgtactttgcgcgcagttcattcacgacctgctgatagctggcctgaccgctgccaatacggtcaaggttgctgcgtgtatctttgctgatggtcatgccctcaatggcaaaggttccatacacattgcggaggttgcgcttgtgctgggcaggggtagtatacttgacactcatggttgagtctccttttaatccacatgatactatataaagtttatcgtgtatgcgtactcttgtcaatctataaacttgatgccaaatataaaaagtgcatgcattctccttgaggtcgagttcactctttgcacgtgatacttctttctgcgctacttccatgtccttgcgaagcatatcctgaagcagcttgcttttggaacactctaaaatctccgaaaacttggtgcatacgatactctctacgattgcgtccagttttgttacaccatagccggactgtccatcgcattgactcggatgccgtacattataatggcagctataacggaaccgcttttccttcaccttggagccatcagcaccagcccggttcccagaaccataagcaggaaaagcgaagccgtccttatttttttcattgcagggtctcctattctttatcttccaaaataaaaaacgcagcgcaccccaattctatgggctgcactgcgtctgagcgtctggcgttttgcttgattgaattattctgccgccaatttcaaaaatttcttgtccgactggatgctctgggtcacaaacttcccatcccggaacaacgcgtatgttgtgacgggtgcgggcacattctgtgccgtctctttctcggtgatgtggatggctttgaacggaatcccgtgttcccttgcagcctcctgcacctttggcacccaataataggtgtagggacactggtcagtatagtagaggacaaagccgttttcctccaccttgggatgcttggcgcaggccttgaattttggcggctgggcattctctgcaaggggcagatacatgaggttgatgccgcaatcggagatgtccgaaaccttaaagcccttatggttcaaaaactttgggtcagcaaggaattctcgtttgcgcccctctgcacacagaatacaaacgccgtttttgccctgcgccttggcatcccgaaggcattcttccagcagctcgctggaatagccgtgccctttcaaggagccggagacccacagacagttgatataaagccagcctgccgcttcaatgggcacccatgcgttttctgccgggatgtactcgataaagcatttgccgcgctccgcactgcggtaaaaaacaagcccctcctcaaatcgctgcttaagccattccttcttggcaaagctctgtttgccggacatggcacaacagatgtgttccttgtcgatgttttcttttgtgattcggatatactccatcgaagcgtcccccctatatccttatgccttctccgacacagcgacctttttgtttttggctgcggcctaccgcatccgtccatcgccgcccatcaaggcggtcatttcctcaagatagtccagcgggaacggcggagagcacaggggcttcatggcaatgctcatgagcttcatgggattgtcgtctgccgccacccggttggagctgagctttccgcagcgtttgcagcggtggatgatggcccactcgccgcccttgcgtacccagacggccaccggctccatgatgccgccgcaggcatacattccaaagcagattttgttttcttcacaagcaatctgtcgtcatagactccgccgacgattttaccgcgataataaaggatatattctcccatcatagaccgatacgagatatcatccaaatctgatagctgttccaaaataaaatgaagatattctttgctggaagccattatttcacaccacccttcgtattgattcatcggatgatttcatttttcacctcgttcaatgttaaaggtacggaagaacagctttacatgggcgtccaacttttcaaggctttcggcttctcgttccggctggcggtcgcagacactgagcagggtgatgaccggggaaacgtacatccatgccaatgtatccgggtcctcatcccgaatttcgccgcctgcgatcagggaacggaaaattcctgcatggtaagagatcatacggtccacatagcgttccgagaacaatgcaggccgcacctccctgcaggatgcttttgagggtgtcaatccgtacatcctaaaacaaaagccgcccgaaggcggcaagatacatcacggaagcaaatatgaacgcggctcagggccatcagaacagatccagcatgttgtccagataaatttcttcccggacgcgcagctgatactcaggctttgtcatgtagtaaagcagaaattccagtatcaacgcgctgcccagtccccgcccctcgattttgaagttggaaaagccgccgggcagataaactttgcggatatccccggccccgatgaagccggggttttccattgcctttgaaaaacgatagccctgctgtgcacccggcgctgtgcagcggtggtccgggcagtcctcgcccagatttttgcggctgacattctcgtagcagtgctttctgtcccggcagccgtaccagcagcattcgttgcacagaaattccaccttgtccttctgatcctgcggcagggtatccagctctgcaaacgacttgttcaggcggaaatccggcacaacatagcggaactcttcccgttccgtctccctgcggagctgctgaaaatctgtaaggacctttgttgtggaggacacgaaataaaggcccggatactgccttttcaggtagtccagcagcaggtccgaatggacgatgacaccattctgcacacggttttctttttcaaacagcgcacagagggcattgcatttccggtctgcaaggtgctcttcccggagcagcgaattgctgaaggtgagccgggccgatatgccatattcctgcatcagtgcaagcacccggtgcggctgtgcatcgccaaagccagtgcggcccccgccccagatgcagtcggccggtgcaccgtagaccgaaccgatctcgcaccagtcgtaaaaatattccctgtgttcacggaacagcggcagaaacacacggtacagttcataaaattcaaacagtcccggaagatgataatatgccgtgccgcgttcgtgctgtgccattgccgtgtgtgttcctcatttctgtaagtttcagcttccctgcagcagcttttgcgctgcacccggagatctttttgtcagtatagcacagtcctgccgggaaagaaatcatcttcctcttgaccttgagcgcactccaagttttatcatgtgcatgctggtgatcttatctctcccattatattcctttctctgcgaaagaacaagaagtatcttcatgtctgacatgaaaaaacagatttttgatcttccttaccactcctgaaagaacgagacgatctttgcccggctttcgcgccttactttacagcacagcgcctgttctgtcaagagatgaaacgtttttcgtgcattgcgaaaaatgtttcggttcacatgctctgcggctcgatcttcaccgttctgccgcccaggttttcgtaaatgcgatgggagactgagagcaccgtgcggcctgcagaggcgcggcgcagtgcttccagcacacgggcttccgtttcagcgtccagatttgccgtgacctcgtccagcaaaagcacagccgggtccgccgcagcagcgcgggcaatggacagaagctgccactcgccctgcgagaacatgccatcgctgcaaacggtgtcgcagccttccggcagggcctgaatggcttcgtcaatgcctgcaagctttgccgcattccgtgccatctctgcagtgatctgcgggtcgcccagcgtgatctgctccagcacggtgcccggcacacgggagaaatgctgctccacgcagccgatgcaggtgcggcgctcgcggtcggtgatgcgtgccacatccacgccgccaatggtaacagtgcccgcctgcggctggtacaggcccagcagaagcttgaacaccgtgctcttgcccgcaccggtgcggcccaccagcgtgacctgcccgccctgctttaccgtcatggagaaatcactcaggacgggcttttcgccatagccgaaggtcacatgcgcaagctccacatccccgcgcgcagcggtccggcgctcggcagggatcgtgcgctccggctgagcgagaaaggcatcgatgcgcttgacacccgccatggccgactggatggtctggatctccatgccaaggctttcaatgggagcaaaaatgcgggaaatgtagttgatgatcgccaccgaggtacccaccgacattccaaagaatgtaagcaccatggcattgccggaagcggaaagcagcatcacgatgcctgccaccaccgcgttcagcgccagcaccaccggcgaatagatggcatcgtaaaaattggtgcgctccatagcggcgtagctctcgccgatgcagcggtcatagcggcgttccctatagctttccagccccagcgcccggatggtgcggatgttgtgcagcgtctccggcacctgaccggagacagccgcaacggcacggcggttatccagttgtgcggccagcatccgcttttgcacatggtgggtgaacaccgcaaacagcggcagcaccagcagcagcaccagcgcaatgccggtgttttttaccgcgatgaccgccatgatggaaatgatgcggcaggcatctgccgccatgctgatgatgccggaggtgaacagcgcttccaccgtgtccacatcgccggaaaagcgtgccgccacctcgccggggttctggcctgccagcgtgcttgcgggcagccgggtaagcttccgggacatttccgaccgcagcgcgtgggtcattttctggccaaagagcaccagcaggctttcctgcgcggaggaaagccccccttccagcgccagactgccaaagtaaagcagcactgctgcaatggtgagcgggatgcctgcggtgagccggtcaatgataccggccagcagcagcggcggcagcagtgatgccaccaccgatgccgccacgcacaggatggtgcccgccgtgagcagatgatgcgacatagcggccatgcggatggcttcaaatacgccgttatcctttttactcttcatccagatcgccttctttctgcaccgtctggctctcgtacagctggcggtacagcggaaccgtttccatcagctgggcatgggtaccaacggtggttttaccgccgtccataaagatcactttctgcatctgcgggaagtggtacagccggtgcgagatgaggaagaccaccttatcctttgcatcgctctgcaaatcggcaaacacggtatcctcggtatggcggtccagcgcagagaacgggtcgtccaggatcagcaccgggcgcgggtgggccagcgttcttgccagtgccaagcgctgggcctgaccgccggaaaggcgggtgccgctggggccgatgacggtatccacaccgttctccatggccagcacttcgccgtccaacgcagcggcagcaagccacggcatggcatcctgttcactgccgcagagaacattgttctgcaccgtatcggcgctcagctccggatcatggcccaagtaaccaacggtggcagagatctgccgcggggtcatggcagtaaattccgttttgccaaattttgccgagccgccgtagggtgcttcgcacaggaacaccctgccaaaggtggatttgccgcaggccaccgggccggtgattccaatgatatcgccggggtgcgccgtcaggctcaggccggaaaagatgggtccttcgccataggaaaaggagaggttttccagcgtcacgtcctgcgccgccgggatattcaatgcttccagctgttccggctgcttcatcagtggcttgatgcgcttccacgagacctcggctttctgcaccgagttgaacagctttgccaccttggaggatttgaccaccagtttcgtgaagcaggaaagaaaggtggtgaacgccgcaatgtcccatgtgctccagccggagccgagcacatttttagcgccgaaccacaaaatgaacagcacgcctgcctcagacgctgccagatacagcggcggcagagcggactgccacacattgttgcgcacggctgttttttcgtaggtgttcagggtttcctcgtacttttctacgcgggcatcctcacagccgtaaatgcggtaggtcacagcattccgggcgcggtcgagggtggcagcgctcagcgcacttgccgcctttttgtacgccgcaccggcgcgctgcaccggctttttcatccatgccgcgcacatgtaggaaaacggcgtgaacagcaggctgagcagcgccagccgccagtcgtacaccagcagcatcaccgcatagcccaccagcgccacgccggtatcaaagatctcggtggtgaacttgcgcatcccctctacgcagtcgtccacatccgagatggccttggtcatcagttcaccggcaccttctttttccagcgccgcccggctctgccgcaccagattggcatacaggatgcccttcatccggcggttgatgttgttggcaaagcggcggacataaaagcgcttgataaagcgcgccgcctgcaccgccagcgtgaccacgatataggccagcaccagcatggccatttttgccgccgtctcgctgccgcccagaatgtcggcaaggcactgggccagccggccctcgaaccaaggcgttgccagcaggccgatgttatacacaaggcccgacagcgtgacaaaggccagcgggagccactctgctttgaaataggagagcaccctgtccgggcggaacgttttatcctttttcatgagcagcctcacctcctgcagctttccggaaatgcgggaagcccgcgcggctctcggtcttggatgctgtgtacagcttgttcagcgcagcggcaaaggcagcggcttcctcggcggtgagcacattggtcaggtattcgtaaaaggccgcttcgatctctgccttggaggatctcaggctttccgcctttttggtgggatacagcagctggctgcgccggtcgctgggggcatctctgcggatcagaagaccctttgcttccagattttttgtccgccgcgcaatggcagccttatctgcgtgcagcagttccgccagctgcgcctgcgtgcagccggggtgatgccgcactgcatggatcaggtcgatctctgctgtgccgaccccttcctcccgcatcgtgagcaggaccagtttttccgcttcgcgcgcaatctttgtgatttttcgttccgtaatatccataggctcctccgggcttcatcgcaggaagttgtatctacatcgttgtatgtacaatcaatagtatagcatctcgtttccaaaatgcaaacagttctttttgtgcccgtatttttgcaatgctggcaggctccacacccagtgcatgggccgctcctgtacagaccagccatgtgctgcggcattgcccgcttttggcatctgccgcagtcctttcccacgttgaggccgatataagcccatttccacatcatgtcaacaggtttatagcatcaaaacagccctgaccgtgtccgctgtaaaagcaggcagacgatcaggactgtttttccgtatttctttatttcagccggtcagcaggcatccacattcttggtgaccatcacgtcactgtccagcccgcagacgttgtgcagcacgatggtgcctgccttgacgggggcggtcagcaccaccttgcggatctcgtccatcaccggaaagatcatatccttggggatggccttggtcaggcgcacgctggtgacaggcagctcgccgcccttaaccagcactgagctggcgatggtgcggcggggcgcagtcagctcctgacggacatactgttcgccgcgagggcaggtgtgaccggtgaccgagatcacctgaccattttcaacttcggcttcgatctcgcagccgttggggcagacgatacaggtaaattgctttttcattccaccgacacctccagtgcgcccgtttcctgcagcttggcagcagagaccttgaactggatcatctccgcaggaatggctttcttcatcttcttggcagcaacttccacaccgttctggcgcaccacgatgcggcagtcacggtagtggttccgcacgcgcagcgacaggctaaagtcgttcttgccgctgaccttctgcggaatggtgtggcccacgccctcgccgcacttcacgtccagcgtgcaggggtcgatgcccttgccctcaacgtaggcggcagcgtggcgtgccagtgcctcggactccatggaaacaaagtccaccagatcatgcacatgcagcacattgccggcagagaacacgccgggcacgttggtctgcaggttctcgtccaccacagcgccgttggtgtgggggtcaatggcgatgccggcatcctccagcagcttgttctccgggatcaggcccacggagaggatcagcgtatcacacttgtactccttctcggtgccggggatgggccgacggttcgcgtccacctcggagatggtcacgccggtcagacggtcacggccatggatctcggtgacggtgtggctgagatagagcgggatattgtagtcatccagacactgcacgatgttgcgcggcaggccggaggggtaaggcatcagctcgaacactgcctgcacatgagcgccttccagcgtcatgcggcgtgccatgatcatgccgatatcgccggagccgaggatgacgacctccttgccgggcatccggttgtagaggttcatgtaagcctgcgcggtgcctgcggtgaacacgcccgccggacgctcgccgggaatgcccagtgcgccgcggctgcgctccttgcagcccatggcaagcaccacagcctttgcctgatactggcgcaggccgctgcgggtggaagcggtgacgacacgatcctccgtcaggctcagcaccgtggcgctggtctcgtaagggatctcacgcttgttcacttcatcaatgaacgcctgtgcatattccgggccggacaggctctcgccgaagcggcccagaccgaaaccgtcatggatgcactggcgcaggatgccgcccagcatcgcctcgcgctccagaatgatcatgttgcggatgccctgcttgtgcagctccaccgctgcggcaagacctgcggggccgccgccgataatcacaacgtctttctgttccatcgctcagttctcctccttccgcatggttccggtcaggacccatgacccctgacggctgtaacgcacattctccggctcagtgcccagctcctgctcaatgaagtgttcgatcttcatctggcagaagccgccctgacagccgcccatcatggcgcgggtgcggtacttgatgccggtcatggtggaaacgcccagcgggttgtggatagcctgcaggatctcggccttggtcacttcctcacagctgcagatcatctcgccgtaatcggggtcctgcgcgatgagctctgcctgctgttccggcgtgcactcggcaaacttgacgatgcccttgtggtgcgggtcaaagtctgggtttacctcaaacttttcgcgctcctgcatcaggccgatgacgtagcgggccagcggcacgctgccggtcaggcccggggattcaatgcccacgaggttgacggcattgggtgccacgtcgtcccggatctccaccttccagtcctgaatggcaccgttttcatccacccacttgggctggatgccggcgaaggtgcggatctgatcctttttgaagatgtggggccacagctttgcgccctccacggccagactgtccatgttggcctgcggcacgctgtaatcgtccagcacatcggtgttctcggcatccgggcccacggtgacgttgccgtccacggtgggggtgatgtggatgcccatataggtgttgctgggcaccgggtacaccggcatgggcagcagcttgcccatgcgcttgtggaggatgatgtagttgctgcgggagccgatgacacggtagccggtcagacccagcaggtcggagatctgctttgcgcccaagcctgcggcgttgaccacccagcgggtgcagacatcgccgtgctcggtgtgcagatagtacagctcgttttcgcgggtgatggccgtgaccttgtggtcaaagaagaagtccacgctgttggcgtgtgcgttctcggccagagccaccgtgtacaggaacgggtccatgatgccgctgtttttggaccacatggcaaacttgcccaccacggctggcaccagctcgtgcagctttgcttcatcgatcatctcaaggccggtgcagccgttgacagcgccctgcttcatggtgcgctccagctgctccatgtcctcgggggtgttgcccaccagcaccttgccgcaacgcttgaacgggaagttcagctcttcggccagctggcccatgatcttgttgccttctacgcagcacttcgctttcaggctgccaatggggttggcaaagccgccgtgcaccaccgcagagttgcggccgctggtctcgttgcagacatccagatttttttccagcactgcaatgctcaatttgtagcgcgaaagttcgcgtgcaatggcgctgcccacgacacccgcaccgatgatgaccacatcgtattgttttttcatggtatccacctttcttcctgatttggagatccggcttttatgttatatatttcattgactaaaatatataacatttcgtaatctctgtcaagccgtttccggcaaaaaactgcacaaaaaaatgccgcatcttttggcatagatacggcatttctgaacgtgatacggttgtttcaggctttgaaatagtgtgggaatgcttcccggatcgcagaaaggttctccgtgtagcgctgcatatgctgcccggcaatgcggtgtgctgccgccgcatccttctgttcaatggctttcagcaggctgacgtgatcttcgtagatcgtttttgcgggcctgcagcggaagctgaggatggtggtgcggtcaaaatgcggagccagattttccaccagatcgtaccagtacgggcagccgcactgcacataaagcagccggtggaaccccttgtccagctcaaagatcttttcttcctgtgcacgctcaatgtacatgcgccagagcgccacgttctcccacagctggtcgatatccgccggggtcagcttttcgcacgccatgcgggcgatctctgcttccagcacagcgcgcagatggcgcacttcttccaccagctctgcatcgatgagagaaacataggtgccgatcttgggccggatctcaatgagccgccgctgcgccagctccagctctgcttcccggaagggggtgcggctcacccccagctgttcgcacaattccggctcgttcagtttttcacccggctccagacgggtattgataatattatcgatcaatacccgcagaacaaaactttttgcagattcatgctctctgcgctctgaaatcgtaatcatcggaaggctcctttccctcacagggaaacactgttctcagactgctgggtcaagtataccacactgcacaccggcgtaaaagaggacaatatataaaaggaagaaaactgtgtcagaattgtaaaagataaaatattttaactattattcttgacttatccaacgattcggctataatggtcgtgttcgcaagaaacttcaaaaaatttagatattcaaaacaaatcaaaggagactactaccatgacgtttgaagaaatgaagaagatcgttgttgataccctgaactgcgacgaggacaaggtgaccatggaggccagcctgaccgaggatctggaggccgacagtctggatgccgtggagctgaacatggctctggaagatgcctgcggcgtgtccatcccggacgaagagctggcaaagctcaagaccgtgggcgatatctacaactacatcaccgcacatatctgaggcaaaaagcaatgaacgatatccgagatcttttccccggccgaatgcgggagcgcaccttccagctgaaggccaagcgggatgccggtgccgtctggcacgagcagcagtttgtggagtgcaagcagtgcggccgccgcgccgcacgcaccctgtgggcaagaagcctttacgtctgcccaaactgcggctaccacatgccccttggcgggtactaccggctcagtctggtgctggaccacggcagcttccgggaactggatgccgaccttgctccgcaggatgtgctgcattttccgggctaccctgaaaagcttgccgccgcccagaacaagaccggcctgcgcgaagccgctgtaacggccaccggccgcatcggcggggtggcctgcgtggctgccgtgctggacagccgctttttcatgggcagcatgagcactgccgtgggcgacaagatcacccgcgccatcgagtacgccgccgcaaagcacctgccgctggttattttttcagccagcggcggcgcgcggatgcaggagggcattttcagcctgatgcagatggcaaagaccagtgccgccatccagcgcttttcggcaaagggcgggttgtacatcagtgtgctcacccaccccaccaccggcggtgtgacggccagctttgcaagccttggcgacatcatgctggcagagcctggcgcgctgatcggctttgcaggtccgcgggttattgagcagaccattggcgaaaagctgcctgccggattccagcgcagcgagttccagatggagcacggctttgtggatcaggtggtgccccgcagccagctgcgggataccctgatccaggtcttgcagctccatgcaggaggaaaacacgaatgatcaaggaaattttagagcagctggctccgctggatgcccagatcgccgcgctgaaaggcagcggcaacgagatggatgccatcacggcccatgcctccgagctggcagagctggctgtggaagaggacgagatcctgcgcacctgcggcccgctgaccgccgaggatcgggtgtttctggcccggcacccggagcgcccccacattgatgagaccgtttctgccctgttcaccgacttctttgagcagcgcggcgaccgtcagtgcaaggaagaccctgccattctgggcggcatcgcccgttttcacggattgccggtgacggtcatcggccaccgcaagggcagcacactggaagaaaatctggcctgtaactttggtatgccggggccggagggctaccgcaaggccctgcgcctgatgaagcaggccgaaaagtttggccggcccatcatcaccttcattgacacgccgggcgcttaccccggcaaggatgccgaggagcgcggtcagggcgaagccattgcacgcaacctgatggaaatgagcggactgaccgtgccggtcattgccgttgtcaccggcgaaggctcttccggcggtgcgctggcactgggtgtggcaaaccacatcctcatgctggaaaatgccgtttactcggtgctcagccccgagggctttgccagcattctgtggaaggatgcttcccgcagcggcgaagcctgcgagatgatgaagctgaccgcgcaggatctgtacagcgatggcatcgtggagcaggtgatcccggaaccgttgggcggcgcacagcgcagccacgcagccttgtttgaacagttggatgttgctttgcgggtgcacctgaaagagctgtgccgcatgagcggccgccagctgaccgaccagcgctataaaaaataccgccagatcggagaaacgaggaacgcatgagtggtttacagctgattgccaccggcggggccatccccggctggacggtcaccaacgaagatctgagccgcatggtggataccagtgacgagtggatcaccagccgcaccggcatccgcacccggcactggtgcacggaggatgaatctgccgccacgttggccatttccgccgcaaagcaggctttggcccgcagcggccttgcccctgcgcagatcgggtgctgcatctgtgccaccctgtccgccccagacgcgacccccagtgtagcctgtcaggtgcaggcggcgctgggccttcccgaggaccggcctgcgctggatgtcaacgcggcctgttccggcttcctctacggcatagccgtggcgcggggactgctgacaactttgggtggacagtatgccctcgtcattgggtgcgaagccctttcccgcctgatggaccccgccgaccgctccacctgtgtactgtttggggatggagccggtgctgccatttttcagctgtcggacactccctttgctctgacgctgggcgcgcgcggcagcgatgttctccatgcgggcgggccgaaccgcacaggttctgcgcccatcaccatggacggcaaggccgtattccgctttgcagtggatgccctgcccaagtgcctgcacactgtgctggatgaaacacagctgaccctcgatgatcttgagtgggtggtctgccatcaggccaacagccgcatcatcgaccactgcgtgcgggcgctgaaggccgacccggcaaagttctacaagaacatggaccgccacggcaacaccagcgccgccagcatcccggtagccctgaacgagcttgccgagaacgggcagctgcagccgggccagcttctggcctgcatcggctttggcggcggcctgacatggggcggcgcaatttttcaatacaaagagtaaaaatcatgttcggcaaacgggctcgccctcttagtcaccttcggtgacagctcccctaaagtgggagcctttggcaaaaccgaaaagtttaccgtactgccaagggctctccctttgaggaaagacttcccccgcgccgggggaagatgtcgcgaagcgacaaaagggggaatctgttgagcagagcgagactgagagggcgaggacgcttaccgataggataaaactatgaaacttttaaatgaaattctaggcacaaaataccccatcattcagggcggtatggccaacattgccaccggcgagtttgccgccgcctgctccaacgcgggtgcgctgggcatcattggtgcgggcggcatgaacgccgacaccctgcgccagaacatccgccgctgcaaagagctgaccgacaagccttttggcgtgaacatcatgctcatgcatccgcaggcagatgagtttgccaagatcgtggtggaagagggcgtgcccgttgtgaccaccggtgcaggcaacccgggcaaatatatccccgcgtggaaagcagcaggcatcaaggtgatcccggttgtcgccgccgccgtgctggcaaagcatctggagccgctgggcatcgatgctgtcattgctgagggcaccgagagcggcggccatgtgggcgaaatggctaccatggcgctggtgccgcaggtggtggatgccgtaaatgtacccgtcattgcagctggcggcatcgccgatggccgccagctggcagcagctctggctctgggcgcctgcggcgtgcaggtaggcacctgcctgctggtgagcgaagagtgtcccatccatgaaaactacaaagccgccctgctcaaggccaaggacagcgataccatcgtgaccggccgaagcgtgggtgcgccggtgcgagtgctgaaaaaccgcatgagccgcgaatatgtccggcaggaaaacgccggtgccgacaagatggagctggaaaagtacacccttggcagcctgcgccgcgccgtgtttgagggcgacaccaccaccggaagcctgatggccggtcaggtggcaggcatgctgcacgaggtgcgcccggtggcagatattcttgcagacctgtggaacggcgggaggcagcgcattgccgcgctgagcaccgaatgctgaccctcggcagaaagaccctgtctgtgcccatcctacagggcggcatgggtgtgggcgtttccctcggcgggctggccggtgctgttgcagcctgcggcggcatggggtgcatctccaccgccgatgcaggctaccgggagccggactttgcccgcgacccggcaagcgccaaccaccgtgcactgaccgccgagatccggaaggcaaagcagatcgcaaagggcgcgggcatggtagccatcaacgccatggtggcaacgcaggattatgcggccgcgatccgcaccgctgtggaagcgggcgtagacgcggtggtgtccggcgcgggcctgccgttggagctgcccggcatcgtgggcacaacggatgttgccatcgcgcccatcgtttccagcggaagagccgcaaaactcatcctgcgccgctgggccaaggagtttggccgcaccgctgattttgtggtgatcgaaggctgcaaggcaggcggacacctcggctttgccgaagatgacctgctggcaggcaaatgccagaccctcgacgacatcctgcccgaggtgctggccgaggtaaagccctttgaagcacagtttggccacagcatccccgtgtttgtggcaggcggcgtgtacaccggtgccgatatggcccactttaccgcaatgggcgctgcgggcgtacagcttgccacccgctttatcactacctacgagtgtgacgcatcccagggctacaaggacgttctgctgaacgcccggcccgaggatgtacggatcatccacagcccggtgggaatgccgggccgtgcactgaacaccccgctggtgcaggcgctggcagaagggacccgcttccctccccggcactgtgcccgctgcctgaagacctgcgaccccgccaaggtgccctactgcatcacccacgcgctcatcgaagccgtaaagggcaatgtggaggaaggcctgttcttctgcggggccaacgtgggcaggctggaccggatgcgcacggtacaggagctgatggatgaacttgtgaccgaatggaggcaaaatcaatgaagcttgccgttttatatgccggtcagggggcacagcaccccggcatgggcaaagaattttacgaaggctctcccgcgttccgggcggcatttgacagtgcagagctggacttcgatctgcaccgcgtctgctttgaggacccggacggccttttgaatcagaccgaatacacccagccctgcatggtggcctttgcctgcggcgtgaccgcagtgctggcccagcagggcgtgaaacccgcttatgtggccgggctttcgctgggcgaatactccgcgctggaagctgccggggtgttcaccgcaaagcaggctatcgagctggccgcttaccgcggcaaagccatggccgaagctgcaaagggcatcgactgcggcatgaccgccgtgctgaaccttgaccggcaggcacttgcagcctgctgtgagcaggctgcacagctcggctgtgtgcagatctgcaactacaactgcccgggtcagctggtcatcggcggcgagaaagccgctgtggacaaagccgccgcactggccaaagaagccggtgcccgccgctgcatcccgctcaaggtgagcggcccgttccacacccgtctcatggcccccgccggggatgcactggcaaagcgttttgcgtctgagccctttggcgagatgcaggtgccggtgctgttcaactgccttggccgtgaaaaagctgagcaggacagcatccccgccctgctcgtgaagcaggtgcagagcagcgtttacatggaagatacgctccaccgcctcggtgagctgggcgtagaccatattctggaagtcggcccgggcagtgctctggctggctttgtgaaaaagaccctgcccggcgtggtctgcgcttcggtggagaccccggagcagctgaacgccgcactgacagcatggaaggaagagctatgagcgaagaaacgatcatccgcaccgccgttgttactggcggaagccggggcattggccgggctgtgtgcatccagctggcaaagcagggctgcaatgtcgtggtgaattactgccacggcgaagctgcagctgccgagacggtggctctgtgcaaggccgaaaacgcaaatgccgtggctgtgcaggccgatgtttccactgccgagggctgcaaagcgctctttgaacaggcggtgaacgcctttggccgggtggatatccttgtgaacaacgcgggcattacccgcgataatctgatcctgcgcatgagcgaagaggactttgatgcagtgctgaacgcaaacctcaagggcgcgttcctctgctgcaaggaggccgcccgccgcatggtgcgccagcgctggggccgcatcgtgaacctttccagtgtggtggccctgcggggcaacgccggccagaccaattacgccgccagcaaggcgggcctgatcggcctgaccaaaagccttgcccgcgagctggcaagccgcaatgtgaccgtgaatgcggtcgcgccgggctttatcgagaccgacatgaccgccgccctgccggaagccgtccgtgccgaaatggcaaagggcatccccgcaggccgcgcaggaaagccggaggatgtggcaaatgcagtggcattttttgccgcagaacaaagcagctatctcaccgggcaggtgctctgtgcagacggcggcatggcaatgtaaaaggagaaaactctcatggaaaaacgcagagtcgtgatcaccggccttggcaccgtgaacccgctgggcaacaacaccgccgacagctgggccgctgccaaagcaggcaaatgcggcatcggccccattacccagttcgataccaccgattttaaatgtaagctggcaggcgaggtgaagggctttgacccggaaaccatcgtggacaaaaaggaagcccgcaagatggcccgctttaccgttctggcccttgctgccgccgctgaagcggttgcagacagcggtctggacaccgaagcggaagccaaacagatcggcgtcatcctttccagcggcatcggcggtctgcccactattgaggagcagcacacccgcggtgaagaaaagggcatggaaaaggtaagtccctattttgtgcccatgtccattgccaacatggcggcggcacaggtggccatccgctttggcctgaagggcatgtgcacctgcccggtgacggcctgcgccggcggcaccaatgccgtaggcgatgccttccaccgcatccgtgacggctacgagaccgccatggtctgcggcggtgcagagagctgcatcagccctctgggcatcggcggctttaccagcatgaaagcgctttccaccgcgaccgatccggatgcagccagcctgccctttgacgcacggcgcggcggcttcgtgatgggcgaaggcagcggtgtgctggtgctggaagagctggaacatgcccgtgcccgcggtgcgcacatctacgccgaggtggtgggctacggtgccaactgcgatgcctaccacttcaccgcccccgcccccggcggcgcaggtgccatcgactgcatggcgctgacgctggcggatgcaggcatcgcaccggagcaggtggatcacatcaacgcccacggcaccggcacccacatgaacgatgcctgcgagaccgccgccatccatgcggtgttcggcgaacacgcaaagcagctgactgtggtgagcaccaagagcatgaccggccatctgctgggcggtgcgggcggcattgaagccgtatttacagcgctggccctgcatgaccagtttgcgccgcccaccatccactatgagcagcccgatcccgaatgtgatctggactatgtgccgaacactggccgtgcgcaggccatgacctacgcactgagcaacagtctgggctttggcgggcacaacgcctgcatcgccctgcgcagatgggagggctgacccatggcagaaccccgcaccgtgcgtgcagacgcaaacgccctgaacagcgaggagatcgcggcgcttctgccgcaccgctatccctttgcccttgtggaccgcattttggactacgagccgggccagtgggccatcggccgcaagtgcgtgagccgcaatgaggaatttttctgcggacattttcccggccagccggtgatgccgggagtgctcattctggaagcactggcccagaccggtgccgttgcggcgctcagcctgccggagaacaagggcaaactggccctcttcggcggcatcaagaatgcccgcttccgcaagcaggtcacccccggcgatgtgctcaccctgcactgtgaactggtagagcagcacggcccggtgggcgtgggcaaagcctcggcgtgggtggacggcaagtgcgccgccaccgccgagctgacctttgtgctgaccgaccccaacgcctaaaaacacccctgtgagtttaaaaaagctcacaggggtgttttccgttattttaccattgagaagccgcttcgctctctcagccaagcgccacatccagaaccatcagtggtgccccaccagataggccacccggtcgatctgcgccgccgtcatgccggtatccgccagaaattcccgcaccagcggagcactctcctgctcctgatactttccattggtgttactgcaatggtaggatcgcatatttactgatttctgtatctgttcaggacagcatccgggatatggcagtaactgcagtcttcagggtgccgttccagatggtgctgatgctcctcagcgctccggacataatttgtcagcggcagcacttccagcatgatcttgtcccggtcctcccggccgtttataaaagctcttgcttcttccagatgtctgggatctgtactgtacagccctgtccggtacttttttccaacgtccacgccctgtttgttcaggctgtaggggtcgatgatctcaaacaggtgtgccatcagttctgaaatgcttgtgtttttctcatcatagaccacttttacgcattctgcatatccatcgtatgggccatccagagaactcgttgttccgttggctctgccggcttcagtcatctgtacaccaggcactgtgtcaaaaaaatgctgtacgccccaaaggcatccgcctgcgatatagaccgtttccatcttgattttcccctttcctgttgatcatatatcagctttgctcctattctaccacgcttttccactatcggaaagatgtcggaaaacaaaaatggccccggagggcttatcgcagctctccggggccgccttgtgcagagtgattttctctcgatgggcttccagaaatgctttgctgtaatcagcttgcgcgaaccacagcggaaggaccctcataagatacagaaaagatttctgtatttttcttgacagttttcccatattctgttttaatacatctgataaaagggagtaaagggcagtgttccggcttattcttcgggagactgctgcatggcagcgtcatcacggcagaaatgcccgatgtcatgtgttcgcttgagacttttgtcacagacaaggtgctgtggcaggagtctctttttcttgtcaccgtaccggagcacaataggaggcaagaaaactatgaactttctgaacacattcgcaagtctgttttccaattttggaaacctaacttggcagatggtggtgatgtggggcattggtgcattgctcatctaccttgccatcgccaaaaaaatggagccgagcctgcttttacccatgggctttggtgccattctggtcaatctgccgctgtccggtgccatcacgcagggcgataccgtaggccccatttctgccctgtttgaagcaggcatgtccaacgagctgtttcccctgctgcttttcatcggcattggtgctatgatcgactttggccccctgctggaaaaaccgtggctcatgctctttggtgccgcagcgcagtttggtattttcttcaccctgtttctggcaggcttcttctttgatttgaaggatgctgcttccatcgctgtcattggtgcagcggacggtcccaccgccatttttgtagctaacaccctcaactcccagtaccttggtgccatcatggtggcagcgtacagttacatggctctggtgcccatcgtgcagccgccggtcattaaactgctgaccacccagaaggaccgccgcatccggatgccctatgaaaagggcaatgtcagccagctgacgaagattctgttccccattgtggtaaccatcattgccggtatggtagctcctgccagcgtagctctagttggttttctgatgttcggcaacctgctgcgggagtgcggcgtactgaacgctctcagcgaaaccgcgcagaatgtgctggcaaacctcatcaccatcgtgctgggcctgaccgtggccggacagatgaccgctgacaagtttgtccggcccgataccctgctcatccttgcactgggtctggtagccttcgtttttgataccgcaggcggcgtgctgtttgcaaagttgctgaacctgttcctgcccgaaggcaaaaaactgaacccgatgatcggtgcagccggcatctccgccttccccatgagcggccgtgtggtcaacaagatgggattggaagaagataaccagaatttcctgctgatgtactccatcagcgtcaacgtttcggggcagatcgcatccgtcattgcaggcggcctgattctgaccctgatggcttaacggaggtacacttatgcttcatctttcttcgtggatgaccaccctgcccatgatgctcatcggcatggtcggcattcttctcgtcattggtgtcattgtcctggctgtgatgctgctcaaccggctgacaagtcggaaataattcatcccatcaagtagaaacgaatttacggcgaaatatcgctataaatatgatgcacaggccttctagaactgtgattttgtgacaacttggtgtcacttcaataaagaacccgctttcacttcaatttgatgttgaaaacgggttcttttcgcttttatacgtgtttgacggcggtttcaaaaagattgactgctgcgtcctcttgtgtgtcggtgttgtgggtaccacgctttttcactttcgaaaagatgtcagaatacaaaaacccccgaagagctttttacggttctccgggggttggttctatgcgccggtgttcctcacaccgatgcacaaacgttattcgatttcaatgagattgggattcgcaggcagagccttctgctgctgcggtgcgggcagtacgatgtgcaggatgccatcctcgaactttgcgtggatgtcctccttcttcacggcatcacccacatagaagctgcgggcacaggtaccggagaaggtctcacggcgcagataacggccattgttgtccttctcgtcattggagtggttgcggacggcctgaatggtcaggtagccgtcgctcagctccatctgaacgtcttccttcttgcagccgggcaggtcaacagccacatcatagttgccatcggcggtctgcttcacatcggttttcatcatgtttgcgccgcgcttgccgaaggtctcacgctcttcacgattcattgcacgctccagcgcaccgtcgttccagaacggatcaaagaaatcatcgaacagattttcatggaaaacagcaggcataaacataaaacaaccctccaatcccggcgttcgggtcgggcataaaatcaagatcgtgcatcaggagcggagtcttcccgggagccttgcggttccctcatgcccctttctcctgagcacgccactgttatagcaccgtttattagcagtgtcaatagtagagtgctaaaattcataaaagaataatacttttataatatttcatgcaattctcggcaaaatcgtttgcactggattcaattttttcttctctgatcgtagtctttcgctgtgacagaacggatgcaagccgtttcttcagaaccaggcgatccattgcccgcgtaaacaatgcagttatcaaaaagtctctctgtccttgcagcgtcttgcgttctgccggtccacccgctataataatgtggaaaccgagatgaaaagagcgtgatattgtggaagagaccgagatcagtcattttctccacattctggtccgaatgggcgaagctttacaaaacagtggcgcagaagtattccgcgttgaggacactttgaaccggatcgcaatcgcctatggggcagaagatgtgaatgtattcgtgatcacatccagcatcgtggtcacgcttaccatgccctcgctgccgccgcagaccgagacccgccgcctgcgtcacgctgccagcaatgacctgctgacattggaaaagctcaatgcgctcagccgccgtatctgcacagcacctccttccatagaagagtttcagcgccagctgaatgccattctggcacagcatccggacccaagactgcatcttgccggcagtgtgttggctgcttccagttttgccatcttctttggtggaaatctctgggacggcctgctggccggcggcattgccgttctgatttgctggatggagcgctatctctcgcctttttgtatgaatggcgtagaatttcagtttatagcatcatttctcagcggtgtctccactctgctgctctgccgctttgggatgcagtttcatgccgataaagttctgattggtatcatcatgctgctgattcccggcatcatgctgacaaattccatccgggacatcttacttggggacattatttccggctctcttcggctggtggaagccattctgatggccgccacccttgcactcggcatgatggccgccatctggttgatgggaggaatttccgcatgatacaggttttttcgcagttgctcagtgctgcccttggttcggtcggtttcggactgatcttcaatctgaaccggcgctacttacccgccgccggtgtaggcggactactggcatggctggcttatcttcttgccgccaacaccttgcacagcgtctttcttgccaatctgttggccggtttctgtgccgctctgtatgccgaaattcttgcccgatgctgcaatgcaccctctacgcctttcttcatcaccgctgccattcccctcattcccggaagcaccctctactactgcatgaacgcagtcgtctccaatgatttgtctgctgcagagcatttcggagagcagacctttctggccgctcttggaattgccggcggtatggcaatcgcatggtgtctggccgatttgagccggaagctgcacgcacttgcaatccgttcttcgggaaagtagcgatcttccacattgaagaatgcccctgatgatcgggtcgtttgagctgctgctctgaaatacggaaaaaggccgtccggcaccgcagcagggctgcctttacaattacaaggatgtgtctctatgaaactactcaaacaattcattcagcaggaaacggtcctcaccgcagccgctgtgctggccgttgtctccgccttctttgttctgccggatgcgcagtatctcggctacatcga

SEQ ID NO: 1130 - DNA, 24174 bp, Unknown
  gut microbiota DNA sequence
aggggtcgtaacggcaaacggcatatgctttgcaaaccggtctgcggcttaaaagccccactggggctttcatgccctgtgggcaccgccgtcctttctggttctcttttggcacacaaaagagaacgtacccggcggcgatgcttcttgcaaaaaggcaaaaagcctgccccacacgactacattctgcccgggaagcggttacgccagttcctttgcagccacgtccagagctacctcaatgaccttgtccatgtcatagtacttatactcgcccagacggccgccaaagatcacgtccggctctgcatcggccagcttcttgtactcggcatacagggcaccgtttttctcgtcattgacggggtagtacggctcgtcgccctttttccattcagcactgtactcgcggctgatgaccgttttgggctgggtgccgaactcaaagtgcttgtgctcgatgatgcgggtgtagggagtttccgcatcggtatagttgaccaccgcgttgccctgatagttgtcggtgtccagcacctcggtctcaaagcggacgctgcggtactgcagagcacccagcttgtagccaaagtaggcatccaccgggccggtgtagaccaccttctcggccagagcgttcagattttcgcggtcggccagatagtccacattcaggcgcacctcggtgccgtccagcatcttttccaccatggcggtgtagccgccattgggaatgccctgatacagtgcgttgaagtagttgtcgtcgtaggtgaagcgcaccggcagacgcttgatgataaaggctggcagctccgtgcagggacggccccactgcttgccggtgtagcccttgatgagcttttcgtagatatcggtgcccacaaggctgatggcctgctcttccagattctgcgggtcggtgatgcctgcttccttcttctgctcttcgatcttggccttggcttcggcaggggtaacaacgccccacatcttattaaaggtgttcatattgaagggcaggttgtagatctcgccgtggtagtttgccaccgggctgttggtgtagcggttgaactctgcaaactggttcacatactgccacacagccttgttgttggtatggaagatatgtgcaccgtagcggtggacgttgattccctccaccggctccgtgtagatgttgcctgcaatgtggctgcgcttatcgatcacaaggcacttcttgcctgccttttttgcttcctgtgcaaagaccgcgccgtaaaggccggcaccaacgatcaggtaatcgtactgtttcatgggtgtgatcctctctgttccgtttattttccttctacatcgccctttttctgcgatgcatagtatttgtcgatggcaccttcgatgcgggcacgggctgcttccggcgtgatatgcttgagctgtgctgctgccatggtctggtggccgccgccgcccaaagattccatgatcacctgcacgttcacggcacccagactgcgggccgagatgttcacgcctgtgcccacctgcactgccacaaagctggcatccacgccctgaatggtcagcagatcgtttgccgcctgtgcaatggccacgcgggcttccggtgccacctcgccgctgacggagatcgcgcaatttttgtacatgcgtgctttttccaccagatcagccttggcattgtactccaccatggtcacatcgaacagctggcgcacccgctccgtctccgcgccatagcggcgcagcgcagcggcagcttcaaaggtacgcacaccggtgtgcagggtaaaatcgcgggtatccagcatgatgccggacaaaaggccctcggcctccacacggttgggcttgtcgtcgcgctcgcccacgtactgcaaaagctccgtgaccagctcactggccgaggaagaatacggctcatggcagaccagcgccgggttctcgatgtagcccacgcccttgcggtggtggtcgatcacggctaccttgccgcatttttccagaatatccttgctttccacaaggcccacctgatatgtatccaccacgatgcacaaggtgcgcttggagatgatgggcagtgcgtccttcgggtcgataaagtcgtccttctggcctgcacggcacaatgcatcgatcaggctgcccgcaagggtagcgtcacgccgcaccgcgatcaccgccgggacatcgcatattttgcagatgcgcagcacgccctcggcggagccgatggcatccagatcgctcatgcggtggcccataatgactacatgatctgcttccttgatcagcttcaccagctgatcggccacgatgcggctgcgcaccttgctgcgcttttccacgccgtggctcacgccgccgtagaacgtaaagccgtccggtgtcatttcagcggcctgatcgccgccgcggccctgcgccatatccagcgcctgcacggccatatcctgggcttcccgcagggtcttggccccgcggccaatgccgatggacagcgaaaggttcacgctgggatccagcgcacggatcttgtccagcacatcgtagccgcggtttgcgaactgctccatctggcgctcttccaccacagcgatatagcggccgctggccacacggcgcaaaaagccgctgccccggccgatcatatcctccagcgtgcggttgatgccttccagcaggcgggcacgctcgctgtccagcatgtcaccgaacacatcgtcgtagccgtccaccagaaataccagatagcccggacggctggctttgtattccgcctccaccttgcgcagggcggtctcctcgttcagtaccagaagggtcatgctctccgcatcgccgggcaccgtggagctgtgtacgctccacatgccgtccgcgagagtcagcagctggccctcctgcttgcggcactgctgcagatcaaggccgggcagcaccttctgcacacggctcaccagcgcatcctgcccgttcaacaggcgggtgcggaactgtgcattgtaccacagcaccgtctcaccggaaagcagcgcggccggctgagagagcggctccagactgaactgcagcttggagccttcaaagctgccaccgcacatccaccgggccacccacttgcgcagctggcagcggaacagcaccaccacaacgccccacagcaccaccagtgccagcagcgccggccatgccgtgggccgctggatcagcagcaccagcaccagcaggccgcacagcacggccagactggcggtgagcatctccaatgtccatcttggtttttgtttcatcaaatctcctgccttccgccgcattgtttgcggcagcgtgcccggatcagacctccatcaggatgggaaggatcatcgggctgcgcttggtgcgccgatagatatagctgctcagtgcctcgcgcacgcgggtcttgacgctgttccagtcgcgcacatgttcatccacgcagcggtccagcgcattttccacgatgctctgtgcaccgtccatcaggctctcattctcgcgcacatacacaaagccgcggctcacaaggtccgggccggccagcaccttgccggtcttgctgtccacggtggccacaatgatcaccagaccgtcctcggacaggtgcttgcggtcgcgcaggaccacatttcccacatcgcccacgcccagaccgtccaccatgacggcaccggcagtcaccggctcgcccagcttcatctcatcctgactgaggacgacattggagccattctccgcaatgaggatgttgctggtggggatgccgaggcttgcagcggtgagggcgtgctttttgagctgcttgtactcgccgtgcaccggcaggaaatacttgggcttcgtcagggtgagcatgagtttctgctcttcctgacaggcgtggccggaaacatgcacatcgtacatgctctcgtaaatgacctctgcacccagcagcagcagaccattgacgatcttggtcacgctcttctcgttgccgggaatgggatttgccgaaatgataatgaagtcgccggggcccacgcgcacctgacggtggctgcaggatgccatacgggaaagggcactcaagggttcgccctggctgccggtggtaatgagcactacctgctccggaggatactggttcagctcatccacgctgatgagggtgccctccgggatgtgcatatagcccagctcctgcgccatagcggtgttgttcaccatactgcggccgctgaatgccaccttgcggccatcctccacagccagatcgatgatctgctgcacgcggtagatgttggaagcaaaggtggcaatgatgatccgcttgttgcgggcacgggcgaacagattgcgcacgcctgcagccaccttctgctcggtggcggtaaagcccggacgctcggagttggtggaatcgctcagcagggccagcacgccgcgctgaccgtactcggccagtgtggacaggtcggtgacgccgcaggccagcggagtgtaatcgatcttgaagtcgccggtctggatgatggtgccagccgggctgtcgatggcaaaggccaccgcatccgggatggagtggttcacatggatgggctcaatggtaaagcagcccagcctgatcttctgtctgggggtgatctccacgaacttggtcctgcctgccagaccgaactcctccagcttgttgcggatcaggccgcaggtcaggcgggtgccatagatgggcaggtcaagtttctgcagcagatacgggatgctgccgatgtggtcttcgtggccgtgggtgatgagcaggcccttgatcttatccttgttctgcaccacaaaggtgaagtccgggatgaccatatccacgccgtacatgtcgctgtccgggaacacaaggccgcagtccacgatgatcatgtcgccgttgcactcgtacacggtcatgttcttgcccacttcgcccagaccacccagcgggtagatgtggatgggcaccgcagcctctctgggctgctgcgggcggcggggccgacggttataataagggcggcgggtggtgcgggggcgcttttcgcccgtctgcgcggcgggtgcgccggtgctctgagcagcagctgctgccttgctgcatgcggaattattggtattttctttcgactgtgccattctgacctccaaaataattacagcgcaggccgtccccgcttgtggaaacagccgcgctgtgcatgggaagcaccttgaaaaatcgcatcggcttccgttggatgcaccgtatagaatttatttctcagcgtgttttttgcaaaccgctgcctgttccgtaagaggttttgtgccagataggtccatctgctcgatgcgaccgtggcttttctgttggaacgcccgggcacacgcctgcggtgcgcccctatacgcattttgttaggataagtatagtatttcccggcgtttttgtcaattccaaggtttggcagctccggcacggaatatacattcgcacttgacagaagccggaaaatagcgctaaatagaagcaactcattttataaggagaaccgcatgaagcaggtcgaagtgtacaccgacggcgcatgcagcggcaatcccggcccgggcggctggggtgccgtgctgcgctaccgttttaacggcaaagtttacgaaaaagagctgagcggcggcgacgacagcaccaccaacaaccgcatggagctgacagcctttatcgaagcactgcgccagctcaaggagccgtgtgaggtacggctgtgctccgacagccagtatgtcatcaacgggcttcagaagggctgggccaaaaactggcagcgccggggctggaaaaaagcagatggctcccctgccctgaacccggacctctgggcacaggcactggagcaggaagcccggcacaagatcacctacgtctgggtcaagggccacgcaggccacccggagaacgaacgctgcgaccagctggccgtggcccaaagcaaagcacatggcgggaggcagggaacatgagcgacacatttttgcccggcagtgggttcgacacctacgagagtcaagataaggttctggtgcagatggacggcagcagagaatgcgccgtagctgtgcgcattttacagcagcagggctttgccgtggcgggcgctgccgtgcggctggcagcagaacagaccgccgatgcggaaagcgccaaaaaggcagcagaggcccttggcatcgagtgcatcgtgctgaacgccgaagcactggccgggcaggacgcagacgttctgggcgaaggcggcacgccgctgtttgccgccctgctgacggctgcagacaagcttgggatgcaatatgtggcaaccactcaccgtgcccgggtggagaccggtgcagacggcgtgcacaccgtctgcccgcccgcaggcaccggcagtgatgacagcacgattcttgcagctctgccgcaggaaacgctggcacggctgatcttgccgctgggcgattttgccccggaagatgtggcggagatggccgaggattttaaagtttaaccgtacgtttcaaatggcctccgttgcactctggccatattcagcggaaacattatttttatattagaattccggaaaatccgcagattttccggaattctttttttcacaggcaaggccgctgcggcacacggcatttgctgtttttgcttcctgcggaaacagccgcacggcggcagaaatgcattctgcggttcggaccccattcccgtgaaaatgaaaatcgggaacatccgcagatgttcccgattttcacattatcaatataatttccgctgaatatggcacagcacacgcggagccattccaaatcgttttgtcagttctggggatgcacgatatcgcgccaatccagatcgccgcgctccaagccgtggatcagtacctcggcagtggcaatgttggtggccatggggatgttgtgcacatcgcacaggcgcagcagtgtcatttcgttgggttcgctgggctttgcgttgatgggatcacggaagaacagcaacaggtcgatctcattgcaggcgatgcgggatgcgatctgctggtcgccgccctgcacaccggccagaaagcgctgcacctgtaagccggtagcttctgcgatcagtttaccggtggtgccggtcgctaccagtttatgctggctcaggatgcggcagtacgccgtacaaaactgaaccatcagctcctttttggagtcatgcgcaatgagtgcaatcgtcatccgttaccctctcctcttcctaaacgattggaacgcttttgtaaaaaagtcctttacttgaaatgatatcacaaaatccaatcttttacaactgttttttatacagaatattcaattttgttttcttttcagggatgtttccattcaaaaccccgctgcagtgccctttcccgtgtcggttttgtctcccgttttcagttctccggcgcaatggcatcggggttctgctcggtgtctgcggcgggctgctgctcgtcctgcacggcaggctgggcttccccttctgctgccgtttccggcgcagcggtgtctgcggcgggtgtcatctgtgcaggctgggctgcggcattgccggtggtctggcctgcagcggcctgtgctgggtcagtggtctgcgcctgatcttcctgctgggcctgctcggcttccttttccgcttcggcctgctgggcaaggctgccatccttcagggcaaaataggcatttgcaatgtccaccaccagatcaccggtacgggcaccatagcctccgtactcaatgctaatgccaatggcgatctgcggattatccgccgggaggtaagccaccatcatggcgttcagatagtgcttaccgggcgcataggtctcactgcgctgaggtgtaccggtcttgcaggcgatcggcaccggatagctggaaattttgccgctgatggtgctgggcacctgcttcatgccctgccgcaccagctcaaaggtgttgccagtgccttcgatcacatccatgacctcgggcttggtctcgctgagcacctcgccggtgttggtgtccagaatggccttgacgaaatgggtgcggtaacgggtgccgttgttggccagagttgccgcgtaggtagccagctggatgggcgagaccaccgtgttgccctgaccgatggcggcctgcacatccagcgatgccgtatagttggagtcgctcttggtggtcagacggcccacggcctcgctcacctccacaccggtgcgctggccaagacccagcttgtaggcataggcatcgtacacatcgctggtcaggcggcggccaacatcatagaagaagatgttgcagctccacttgatggctgtgaccacatcgatgttgccgctgtggccatggcgggtacagcgggggtggtaatccttgaagtagttgtacacgccgttgcagtaaacggtagaatactggttgatgaggccgctgtccagtgcagccaccgccacggcgggcttgaaggtagaacccggcgtatacaggccctgcaatgcgcggttgaacagcggcaggctcgggtcggagctgtactcgctgtagttagcggcatacaggttctggtcatagctgggatagttggaagcagccagcacactgccgtccttcacgtccagcaccaccaccgcaccggcggcagctttcatggtgccggtattgtacacgcggttgatcatatcaatgttgtccgccagtgccttgtccacggcacgctggaagttgctgtcaatggtcagctgcacggtatggcccggctccggcacagtggtgagctttgtatccacgatcacgccgtccgaattgcgggtgatggtctccacgccgtccttgccgcgcagctcgtcctcataaacggattccaggccggaaatgcccagaacatcgttcatgttatagcctttttcccgcagcggataggtcacctgaccgttggaatcggtcaccttccacttttccgccgtgatcttgcccacacggcccagcaccgccgggatgatatcgctctggtcgtagctgcgggcgctggtttccacgatctccacacctggcagctgcaggctgtgctccttgatggtggccaccgcgagggtgctcacgttctccgccatgacaaaattgttcacattggagaacgcctgccggtccatctcgtagtggatgccggccagcacacgctgccattccggcgaaaaatcctgcagatcgttcttttccaccagcatttccattacatcgttggcggtggcgtactgctgcagaccaagcgtttccttcatgtctgccagctgcttctggtcgctggtggacgtgtcatcgtccgtaaaggcgtaattgcctgctgcgtccgcctgaccgatcagcagcgtatcattccagctctcgccattcgcacgcagcagctccacgatctgctgcagcatggtgtccagatcccggtcgcccatcagcagtttgttgaggaccacattgtagctggtggttgtggtagcaatgcgccgcccggcgctgtccacgatatcgccgcgggccgccgtgaccgtaaagttatagtcggtggtgttggtggccttggccttgaagtcgtcgccgttgaccagctgcagaaagatcagccgcatcacgtacaggcccatgataacacatgccactgcaatgagcaggatcatccggcgcgcaacggtttttcgttcgttttggttcatccgcgtttcctccggcggttcagactacgccgttgtcgattttgaatgcgctgtaaatgtgccgcaccagactgaacagcatcagcgacggcaccagcgtcatcatggccgaaggcagcacaaaggtcagccagcggctcagcgcccagctgtagccgggcatgtagtagaagaacagccagtccagcgagagcaccacaagggccgtgccggtgctgatgagcgcaaagttccatgtgctgccctgcagatacacctgaaccagcaccgaaagcgcaaagcagagcaacagcagttccagcgccagcatacccacggtgcgcccggcggtgtagtcccacaaaaggccgctcacggcaccaaacagcgcacctgcaaactcgccttcatacacggccacagccagacacagcggcagaatgaacagcggctttgcctgccccagctggagcaggccgggggtcgtctgcagtgccgcgcacacaaacagtgccactgcgtagcagacccatttcaggatctggctgcggctgcgcatgcggcgtgattccatacaaatgcgcccccttaatagtcggtaataacgaatacgtgcttgaccgtgcgcgggtctgcacccgggcgcaccactgcaatggaagatttgccactgacttccggctccaccttctgcacagttcccaccagcagatccggcgggaacactcctccaagaccggtggtgatcacctgatcgcccatcttcgtctcagtggcgcgttccagattggtcagcacgcacaggccgtcaccggcataatcggtgctgccattgataatgccgttttcccgcgtgcgggataccacgcccgcagcgctgaagctggggtgcagaatggtcatcaccttgcagctggtggtgtcggcttccaccaccatgccgatcagatagcccttatcgctgatcacggcatcgttcacggctgcgccgttcaccgtgccgcagtccagcgtaaagcctccgaactcatccagcgggtcgcgaccgatcacaaaggcagaaatatagcttgcttcggtgttggaatcctgaatgcgggccagcgccttgtaggcttcgttttccgccttgatgcggtcatagtccacgatctgctggcgcagctcagcattctccgcttccagctgttcgttctgttccatgacctcatcgatgctggtgtatttttcccacaccgagccaatgccgccgctcagtgccgatgtgaccttctggagcggcatcagcaccacgcccagcagttcctgcggggcagcagtcagccgtccgttggcaccggcataggccataatgcccaccagaaacaccgccacggctaccagtatcttaaatttccatgtgtcaaaaaaatccttcaagggagtaccctcctgtttcgggtggatgccatgccataagaaaagcgcggacagccctgccatccgcgcaagagacattgtttgcagcggaaatcagcgcagacgctgcgcaaaagagcctttttccgcaagtgtgggccttgcccgtgttacatgtggccgccgtcggtgtccagcacgtcatgcaggacatccacatgatccagcaccgcaccggcacccttagccacgcagtccagcgggtcttccgcaatgtgtacgtcgatgccggtctcgctttggatcagctgatccagaccgcgcagcagtgcgccgccgccggtcagggtgatgccgcggtcgatgatatccgcactcagctccggcggggtgcgctccagcgtttccttgatggcgctggtgatcttgaccagacattccagcagagcttcgcgcacatcctccgagtggacgacgatgttcttgggcaggccgtccacgaggttacggcccttgatctccatggtcatttcggggtccagcgcataggcggagccgatctcgatcttgatctgctctgcggtgcgctcaccgatcagcaggttgtacttgcgcttgatgaaggcgatgatggcctgatcgaacatatcacctgccatgcgcacgctgcgggaggccacgatgccgcccagagagatcacagcgatctcagccgtgccgccgccgatatccacgatcatgctgccggtaggctcgctgatgggcaggcccgcaccgatggctgctgccatgggttcctcaatgacggacacctgacgggcaccggccttcagggtagcttcgcgcacagcgcggcgctccacctcggtaacgccggacgggatgcagatgaccacgcgggggcgggagaacatgctgttgccgcatgccttcttgaggaaattttccagcatgttggtggtgatgtcaaagtcagcgatcacgccatccttcagcggacgcacagccacgatgctgccgggggtacggccaatgacagcctttgcctcggcacccacacagcgtacctcgtcggtcttggtatccacagccacgaccgaaggctcccgcatgatgatgcccttgcccttcatatataccagagtatttgcggtacccagatcgatacctacatctttagaaaacaggcccattgtaaaaattctccttatgcttcccattttatctatagcgccagaacatccggcagcccttttgtgccgcctttgcgcagaataacacggttctattatagccgcaaggcaatgatttctcaagcgtttgcgcaagttttcttcgttttttccagttttatcacacaaaatgtgccagcagctgtacggtgcggctcaccggcagacccatgatggtgtagtagtcgccctcaatacggtccagccagagggccgccctcccctgaatggcataggcaccggctttatcgtagggttcggcggtggaagcgtagaagtcgatctcctcttcacccagcgggaagaaggtaacgcggcagctgtccacaaagcttttagtgcgcgtaccgtccgagatgcacacgccggtgtgcacctcgtgggtagcaccggaaagggcgcgcagcatccgctttgagtcctcttcgctgtggggcttgccgaacacctcgccattcacatccaccaccgtatcacagccgatgaccacagcgcccgggtgctgggccgaaacagcaaggcacttgccccgggccagctgttccaccagatgggcaggcgtagcggcctgcaccgcactttcgtcaaagtcactgacgcagacggtgaaattggtggtatataaggagagcagctcccgcctgcgcgggctgccggaagctaagatcaggttcatgattccatctcactttccggtagagccaaagccgccctcgccgcgctgggtatcgcccagctcttcggcaggcacaaaggcagcggtgtacaccggtgcgatgcacagctgggccacacgctcaccgggctgaatggtgtaggcttccctgcccagattgaccatgggcaccttcagctcgccgcggtaatcgctgtccaccacacccacgccgttggccatgcacaggccgtgcttgatggaaaggccgctgcgggcgtacaccagtgccacgctgtgggggccgggcagctcgatggcaaggccggtgggcaccagtgcccgctccatgggggcaagggtgagcggcgtgtccagtacggcgcacaggtcggctgcagcagagccgggggttgcgtaagagggcaccttggcacgggtgtccaataccttatattttactgtgatgggttccatagtatacctcgttttgattttatagcaactccttcagtctcgcatacgctcgacagctccctcagggaggtggcattgcgtcagcaatgacggaaggagtttcagttcgtacctttaaaatacaacccacgggtaaaatcaccttcaaagggtgcatgggtgcggatcatctccagaattttggccgcttcctcccggctttccagcgtgaagtaagccacaccgtagtccaccgtcaaagctcccggcttatcccccatataaataggtacagggttatagatggtgcgcacaccaaggccgcaccgcaccgggaacttctttgccttgcggtcggtcagcacaccggtcttatcgcagtgggcgcagtcgtggatgttctgcagcgggcaggcacgggtgaccatcagcggcatatggccgtacaccagcacgccggtgggcaccggcctgccgttatgggtgggcgcaatggtgctgatgtcgctgtccttcacctcgggcaggatgagcatggagccaaggccgttgtccgcgtagaactgcgcggccagctggttcgtgatgttcaggccaaagctgccgctcatgggcaggccccggcacaggcgcaggtgggcgatattgctcacctcatagcctgcaaaaccggcgtcctgcgtggccgcgatgcggcgggcggtatcttcttccagcttgccaaacatgacccggggcagttccaaaagggtctttgcccgccattcccggggcacgcggtcggcctgcgcaatgggcaggatgagatactcgatgccgtcaagcgcccgctccggcacctgctcccagttctcgaaccgggcacgcagggtgcggcgggacggcagggtgcgcagcggcagagcgggcacatgctcgtccgtggtgggccacgggcgcagcacttcccgctttttgagcagggcatccagtgcttcgcggcgcagctcgttcaccgcaccgcccgggataaaccacggcccgccgtccatttccacggtaatatcctgatcttccaccgcaaaaggcgtgccgccggtcttggcaaggctgcggtgcaggctttcggtgggatcagtacgggcaggctgcggctctgcatccccataggcaaaggccttgctgccgtctgcatcggtgacagtgagcttttcgccgccctcttcaatttccagcttcatctttaccggcacgcggctgcgctcacggcggtaaagctcccgcagcatgggcagggtctttttggtctgttctgcatctgcttcactgcgcacgccgaacatggtgccgtcgatctttccatccagatagccggaggtgaagccggaacggctgaaagcattcttcaacaggtcgcggtcgtaggcgcggccctcgcggcctgccagacaggcgctgactgccgccgccacatactccggcgtgcgcagacggccctcgatttttgccgatgccacgccaagcgcctgcagcttgtccagcttatcaatgaccgaattatcctttaaggacaggtggtgcaggcggcccggcttgccctccggcagggcatttgcctcaaacggcaggcggcacgggccggcacaggaacctcggttgccgctgcgtccgcccagaaaggccgacatgtagcactggccgctgacgcacatgcacagcgcgccgtgcacgaagcactcggtctcgatgccgcagtgctttgtgatatgctccacctcgggcatgctcagctcacgggccagcaccacgcgggtgaagcccagctccttgagctccagtgcaccctgcaggctgtgcacgctcatctgggtggagccgtggcgcggcagctgcggtgcaattttaccgatcagcgttgccactgccagatcctgacagatgaccgcatcggcaccgctggctgcaacggcacggatggcctgttccagtgcgggcagctcgccgccatagacggtggtgttcagcgccacatgcacagccacgccccgcgcatggcagaaggcgaccgcatctttcagcgtatccgcgttaaaattgttggcactggtgcgggcattgaaacccgaaaagcccagatacactgcgtcggcaccgctgaacacagcggcacgcagcatttcttcgttgcccaccggggcaaggatctcgatctttgacatacttctcctttatcctgtaaacggcttattccgccttgtccgcttcgccctcggcagcagactgctgtgccgcctgctgggcgcgctcctcgcgccgggcttccttattgcgcatcttttccagctgttcgcgcagggcggcagcttcccgccgcagcacctcattctctgctttgaccttatcttccgccagctttgcgcgggtggcatccgcaatgtaatcctggatctggctgcgcatattctccgcactgccggtgctcttgcggtattcgtccagataatccatggcacagaacaccgccgccttcgtcaccgaaagattcgcattatcgtccaaaagcttggtgatgtcttcatccagctttttcgccagcgacaaaatatatttttccgggtccgtcgtagcaatggcatacggcgtacctgcaatgttcacccgtaccttgttgaccatatctgtttcccctttttatccttttctgcccgcagcgggcagtgatcttctgatttttgccgggaaacggtaccgttcccggtaccgttttggtgtcttgtcacccgccgggcgagttacccggcacatttctcccggagtttgtccccaaaaatgtttcggaacacagctttctttccctattataatataaataagcatcaagaaaaagtgtattttttgaaattttggcatatttatcagaaagttcaataaaaaaatgtcagttacagaaaaaatcccctgattccttgcatttgtcattctgccatattataatatctttgttatgttggcggcagagcaagtgagggaaagtgcctgcaggcgccaattatttcaattattttagcaaagctgaaaacttatgcggataggagtacctttatgacatcgaaagaattcggtaaacttcttcaggacaagctcaccagcgagtacggcgtggagctgagcgttgcttccaaccagcagatctaccgctctctggctctgatctgccgccagatgatgagtgagaaccacaagaagttccagtccaaggccattggcaccggcaccaagcaggtgtattatctgtgcatggagttcctgatgggccgcagcctgaagaccagcctgctgaacctgggtctggacgaggtggcaaaaaaggccctgtccgatgctgatatcaatattgacagcatctttgaggaagagccggatgcaggtctgggcaacggcggtctgggccgtctggctgcctgctatctggacggcatggccaccaccggcatctgcggcaccggctactccatcctgtatgagtacggcatcttcaagcagaagatcgtggacggctggcagcaggagcgtgccgacaactggctgcccggcggtcaggtctggctgaagagccaccccgatcaggctgtggaagtgcgctttgacggcgagatccacgagaactgggacaacggcttccactatatccagcacaccaactacaacagcgtcatggctgttccctctgatatgtatgtgcagggctacgacggcaagggcgttgcaaagctgcgcctgtggcaggcaaaggccccggactttgatatgtccagcttctctctgggcaactacaacactgcaatgagcaagaacgccaatgcagagctgatctccaaggtgctgtaccccaacgataaccatgttgagggcaagatcctgcgcctgcgccagcagtacttcctgtctgccgcatccatcggcgatatcgtccagaaccacctgtccagctatgcgaccctcgagaatctgcccgacaaggtggccatccagctgaacgacacccaccccaccctcgccatccccgagatgatgcgcattctgctggatgagtgcggctttggctgggacaaggcattcgacatctgccagaaggtcttctcctacaccaaccacaccgtcatggctgaggctctggaaaagtggaacgtggatatcttcaagatgaccctgccccgcatctaccagatcgtggtggagatggaccgccgcgcccgcgcagagctggagaaggtcttccccggcgacaagggcaagatcgactatatggcactgatcggcgacaatcaggtgcgcatggcaaacatctgcgcctacaccgccaacagcatcaacggcgtgtccaagctgcacagccagatcatcaaggacagcgtcttccacgattactacctgttcaagccgcaggccttcaagaacgtgaccaatggcatcgcttaccgccgctggctgctggcctctaaccccggcctgtgcaagctgctggacgagaccatcggcgacggctacaagcatgatgcttccgatctgtccaagctgaacaagttcgagaacgacaagaccattctcaagcgcctgaacgagatcaagctggagaacaagaccaactttgccaactatctggcaaagagcaccggtcagatcatcgacccgaactctatctttgactgtcaggtcaagcgtatgcacgagtataagcgccagcacctgaacgcgctgaacattgctgcccagtacctgtacctgaaggagaaccccaacgccgacttcatccccaagacttatatcttcggtgcaaaggctgctcccggctactacatggcaaagcagatgatccgcatgatctgcaagctgggcgacctcattaacaacgaccccgctgtgcgcgacaagctgcgcgtggtctatctggaagagtactgcgtctctctgagcgagcacctgatgcccgccgccgaggtctctgagcagatctctctggccggcaccgaggcttccggtaccggtaacatgaagttcatgctgaacggcgccatcactctgggcactctggacggcgcaaacgtggagatcgcagacgctgccggcaaggagaacgagctgatcttcggtatgctgacccccgaggtgaacaacctcaagcaggtgggctaccatcccaacgctttcatcatgggcgacgatgttgccaacaacgctctgaacttcctggagcgcggctggaacggcgagaacttccacgaggtgaccgagaacctgcgcagcagcgacccgtatatggtcatggccgacttcaaggattaccgccgcgcacaggccgacctgcagaagctgtatgccgaccgcgagaagtgggcacacatgagcctgaagaacattgccaacagcggcatcttcagcgccgaccgctctgtgctggattacgcacacgacatctggtacgcttccccggtgcccatgggcaagtaattttcccttaaaaaatccatctgccccggcggcgtttggcccgccggggcttttttgagaaaggacgaccctgctttgtcttgtctgttcaatagctacgacccctattttaagcagccctttggcgcactgcgggccggtcagaccgtacgtttgaccctgtgcatcccggaagagctgggctatgtcgatcctcatctggtgctccagaaagagggaaaatatgacgtgccggtgcactaccgcatgaagttcgacggccagaccccccagcagaaccacttttccgtggagctgccgctgaatgacccgggcctgtacttctactacttcgacctctacaccgacttccgccgcatctaccgcgggccggacaactgcggcgttgtcagctggcaggaaggcgaaaagtggcagatcaccgtctacgatgccggtttccagaccccggagtgcatcaagggcaaggtgttctatcagatcttcccggaccggttctgcgagggcattgagaacaagcccatgcctttcccggaccggctgtatcaggccgacaaacacgccgaacccttctggcagcccaacgagaccggcggccacctgaacgaggactatttcggcggcgacttggaaggcatccgcatcaagctgccctatctgcgggagatgggggtggactacctttacctcaaccccatctttgaggcgcactccaaccaccgctacaacaccgccgactatctcaacgtagacccgctgctgggcaccaacgaggagttcgaggtgctctgccgcgaggccgccaagtacggcattggcatcgtgctggacggtgtgttcagccacaccggttccgacagccgctatttcaaccgcgaaggccgctatggtgacggcggcgcttaccgcgaccccaactccccctaccgcagctggtacgattttgaccccaagtataagggcggctaccgcagctggtggggcttcgagaccctgcccgaggtgaacgaagagaacccctcctatgtggagttcatcaccggcgagggcggtgtcattgacacatggctgcggcgcggtgccgcaggcttccgtctggatgtggccgacgagctgccggacgactttattgaaaagatccgcgccgctgtcaagcgggtcagcccggagaagttcctgctgggcgaggtgtgggaggacgccaccaccaaatacggctttggccagcgccgcacctatctgctgggcaaggggctggacagcgtgatgaattaccccttcaagaacgctgtgctggactttgtaaagggtaagcccgccgagcaggccatgggcgaaattctgtccatctgtgagcactaccccgcccctgccatggacactgcgctgaactttctctccacccacgacaccgaacgcgccctcaccgtcattgcggacgagcccgccaacggccgtggccgcgagtggcagagcggccgctgtgtggtcggcgaagcctacgaggaagggatgctgcgcctgcgcatggcctatgccatcatctacacgctgcccggcgtgccctgtctgtactacggtgatgagatcgggatgcagggctaccgcgaccccttcaaccgtgccttcttctgctgggacagccacgaaaagcgcctgaagccggtgcttgcccagctggcgcagctgcgccacacctgcgaggccttccgcaccggtgagctgcgggtgctgcgggcgcaggacggcatcctgcactaccagcgcgtaggcgaagcggaaaccgccgaggtcatcgtgaaccgctcggagcacatcatcgtggagccgctggcttccggcaagcacacggaggtgaaccccatgggctttaccatcgtggtggaggagaacgggcataacccgaaccacagctattacgatatcaagtaaaaacgatttgaatgcccgccgcgttcgctctgggcacattcagaggaaattttatcttttattttcgcaacaacgggcagcctgcgggccgcccgttgttgcattttcacgcaaagggccgtatccgcaaactacatcttgcactgcttttcatttattttgttctttatttcgttttctgcgcaacgttccagtaaaaaacgcttgaccttccacccgggggatactctataataggggcataaggagggagaaccatgaatcctgttccatttctctggctggctgccgtggtgggctttttgctgttggaggcttccaccttcagcatgacctccgtctggttcgccgtcggcgcagctgccgccctgctcacctgcctgttcacggattcgttccgggcgcaggctctggtgttcatcgtggtaagcattctgtgcctgctggcgttccggccgctggctgcaaagctgcgccagaaaatcacccccaccaatggcgaccgaaaccttggccgggaggccaccgtgctgaccaccgtcaccgccgacctgccgggccgtgtgcgactggacggcgtggactggaatgcccgctgcgccactcccggcgacattctcacccccgggcagcgctgccgtgtgaccgaactgcacagcaccctgctcatcgtggagcccgtattgaccgaaagccgcagagcgtgatctgcgttctgcgctgaaacgttgcacccatctgaaaaaggagaaccactatggtcatgttttttctgatcctcgcgctggtctttgtcgtcctgctggtgatcatcaccaatatcgtcatcgtgccccagtccaaggtgtatgtcgttgagcggctgggcagctactccgacacatggtcggcaggcctgcacattaagattcccttcatcgagcgcatcgccaaaaaggtgagcctgaaggagcaggtggcagactttccccctcagccggtcatcacccgcgataacgttaccatgcagatcgatactgtggtgttctttcaggtgatggatgccaagctctacacctacggtgtcaaccagcccattgcggcaatcgaaagcctgtctgccaccaccctgcgcaacatcatcggcgaaatggagctggaccacaccctgaccagccgcgacgtcatcaacggcaagatcaccgccatcctggacgaagccaccgacaagtggggcatcaaggtgaaccgcgtggaggtgaagaacatcatcccgccgcgtgaaattcaggaagccatggagaaacagatgaaggctgagcgcgagaagcgcgccgtcatcctgaaagccgacggtgaaaagcaggccgccattaccgccgctgagggcgaaaaggaagccgccatcctgcgcgcggatgctgtgaagcagcagcgcattctggaagccgagggcgaagcacaggccattctggccgtgcagaaggccaacgccgacgccatccgcctgttgaacgaagccatgcccagcgataaggttctggccatccgcagtctggaagctctggccaaggtggccaacggcaaggcaaccaagatcatcattccttcggagcttcagaatctgggcggcgtggtgcccagcatcaaagagctgatgaccgacccgaaggacgcagaataaaattaaaaattccggttcaccgtctgtgctatatgcaggcggtgaaccttgttttgcacgataaaggagttcttctatgatctacgataccctgaacaacctgcccaactatctgggcgtgagcgacaacctcgacaccgtcatcgagtatatcatggcgcgggacatcaccaccctgcccgccggacgcacccgcatcgacggcgaaaaggctgtggtcactgtgagcaccgtcacaccgctgacttccgataaagcgctgttccagcgccacgacagccacatcacgctggagaccgatctggacggcagcgagctgtttgaggtgagccttgcagagctgaccccgacaaagcccaccgacgaatccaccgacaccaccgtgggtaccgcaggcaccagcattgccggaatgctgtgcgaggggcggtttgccctgtatctggccggagagccctataaatccggcctgaaggcgcagggctgcggcaaactgaggaaagccgtgttcagcatcgagctggacccggacgaagaggacgagaccgaggaataagccgagagagggcatttatatgggattttttgctgtactggctgcaagcctgtttgccgtgttcctctttaccgtgttcggcggctattcgctgctgctctggtgccagcagtccctgctgatggtggttccgcctgcggtggtgctggctgttctggtgtggacgttcctgaaaatggacgacaaaatcaccgccctgcaaaagcaggtggaggaactggaagccgcacagaaaaacgccgaagagtccgagaaataaatacagcgacgcccctgcagaaaaagcttttcctgcaggggcgtcgctctttttacaccttactttttatcctgtggtccaatcctttgaacatcaccatgcccagaattgcaaagctggcgcccagcacaaaacccactgtccccatcgacacgctgaacaaaacgcccatagcaacaccgaacaggatacccgcgatctgacttttcttcattttactgctctgcctttccgtaccatgcaacagacagccgccacgagagagcatacagcgccagagccgccaccgcaatacccagcagccccagcgacgagatgctctgcggaagaaggtttctcacaagaccgtcctcgtttgcggccacggaaaagcccattagggccgcgagcgcaccaactatgaaatagagcacaacctttgccttttcgtagccgaaacggtagctcagcggcagcaggatggtgctgctgagcagggtggtcacgcccacctgcaccagcgtggaaaccacaagcgcatggtccacagctgtccagtgcaggcttgccacgccaagggctgcggcggcaaaagcctctgccagcaccagcccgcacagaccaacaatgtatttacaccccaccagctgctcttttgtggccggaaacgcggcactgtattcgttgaatttgctggtctggtcgtatgccagcagtgtcatgggcatcatacccagcaaaaagcccgcatagacaatgaagaaattggccccgttcatcatcg

SEQ ID NO: 1131 - DNA, 8924 bp, Unknown
  gut microbiota DNA sequence
gaaccaaaggccctatgcggttggcgttacaatagccgcatctacggccaccggacaacaggaaaggagtatctcatggccaaaactgctgacaccattgccatctattcccgcaagtcccgctataccggcaagggcgaaagtatcggaaatcagatcgacctctgccgcgaatatatccgcactcactacggcgatgccgctgcggaacatgccgttgtctttgaggacgagggcttttccggcggcaacctgaaccgcccggacttcaaaaagatgatgactgcggccaaggaccggaaattcaaggccattgtggtctaccgtctggaccgcatcagccgcaacatcagcgacttttccagccggattgaagaactgggacggcagggcatcaaaacaaaaaccgggcgttcgttcacccggttttccatcaagtcgattttgcagaatcctgtctacctgattgcagacaaggacgcctatcagtattttgtggacaatgaggcagaactgttctccccggagtccggaaaaaaggcaagccctccttcataaattacagtaaccgtttatgatactatggggaggggtcggcatgtttttatctcttctgcaattttttgccacaaagtttctggttctggcgcttcatctggaaagcggcagctttccgcggcccctctctgcccgggaggaaaccgaagccttttccgcactgcgtgccggtgaccctgccgcacgggaaaaactgatccggcacaatctgcgtctggtggcacacatcgtaaaaaaatactacgccctgcccggcgatcaggacgaccttatttccatcggcaccatcggcctgatgaaagcagtggatactttcgactctgaccgtcgggcacgcttttccacctacgccagccggtgcattgaaaatgagatccggatgcagttccgtcggaaccgcaaaaccggcgggaccgtctcgctgcaggaagcgctggaatcagatggtgactctgcgctgacactggccgatgtgctgcaggacatcttctgcatggaggacacctgcgaaacgcaggacgatattcgccggatgcggcagctgctggacggcctgcccgccagggagcgacagatcattctgctgcggtatggtctttccggccagccgccgctgacccagctggaaactgcaaaactgctggacatcagccgcagctatgtttcccgtctggaaactcatgcgctggaacttctgcgccagcggtgggatgttccgagcacaaaaacagcgcagaggtgaacggtgtgctcacccctgcgccatgcagtcagctatccagaattttcatctgcatctcgtccaattgttcaaaagtatacagtcgattcagcgcttccaccagctcttttttggaaagacgcggcggcaggcccagcgcgttcagaagctttgccttgcgctcggcgctgcccggcctgccggaaagcccccactcgtagaggtcggtataggtgatctgccgtccttccgggcgggccgctgcggcacccgcctcagcgccaagggcatcccgcagcgcctgtagaacaatggcatcgtccacaccctcgacccccagcaggccctccttgccgggctgctccttgcgcttttccttgccgtggatcgcgggcacgtaagcctgaaccacattcttctctcccaccagattggtgatgtaggtgcggatgcggaagcctgctgcgtccgaatccgtgagcaggatcaggccgtttttctgcgccagcgctttgaacagctgctggcgctttttgtcgctgtaaatgccaaagccatccgtcagcaggatcatggcatcggtcagatgggagagccgggccgcatcgtacttgccctccacaatgagcacccggcctgtatggatcatttcgttttccttcatcgtccgctccccgccattgccaaccggcacagcgccgtttccagcaggatctggtcatcggtaggctggcttttcaggctctggtccagttccagcagcacctgcatacagttttcgatctggcccagcgtgtaatgcgaggctgtttcggccgaccgcttgagccggtaatcactgcccttataaccaaaatccttgaataccgtgctgtaatttttccgttttgctgcccccagcttgacccggtacagatccacatagctgccgatcatggccgctgtaatggcaatgggctcctgctgcaggcgcagcaaagtctgcagctttttgcaggcacctgtggcgtttttggccgtgatcatgcggatcatctcgaacacgtctgcttccagactgaccgtgcccatttccgccaccatcgctgccgtgaccgtctgatacccggacaatgcacagagcttgtccacttcattttccaaaaggaacggatcctcgccgcagcgctccagcagcgccgccgctgcgccgtccggcagggtggttttctgctcctttgcgcgatcgatcatcatcattttcagttcaaagggctttggcttagccaattcttcggtgtagccaagcgccttgcactgcgcgatcagcttctgtgcgcgcttgcctgttttgagcttgctgcgctccagttcaaacacgctgcccagcaccaccacagcattttccagactggaaagggtgctgttcaactcttccagatccttgtcactgtaagctgcagggtcgatctccggcagcaccaccacacgccgggtaccaaaaaatgagatggtgcccgccgccatgatgagctgttcgatctccggcgcagctccatccagaaccgtggcatcctcgtcgctgtctgcggtcaggatgcgggtggccgctgccacggcctgccgcaccagataccgctcactggaataaaaatagtagactgggcagcccttgtccgccaactgccggagttttgtctcggtcgccatgcaggcacctcccttctcttatggtgttgttctattgtaccacactctgcccggattgcaaagcatcactccgttttcagcccgccgtgccgccgcaggctgatggatgccgccagttcttttctgttgtccatccagtcatagctgcgcagggccagaacatttttatactgcacagcatccggctttgcaggggatgccagcagccactgcactgtgacctgttttgccagttctacagttccattgaccacggcaaactgccggttgcccacagtcagccgcacaagacagccattccgggtacgcagcatttccaccagagccggtgtgcaccgcagcttttgtgctgtgttcaccgccatttctgctgccggaagtgtccgctctgcttccagtgtacaggccgttttagggtttgtgcgcaggtctgccacaagctccacagtctgcacgccccgccgggcaagctggttttccactgcgttctgggcagaagctccgccccggaacagcaccacggcggtatcgttctgggtgacgaccactgccggcgcgttggcgctgcctacaaggtcgatgtgcaccacatcccggctgagagcattgcccagcccgatggaaacagctgccgccagcaggatgcatggccctgccacccgcagccgtacccgccagtggaacgccagccagcacaacagaatcagcaccagacacacgatggctgcataggccgtatcgaagtagatgcccgcgcccggttttgcagagatccagacggcccagcggtcgagcaggccggtcaacgccgcagacgctgcggacagcaccccatacagcggagcaagagcgggtaccaggccggcaaaggccgtgccaaggcccagcagcatcatgggctggatgagccacagcaccgccacactggatgccaccgcataaatgctcacactcagcccgcgcagcaccagcaccgggaatgtggccaccgaagcacaaaacgagatgcaaatgctttccgcaaggccccaaagacgttccggcagtttgaaataccatgggcgcttcaccggatttttcgcgtttctccagaactggcggtaccacgcatcccgggcgcggcggatgcacacaccgcctgccaccgtgcccaccacggccgcaaacgaaagttcaaagccgatatcgcacactgcatagctgttgcctgcggtcataacgatacctgccaccgccagagaggtaagggtatccggcgggccgtacagccacacacccagtgcaccgacccagaccgccactgcggcgcggcataccgagggtgtgaagccggtcacgcccatcagcaaaaaggccagcagacttcggaataccgcccggtgtctgcgcctgcggtagctctgctcccactcgtagggcaggagtgtgctgaggatatcaccgcacaaaatggacacatgcattccgcttaccaccagcacatgggcaagacccgcgccccggtaggcgctgcgcatggccgaagacagataactccggtcgccggtcgtcatggcagccagcacaccgccggtcttgccgtccatacggcggcgcagcgacgcactgagtctttgctgcaggcggtgggtgcgggcgcggaagctgccgctttcgcccagaactgtaagctccggcccgtcctcgtccatttccgcctgcagagcgatgccgtccgcatacaggccgacccggcttccggatgccggggccgacagtataaatcttccctgcaccctttccccggctttgcactccggcaaagcactgcactccacccggaaggatgccgcgctgccgttcactttctctacatgcaaaaccgcatccacgataccgggatcgtaggaatccgccgtgctttccacctctgcggtcagcaccagcggacggcctgcatattgcacacggatgcgctccagccggtttgccgtgtgcagcaccgatgccatacccacagcagcacccagcaggatgcagagcgctgctttgcgggcagcatcaaagatgcacagcaccagacaaacggcaacaaaaaatgccgcaaacggcacaaaaagttccgtttgcggcaaaaaaacgcacactaactccacactcagcattccagcgcagaaaacgcagagcgggcgtcgcattgcagcttagtggaagaacagaggcagcggctccaggaagatgatatccttgcgctcagctgcatcgccctcggccagaacagcggcctggcccacaatggtgcactgggtctgctcagccagcgcgtccagagccttgagcgaaccgccagtggaaatgacatcgtccaccaccagaacgcgcttgccgctcatcttgtccagctccttgcggtcgatgaccagcttctgcttgcctgcggtggtaatggactgatcctccaccaccacggggtcggtcatatacagcttttcgcccttgcgtgcgcagacgtagggcttgccgctctggcggctcatctcgtgtgccagagggatgcccttggcctcggcggtcagcagaatatcaaaatccgggcacttcttcagcagttcagcggcagcagccacggtcagctcggcatcacccagcatgataaaagcagcaatgtccatgtggtcattcaccttgcagatggtcagctcacgggtcaggcctgcaacgtgcagagtataggtctcagccataattcaacgctccctttttattggaatcagacaggcagcttttcgccgcccagaacatggaaatgcagatgtttcacggtctggcctgcgtcctcgccaacattggagatgacgcggtaaccgttgttcaggccctgctccgcagccagctttgcgatcactgcaaagatatggcccagcagtgcgccgtcctcttcggtcagcgcagcggcagagacaatgtgctttttgggcaccaccagaaagtgcaccttggcctgcgggttgatgtcgtaaaacgccaccacctgctcgtcctcgtacagcttcttggaggggattttcccctccgcgatcatacagaacagacaatcttccatgggaaacaactccttcctgatattttataaacgtccccgccctctcaggccgctttgcgtccagctctcccaaagagagagcccttggcaaaaccataaactttggcagcgcgtcagcgctgacggagagggcgaacccgttttcttattcgcccagagccttcttgacgatggtgccgacagcagccagagcttcgtcgatcttggtctcatccttcaggccggccattgcaaagtccggcttgccgccgcccttgccgccggcaatggcagcgatctccttgaccagagcaccggccttcaggcccttttcctgtgcctgtttggtcacagtgacagccatggtgatcttatcctcagccttgcccaccagaaccgccacagcgggcttcacagccttgtcgcggatggtatcgcacatgccgcgcagggtgtcgccggtggtgccggtgaagtatgcagaagcgatcttcacgccgccgatctcttcggcattgtcaaacaggctggtcaccttggaagcggcgacctgtgccttgatttcttccagctccttggccagagccttgttctcagccatcacggcctcggcacggacgggcagagcggtcacgttattggccttcagggtgtttgccacggtatgcagcatagcctcctgcaggtttgcacggatcagcaggttgcggccggtgacagcctcgatgcggcggatgcccgcagcaacggaggcctcgctcacgatcttgaagccgccgatctgggcggtgttcttcacgtgggtgccgccgcagaactcggtagaccaaccctcgatgtccacaacacgcacgaccttgccgtacttttcgccgaacagagccattgcacccagcttcttggcttcctcaatgggcatttcccggacggtgacgttcatggactcgtagattttatcgttcacgatcttctgcacgcgggccagctcctcgggagtgacagcgctgaagtgggtaaagtcgaagtgagtgatctctgcatcctgataggagcctgcctgatggacgtggtcgcccagcacttcacgcagagctgcctgcagcagatgggtggcggtgtggttgcgggcaatggccatgcggtattccttatccacctgagcggtcaggtggtcgcccaccttcacgatgccgctctccagcacgcaggtgtggacgtagtagcccttgggggtcttcttcacatccagcacgcgcaggctgcagtcggcgctgttcagcatgccgtggtccgcagcctgaccgcccatctcagcgtagaagggagtcttatccagaaccaccagcacgccgtcctttgcttcctcgtcggtagcaatggcatcggtcagggtctcctcgtcgctcaaggcgaccacaacaccggtgtcgttcagggtctcgtagccggtaaagacggtgggctctgcattcagcgcaccgaacagatcctcgctccaaccggagatgttcttcttcaggcgctctgcacgggcacgctccttctgcttggtcatttcggcgtggaagccttcctcgtcgatctcaatgccctgctctgcagcgatctccttggtcagatccagcgggaaaccgaaggtatcgttcagcttgaacacgtccaggcccttcagcagatgctcatgtgccttttccagaccgtcgatcatgttgttcaggatgttcatgccggcatcaatggtacgggcaaagtttgcctcctcggtgccgatgaccttcttgatataagcatcgtgctcgcgcagctcggggtatgcgctctcgctggactggatgacagtctccaccagctccaccaagaacgggcgggtgatgcccagcatacggccatggcgggcagcacggcgcagcaggcggcgcagcacatagccgcggccctcgttggaaggcaggatgccatcggacaccatgaaggtgcagctgcggatgtggtcggtgatgacacggatggagatatcggtcttgtcgtcctcgccgtaggtcttgttggcaatgtgctctacatggtgcagcacgctctgcacggtgtcaacctcaaacaggttgtccacgccctgcatcacgcaggccagacgctccagacccatgccggtatcgatgttggggcgtgccagacgctcgtagtggcccttgccgtcggcatcgaactgactgaacaccagattccagatctccatatagcggtcgcagtcgcagcccacgccgcaggtcggcttgccgcagccgtactcggggccgcggtcaaagtagatctcggagcaggggccgcacgggccggagccatgctcccagaagttgtcttccttgcccagacgcaccatgtggtcgggggcgatgcccaccttcttggtccagatatcgtaagcctcgtcgtcctcttcgtacacagagatgtgcaggcggtccttcggaatggccatccactcgtcagaagtcaggaactcccatgcccagggaatgacctcctctttgaagtaatcctggaaggagaagttgcccagcatttcaaagaaggtgccgtggcgggcagtgatgccaacacgctcgatatccggggtgcggatgcacttctggcaggtggtcacgcggtgacggggcggctcttcctgagccagaaaccactttttcatgggggccatgccgctgttgatgagcagcaggctggggtcgttcttgggcaccagcgggaagctgtccagacgcaggtggcccttgctctcaaagaagctcaggtacttttcacgcagttcattcaaaccggtccattgcataggttttctctcctcgattgtccttggcgtttgcacgtcagatttatgattatggcagacggggc

SEQ ID NO: 1132 - DNA, 2321 bp, Unknown
  gut microbiota DNA sequence
aaacggcttggcattgacccgcaaaagcacaaggaatatctgtatcacttctatgagggcaatttccccggaagctgggcaaagggtgagctgtacaactacgaccccgccaccggcgatgcccgaagctgcggcaccaccgccagcctgtgcggtgtggagcaggcactggaaaaggacgataaaaccgcactggactacgccgtaaagcgtgacctgctgctgcacactgctatggcgtttttgcagggtttccccatgctgaactgcggcgatgagatcgcacaactcaatggctgggattataaaaacgaccctgaccgtgtggaggacagccgcaatctgcaccgcagcaaattcaactgggaggacgcaaagcagcgcacccggaagggcacgctgcagaaccagctgtggcagggcatggagcagctgcgccaaatgcgtgcagacccctgttttgccccggatgcgtgggtgaccacatgggacagccacaaccccggcgtactggcgctggtacgcaagcgcggcgaggaaacgctggtggggctgttcaactttaccgagtacccggcaggggccagtctggacgctctgggcggcgagtatcacaccccggagggcacttccgtctggctggcggatgtggaactggagccgtatcaggcactgctggtaaaaacaaataagtaaagcggaatactccggtaactttctcttggtcagaaagttgccggagtatttttgtttcgcgcaaactgcaaggtcactggatcattgaaatgtcggagatgattgccaccgccaatgccacgcgtgcctgcgcaaaaaatccccccgataccgggtatccggtatcggggggatctgtcattctgaggctttacggaggaagcgctcagaggttactttttggggaacgccttgttccagatctcaatggtcttgaacttgggcatccagccgtccgattcaaacttgccttcccgtgcatccagcagaccctgctccacgcaccactgagcggccttggcctgctcggcatcggtgatgtctgcaaaggcgggctgtgcggcgggttcgggcttgcccttctcagtccagatgagcagtgccagctggccgcggtttgccgggatggctgcgccctcgggcaggaggttgtgcaggatcacgcgggtggcgatctcgtagccgccccagatggctgcaccaccaacggccacggcggcaatggtgccacctgtggtatccatgggtgcaggttctacgccgaagtcttcatcaataggttcgtccgggtcggtcaccgcgctggccgaccagtgggcgatcagtttgaccgggtaaacgggcatctcaaacgtcgtggccgcgctcttggcattgttcagcttgagctgcagattttccggaatgccaccggggaatttctcgtagaagctatcggggtacttgatctcccattccacgaactccatgccggggtatttctcggcatcatacggggtagctgtgatctccaccgtggtgccgatctctgcggggatatcgctgccctcgtccagagtggactttgccgtgccgcccgtaacagtaacggtactcctcagcacggaagcggggatgctgtaaacggcggtcagcttcacgccgtcctgcggcatggtaaagacgatcttttccgtgcccttttccgtttcggagcccagactgccctcaattatgccaatattcttgctggaatctttttccaccttccagtgatggaacgactcattctccttgacaggctcattggcttcgatcgtgacggtctggcccggctgtacgaacaccgtgcccgtctggctttcgccctttccgacgcggatcgtgccgttcttcactgtgacctgcatatctaatacaggtgccgggaagctataagaagctttcagctccaccgggctggccggcatggtgaaggtcatattttcttcggtatttttctgctcttcggtcagttcaaagccttccgggctgatcactttccagccgccgaactttgtaacactcgggttttcgttcttaccgctcaccgtgaccttttcgcctgcaaaggcggtattcaggccggtggtgtcgtcgcccacctgcgcggtgccgtttttcacagtaatgttgtaagtctctctgggttcaatacgcaggtatttgctttctattgtcttaggaatcggggtaatgcggtagtccttgtactcctccgaagatttgtccgtgaaatagacatagggttggcccttcttctgagcgaagatcactttgccaaggtt

SEQ ID NO: 1133 - DNA, 3300 bp, Unknown
  gut microbiota DNA sequence
cgggatgcgaaagctctgctcaaagagttgcaaagccagaatgagcggatgttccttgtcacgtttctggtgctgaacaccggcaaaaccgagcaggaactggaaaccaacgtgtttcaggcggtcagcattgcgcagaagcacaactgcgaattatgccgccttgattttcagcaggagcaggggctgatgagcagcctgccactggcagactgtcagattgagatccagcgtggtctgaccaccagcagcacggcgatttttgtgccgtttaccacacaggaactgttcgacaacggcaaagaaagcttgtattatggcttgaatgctttgtccaacaatctgattatggttgaccgcaaaaagctgaagaaccccaacggtctgattctgggcacccccggctccggcaagtcgttcagcgcaaagcgtgaaatttgcaatgcattcctcgtgacagacgatgatattatcatctgcgacccggaagcagagtacgctccgctggtggagcgtctgcatgggcaggtcatccacatcagccctgccagcacccagtatatcaacccgatggacatcaacagcaactactcggaggaggacaacccgctggctttgaaagccgactttgtactgtccctgtgcgaactggtggtgggcggcaaggagggcttgcagccagtggaaaagacggtcattgaccgctgcgtccatgtgatctatcgcaagtatttcgagaatcccaccccggaaaatatgccgctgttggaagatctgtacaacgccctgctgacgcaagatgaaccggaggcccgccatgtggcggctgcgctggaaatctacgtcaagggcagtttgaacatttttaaccaccacaccaacgtggatatcaataaccgcattgtctgttttgacatcaagcagcttggcaagcagttgaagaaactcggtatgcttatcgtgcaggatgccgtgtgggggcgtgtgaccgccaaccgcagtgccggaaaatccacccggtactatgcagacgagttccatttgctcttgaaggaagagcagactgccgcttattctgtggagatttggaagcgtttccgtaagtggggcggcatcccgacagccctaacgcagaacgtcaaagacctgttggcaagccccgaagtatcaaatatttttgagaattcggacttcgtttatatgctcaatcaggccaacggagaccgacagatcttggcaaagcagctgaacatttcgccccaccagctttcctatgtgacccattccggcgagggcgaagggctgctgttcttcggcaacgtcattttgccgttcgtcgatcacttcccgaaagaccttgaactctaccgcatccttacgacccgcctttccgaagttgcggaggcgcaaaagcatgagtgagaaacagccgaagctgaaattcgaggaggaaaaggagcgcacggctacacgctcccctccgaaaaagtccaaagtggagcagtcggtgccccaaaagcagaaactgaaacaggatgcagacaaggcagcagaaaaggcacagcacttgcgtttcggtaaggccgagattaccccggatgaagcatcccgcatgacaaagcagcagaaacgtgctatgtatgccgccgctgccgcccggtctgcggtgcatcgggagattgaccagtacgaggacgataatgtgggcatgcaggctttaagcgagggcgaaaaagccgctgagactgcccacgatatttccaagagcagatacgccagaaaactgaaaaagaaagccaagatgcagggcaagaagggtgccaaaaccgcaaaatcttccccgcagaagccgactgcggcacaagatgcaggcgcatcctgcaccggcgagggcggctccaactggctctcccgatggcggcagaaacaggacatccggcagagctactatgccgccgcccattcgggcacagcggcgcagaccgcaggcggcaaggcggtatccaatggcaccactgctgcgaagtccggcatggagcaggtcatcgacaaaggaagatcggtggtcagcaccgcagtcaacggcattgccaattttgcaaagagcaacgcgcacgttcttttgatcgtgggcgtttttcttttgctcctgatgctggtcatgtcagcgttttcgtcctgttccattctgttttccggcaccacgcaggtatccgggcagaccatttacaccgcagaggaccgggacatccggggagccgaaaccgactacaagaagctggaaaaggaactggataaaaagatcaagcgtacccccaccgaccaccccggctatgacgaataccgataccatctggatgctattgagcacgacccgtggcagttgacttcgttcctgaccacgctctatgacgactacacccgcagcgaggtgcaggcaaaactcaaggagacgtttgccaagcaatacaagctgaccacatgggtggaagtccagacccggtaccgcacggtagtgatgatcgacatttttactggcatcccctacaccgtgcaagtcccctatgagtatcgaatttttcacacaaagctggtgaataaagggctggaggtcgttatccgggaggaactgaacaacgaccaatggaaacggtacgaaatttttcaagataccttgggtggcagaccttacctgtttaacggcggtctgccgcccggtggctccgatggctccggcacaccgggcatcgactatcaggttccggcagaagccctgacggacgaggaatttgccgccatctacaaggaagcccaaaagtatgtgggcacaccctatgtgtggggcggctccaccccggaaaccggcttcgactgttcaggttatgtctgttgggtgtacaaccagaacggctatgatgtagggcgcaccacagccaacggtctttggcagaaaagccagcacatttccgaagccgaagcaaagcccggtgatcttgttttcttcgagggaacgtatgatacccccggaaaaagtcatgtgggcatctaccttggcaacggcatgatggtcagcgctggagaccccataaagtatgccgatattcattcgtcctactggcagaaatatctgtccggttttgggcgactctcaaaatgattggaggaagaaatgagcgaaaaactcgataagctgcgcgcttctctggaaaaagagaaggaacggcgcatcaagatcaacaaccgcatcgaaagtcttgagcggcggattcaggaagcggaagccgccgaagtgaacgagat

SEQ ID NO: 1134 - DNA, 28481 bp, Unknown
  gut microbiota DNA sequence
catatctatattactccaatttgataaacggtgcaatggcgttggcgtcgccgtggcggacgatggagtaggtgatgtcgcagtagggctggatggcggtactcttttccacggtggagatgagcagcacctgcagctgcaggcggcggaacagctccatcatggggcggatgcggtcgctggtcatcttgctgaaggcttcgtccagcagcacaagacggatgctgttctcgctcttctcatagatctgcagaaggctggcgcagatggccacatagaagggggcctgattctcgccgccggaggaatcgcggctgacgcgggacaggtatgcctgctggccggtgacccggttcgtcaccttgatgtcgtagtccagataggtgcggtagtccacatagtccgacagggtcacgccgccggtgcggccctcctgccgggcgcgggtgttctcgtccacatccgccatgatcttttccatcagctcgtccacctgacgctcataagcagggtcggcggtggcggcaaggttgtccagcgagtcgccctcggtcatctgctggttgcccttgtccacgatgacctgatagaaggccgccagctgcgggtcgcggctaggctccagctcaaagcggtagacctcctcgccgtaggtcaactgctccatcaccttgttcagctcccggaactgccgccgggcgttgaagatatcgtccttcatgcggaacaggatatccttgcggaagcggtccttgcagtcccgctgggcctgctccagacgggcggcgtagcgttccagatcgatgcgcacaaggctctcgtgctgggcgcggtactggtccagccccgcaaggcccagcggataatcgcacacatagtgctcgttgtaggctttctgggccggttccagcgtgccggtcagatagacggccagcgcatcgtccagcttggcctgcgccttttccgcagcctgtgcggcggcgcggggcttatctgccggggccagcgccagcatccgggtgcgggccagcggctccaccagcggatgcgccgcaaagaagctccgggcagcatcggcgctctgctgtgctgtttcccctgcctttttctgctctgcttcgcaggaggcgatctgcttttggcacacgcggatatcgccgcccgcctgctccacggcggcgcgggcagtctcccacgcagcttcgcgagcttcttcctccttgtaaagctgctgcagcagcgggttctcgcggcactcggtgagctttgcttcctgttcggtcacagcattctgtgcggcagtcagtgcggcgcgggcatcccacagcgcagccagctcgtccagtaccgtgccccgcagcagggtctggtactggttataggcggctttcaggttctgttctgtctgggcggcagcacgggcgctttcccccagagcttccagctcggccgccagcgcaccggcgcgggcgcggcgtgcgtccagaccgatataccgctgcggggtgcgcagccgttccagccggaaggggtggtggcgcaggaggtcgcgggtggcgctgtcgggatgctgttccagcgtatcgggggtgtcgcagcagacgatgcggcccagaatggtctgggcatactgtgcagccagcgggttttcactgctcacctgcgcggcaaggctgtccgggccgtacttgtcggcgcggcggttggccttgcggatgcccggggtgtccagcaggctgatggggcctaccttgtccttcagagccacaaaggcgcttttggcggcttcgtagtgggcgggcggcacaaggatatcaaagcggcggtcgccaaggcaggcttccacgcagtcctgccagctctcgtcctccacgttcaacagttcacagaaaattttcgcatccggctgcatgccccggctcttgagttccgcattcacggcatcccgcacccgggtggcggcatcgccgtgggggtagacccacttgccgccggacacggcatccagctccgcacgcttgccggcctgctcccggtgcagggcagcggtgttctggcgggcagcaaaataggcttcctccagcggtttttcctgcgcggagagccatgcggtgagctgcggcagagtgtccgccgtcagctcttcggccttgatgccggcagcaaagccgctgcggcgcagcacagccagcaggctctgggtgcgggcaagggcactctctgccttttcggctttgcgtgcggcggtatccagcgctgttttgcggcgggaaagctcctcggtcagggcatccagtgcccggccctcgccgctggcgctggcggcaccgtgggcggaaagataggcccggcgggcttccgcttcggcatttttggcctcggcatagcgggcgttcagctgttccagctggcggcggcccgcatccagatgctcctgccagacggtctgttcgctgccgtcggcagcggcgcgggccagcagcgccgcgccccggttcacaagggtctgggtctgcttttcggcagcttcgcggccaaaatccacgatctcttccagcgcgttggcgcgggtctgtgcttcggccagcacggcgtgcagattttccagctccagccggtcgccctgcaaagcgtccagatccagctccggctggggcaggatgtactggtacaaaaactcccggaagttggggatctcgtccatgctggtgcccatctggaacacctcgttgaactttttgcccaaggggctggaggcgcgcccgatgcccagcgcacggcagatgcggtcccgcgcttcgctggggctgcgggtgtaggagagacggcccgctgcgggcttgaagtcctcctttgcgctgggtgcaccggtcttggggtcgatgaagggcagctgttccagcgtgcagccgtcctccgaaagataccatgtctgatcgccggggtgcagctcctgcatggggccttcggactccacccgcaccgcgatgacgaagggggtgcgcttgacgctgtcccagaactccgccccgatgtaggccacggtatggcccgggcggcggtaggcgttctcgccgcgctgctttgcgtgcaccgaaccctgcagggtgcggccgctctttttattgcccagtgcattgaaattgcggttggtggtcaggcagtagcggatggcatccagaatggtggtcttgcccacggcgttcacaccgatcatataggtgagccgtgcgcagtcgaaggtgacattttcaaagttgtgccagttgataagcttcagccgtttgagttcgatcattcttcaccctcccctgcttcttccggtcgttcataaaggccaagctctgtgcgggtgcgcccactctcggcggcggcatccgcaaggtcagcatccggcagggccagcagcacggtgggaaatacctcaatgcggctgtccagcccggaaagccgccccacaggccgggccagattgtaccggcgcagggtgcgcatgaggttttccagcgttttctggtccagacggcggggcagattcatcttctgcagctcggtctgcacctcttccaccgtcaccagcacctcgtcggcattggccgcaaggctctcgcgcttttgcaggtacaaaagccgcaataccaaaagcaggatgctctcgtatttcagcagccgggcctgactgccctcgtggccgttgaccaaagccgccgcctgcaggggtgccgggtacagcaatacagaatagcccagcggggcgaacacagcgcggacctcgtccagatggtcctgcacataaagatattttgcccgctgatcctccacgccgcccagcacgaagcagtggttcagcaggtaattcgcggtttcttccagcatgttaatggttgccattttcttcctccctgcggcgggtgaggacaaagtcctcaaagcggaaaccgccgcgctccacccaattgccggtgagctgaatgtcataatcccggtgcggcgactgcgagtaggtgtgcaggccgatgatgcgggcaaaatcgttcgggtattcgtctgccagaagtgccgcgttcacctgcgggcgggcggcaagggcttgccgggccagcagggccacgttctcctcggtaacggcaaggcgggcgtaatccagcagcaattgctgctcttttttgagctgttccggatcgaatacttcggcgcgcaccggggccagcggctcggcggtgcgctgggcagcgggcgggtacagaaatttctccccgaacaccgccgccgggtacagatgcagccgctttgccaccgggccgtcgtccggttcaaacagctgctccggggtgcggatgtcctcggcgtagcggcgcagcagggcggtgacgctgccctgcgaagaacggtcgctcagcagcaggaactgtgcccgctgcacagcccgcttgcggtagcggatgtggcttgcatcgatctcgcgcatgagcaggctcatctcttccagcgcatcccgctgcttctggatgagtgcacgcacggcaggtgtcgcttcgttcggggcgcagcgctccacccgggcataatcaaaggccagctgcggcaggtagttctcctcgcagtcgtccagctcttcttccagataggcgcggtagttgaacaggttgtcgctggtcttgaagcggtggtaggccgccgccaccaccttttcctcgtactggtcgaacagttccagcacctcctgcggggtgcggttgcgggtgagccggtcgatatagtggccgatggaggcattgagcgcccggagagagcggttcagcgcgtcaaggtctgcgtccacctcccgcagaacgttctcataggggcttttttcctgcccgatgctgcccagcagctgccatgccttgtacagcttgccggtataggtaactacgcgggggttcaatatttcttccagcgcttccagcagcggcgttacctccggcacaaaggcaagggacgcttccccctcgtagctgccgggctgctcttccagccagccggtgcggcgcagccgcagcagaaagcccacggccagcgtgtgagggtcgcgggtgggctgctcttcttcatcgcccgcaccgtcggcatccagcgcaaggggctttgccagtgcggcaaagtaatcctcggcacgccagacggcctccgcacgggaaatgctgtaatccgccgtgtggcggcactcctcccagagcagaagcagcaattccgcataaaaagcccggttcggccccgccagcgggcggaacagccgcggggacaccagttcaaacagctgcatggaaacgtcctttcctgttcacatcagaatacgtttttattgtaccacaaaacgacacggtttgacagagaaaccattcagaattgccgccgggaggggcggggcagactccttccgtcaaaccctgcgggtttgccaccttcctcagtgagggaggcaaccctctcagtcacgccttacggcgtgactgagagggttcaggcagcaaaaaagccccggggagcgggatgctcctcggggcaagtcaattcttcaattttgcgaattaagctttacgacacagactggacaatttcaattgctattgctgcataggttttgccattgattactttagtggcaataccgattttcttaagtgcccgcatagtttctacagcatcttcacctgcaccctctgtggtaatttcacccaaggattcggcggtgatttcttttgcctgacacacacccttatcgggttcgcccttcgttcctacgctaatcactacagctgttacagattttccatcagcattgggcgttacaatagaagtgtttgcatcagtaaccgcaatcgtgccatcatccttgattttctgcaactgagccagagccttgttacgcaggtcggtatcattttccagtttttctgcattctcgccacggagagtgttaatcgctgcgatgtatttgttttcaaattcctcgccaatcgtggatgcaccagaaccactgccaccgccgcaggcggtgagcattgccagaaccatcacgccggccagaagggcggctgcgaaacgtttgaacattttcattgtaatgttcctcctgttttcaaattctgacggtttgggcgaccccaaatcgctttacccgtctgaatttattttatccatacccccccgcatgtcaacaggcatatcgcccaaattccgcagttctttttggcaattgtccccaaacgcaaaaaagccctggagggcggggcagactccttccgtcaaaccctgcgggtttgccacctccctcagtgagggaggctctggcgaaaccggaagctttgcacctgagccgggagctttgccgatgcgaaaggctccctctttgagggggctgtcgccgcaggcgactgggggagtttgccctaaacgcaaaaaagccccggagggcggccttgcagccacgctccgggggaaaaaggtgaggagttttagtttttggggtatgcaaggttcttgagctggagtctcacggccacataggtgcccttctcattgctctgaacaacaacggcaactttggtccagcagccattcgcatttacatcgacattcgtaccgggatacatcatatcaatgtagttggtaatcatcttaatcaagtcctgcaagcgctcaccgtaccggtaatccgccattaccgtgattgtaatgttcttttctcggggtctaatacccgtcaccttaacgtcgctcttgaatccgccagtttcaagtttcgcattcagatccgtcagcagcgcacggcgaagctccggatcattggttttagcggtttcgctgcactgaggactgctcgtgagcgccgtcagcattgccgcctctttctgttcatctgtggagccgccaccaccgccgcaggccgtcagcagggccagagccatcacacccaccagaagcagggcagcaaatttcttcagctttttcattgtaaagcgcctcctgtcatttcaagattttgttgatttgtctcatttcagtgctgtgttttcgcactacagaacgggtgtcgttctggccttattttatccgacagcagttggttttgtcaatcgagaagatgcataaagtttccgaaacattttcgttcaaaatcaatgaaacagcggcttttttgttgcagtattgagatacactgtccttatttcgcaaaggttctttaccgtgctggaaaatcttcttccagccggaagctccatgcggttcttttccggggcacagtccttcccggtttgaacagatgttgtgttccgatccatcttgatccatctttcagaatcctttcaaaaaattacgattttacacaattctaccatttttgcatggtaaaataaggtcgtagaaaaaacaaaggatgtggctcaatatgcaacactgtcccgcccgcgcggcacagcggctggcggcggcagttctggcgctgtgccttgtgctggctctggccgttccccacgcacacgcagctgccctgcaggaaacgcacggcatccggatgctggacttcagcaccagccagatcctttccatcggcaaccagacctccggcaaatgcagctggtacgccttgcgctatgcacgcaccattctggatggaaaagtttcctccggcagcggcatgtggtcaaacggtgcggtctggtctgcgggcggctactacggttattccggcagcctgtccgagtgcttgcagaagctttacagtgagctttccgccgggaagccggtgatcgtgcatctgaaaaacactgcggtgagcggcgtaaaacggcacacgaaccgcacctccagctatgaataccacctgaccagttccggctggaacgaggtgaactacccccatatcgccaccagcgccgcctatggtcactgggtctgtgtggtgggcatccgtgcggatgcagaccccgcgaacctgaaggagagcgatttctacgcgctggacccggcccgtgtttccgcaaacggcactctggctgtgacccggctgctggacggcaccatctggacagacaattccccgctgaaaacggcaggttgataaatttagaaagagcaaaaaagctgacgctttcgcgtcagcttttttgtttgcagttcagatcaatacccttttaccgagaagccccgctcccatgggtcgggcggcagatccttctggcggatgccggtgatctggatataatcgcttttctggatcatggcgaacagccgcaggaacttttccgggtcgccctgcacttccagcgtcacgctgccgtcgtcctcgttctccacccagccggtcagttccagcgtctgggccgcatagcgggcgcggtagcggaaacccaccccctgcacctgcccctcaatggaatagcggcggcgcacagtgccttccggcagggcgggcggcgtggcatcctgtgcttttttatgcagaaaatcaaacatcttacagctcctgataggcggtcatcagcgccgggatgaactgctttttgcggctcaccacaccgggcagggtaaagctgccgtcctcggcaggctgggtctcaaagccgtccgagagcacctcggaagcatagcggccatcgctgatgaccacgctctcctccttgggcacgtcggtgagcagcatgtagatatcctccacgttctgcttgttgcgggcttcttccagatagggctgcagcagcgcttcggcggcaagcaggttcttgcgggtcatgtagctgccctgcgccacgccaaagcggatatcgccgcacatgaacaccttgaagtcctgcaggaacacctcctcggcggtcttgccgtccagcttttcgcctgcttcaaacatctcgctggcaaactcgtcaatgtccacaccggcaatttttgccagacgctttgcaagggcctcgtccagcggggtgcaggtggggctgcggaacaccagcgtatccgaaaggatggccgccagcagaaggcctgcgatctgcggcgggatctccataccgttttcgtcgtacatctgggtgatgatggtggcagtgcagcccaccggctggttgcggaagtacaccgggccgctggtctccagactgccgatgcggtggtgatcgatgatctccagaatttcggcctgatcgaagccctccacggcctgggtggcctcgttgtggtccaccaggatgatgcggcgtttttgcagattgatgatgttgcggcggctgaccatgccgcagtatttgccgtcctcgtcgaggatggggaaatagcggtggcgcaccttggccatcacgcgggtaacatcggccaccggggtgacgagggtgaacttcatgatgtcgctgcgggtcatatagtaggagatgggcgcacactggctgatcagcttaccggcggcgtaggtgtccaccggggccgacatgatggccacgcccatttcctcggcaatgcgctggatggtgcggcccaccttggagccgttgcagatgatgagcagcgacgcttctttttcaatggcgcacagctggctttcgtagcggttggtcaggatgacgatgtcgcctttttccacggtattttccagcatttcgggcgtggcggtgccgatgcggatgtggccggtggtgcacacgtcgtcctcgcggcccaccaccatggtgccgcccagcgtttccaaaatattgcggtaggtggtctggctcttggccaggatgccggtgtcgaacacgtccatgttggcggtggcaatgtccttgaccgtgatcacgccctccagctcgttgtccgggctggtgaccggcaaggtgtcgatctgcttgtcacgcatgatctcccacgccttgcgcaggctggtggagccggggatgccgggcatctcgcggtagtccacatcgcggatcttggggttcacgtccgtgcacatgcgcgggggctttaccccgaactttttgagcacgaactcggtctcctgattcattttgcctgcacggcggggctcacagaccagatcactggtcttgtttttcaactctgcataggcaatggccgagcagatggaatcggtatccgggttgcggtggccgatcacgaccaccttatgggctgcttttggcatattgttccccctttgggttctgatttaccttttatttcttatctcatttaccacagtgcactcccctctcctgcaaagcgcagtgcacctcaggtttattttagcacaattgcctgcacgggtaaagtggaacaaacacgctgcggcgcggcttttccgcctgccgcagtccttgacaggccctgcaaaaaacggtaagctttacctgaaaaaaagcacaaatggaggcatctatgaaaaaacagtttttccgcatcctctcctgctgcgtgctgctggcctgcctgtgcgccctgcccgcctacgcacaggaacccaaggccgcacagcccgccgcaaaagaggataaggtggtaacagatatcaccggttctgccgacctgatgcgcaatgtcgttggctttaccaccaactttggcgggccgtaccactttgcgcaggcagaccacaagtcccctgcgcaggcctacggtgatgcccctgccgagggagccgttgcggtgctgcggctttttgcccgcgccgatgaccacggcgatgttcccctcaacaccagcggacacagcttcctcaccatcaccaatgtctcggagcaggatatcaatgtgggcggactgctcattgcgccggatacgtccatcaccgtaagcacccgcggcaaccgctgcgagcattccggcatctggtacaatctggagggctactacaaatattacctgaacgcttcttactatcagaatctttacggcattcaggtctcactggaccagagccagctagacacggtaaatcaggcattggccaacgcagaccactggtcggccatttacaactgcacctcgttctctgcaggcctctggaatgccgtgtgctccgatacgctctgcgccggtgtgcccgagaccccggccgacctgaaagcggacatgctgaggaagtacccagacaagacggtgttcgggccgaccgtcccgtatgattatatcgtatattacggcaccagcctgacccccagtcgggaattttcctgacagaagattttctcttgtaattctgcgcgctctgctgtatgatataggtcatgtatccaagtgtatcttgtcaccgttacggaggaacctatgacagcaaccaaaacgcccgcgttccataagccgccgctgttcacccggcagcagctcattgccctgctgctgccgctgatcgcagagcaggcgctcagcgtgaccatcggtctggccgacacgctgatggtctcctcggtgggggaagccgctgtttccggcgtgagccttgtggacagcttcaacaccctgatgatccagatcatgagcgcccttgccaccggcggcgcggtggtcaccagccagtacatcggccggcaggagccaaaggatgccaagaatgcagcggcgcagatcctgttcatcctgtccagcttcagcctgctggtggccgccgttgtggtggcgggccgccatgccatcctgcgcggcatcttcggctccatcgacgtggacgtgatgcgctatgccgagacctacttcctgctctcggccctgagctacccgttcatcggcctgtacaacgccggtgcggccctgttccgggcgcagggcaacagcaagatcagcatgatgtccagccttgtaatgaatgtggtgaacattggcggcaacgccgtgctgatctacggcttcaaaatgggcgtgatgggtgccgcactggccagccttgtgtcccgcgccattgcctgcgtggctgtgctgtacctgctgcagcggcccgcctgcccgctgcgggtggacggcctgcaggcccttgccccgaaggcacggctcatccagcagatcctgcgggtgggcatccctgccggtattgaaaacggcatgttccagatcggcaagctgtccgtttccagcctgacctccactctgggcaccgccgccattgcggccaacgccgtggcaaacaccaccaccacctttttgaacatcccggccaacgccgtgggcatggctgcgctgaccgtggtgggccagtgccttggcgcaggcgaaaaagatcaggccgtgtattactcccgccgcctgatgctgtttgcctactgcggcgcatggttcatgaacctttcggccttcctgtttgccaacaaatttgcactgggcctgttcaacctctcgccggaagcctacgccatggcgctggaagtgatggtgtggttcaacatcgtttcgctgttcatctggccttccagctttaccatgcccaacatcctgcgtgcggcaggcgatgcccgctttaccatgaccgtgagcatcgtgtccatgtgggccttccgggtgggcttctgctacctgtgtgtgctggccttccacggcggcctgctggccatctggatgggcatgtatctggactgggcgttccgctccctgtgcttctttgtacgcttcgtgcgcggcaagtggctggaacagcaggtcatctgaatctttcctctgcattttataagagcctgccgcgaaggcaggctcttttttacgcaatacgcacaaataatttatttgtttttcagcaatgttgtctgctttcattcttgtttttgtcacattcccggcgtataatttcacagtgctaagagctttcacttctgcaaaaaggaggctttttcaatgaaacgcagttggttttcgcgccatccgctttgcttcatggcgctgtatctcatactttatctttccgcattcaatttcctgaacacccagatccatatgccgcacatcctcgtgcactgccggctggacgatctgattcccttctgcaaatatgcggtcatcccctattttgcatggtttccgtggatcccgttcaccctgttcttccttctgtggaaggcaccccgggaggacttctggcggctgtgtatgccgctgttcagcggtatgaccattgcgctggcctgctacgtgatcctgcccaccgggctgaatctgcgcccctgctatgtgccgggcacagacatcttcgcccgtgcggtgcggttcctgtacagcaccgacacacccatcaatgtctgcccgtccatccatgtgttcaactcggtcacgctgatgctggcctatcaccgctgccgcatctttgagcagccccggttccgctggatgcgcccggccgctgatgtgctgtgcatctccattgtatgctccaccatgctgctcaagcagcacagctgcatcgatgcagcgctgggcgctttgctggcgctggcactggataccgcgttcagccgtatgatggacaccaacgatctgccgcagatgcgccgcatctgaatctctataaaaagaaatgcgctgtcatcgggggacagcgcatcttttttgttcagaacagatcctccggcaggcagacatcctgctttggcacctttgcccaggaaaagtctttgatcaggctttccggtgtgcggggcgcaggctccggctgcaggccgtaggcgtaggcaagcttgcccacgatctcctgcgcggtatacttttcccgcaggttttccagactctggtcgccgtcgcgcttggagagccgccgcccatccggggccagcagcagcgggcagtgggcaaatcccggtgcctgcaggcccagcaggcggtacaaatacagctgccgtgccgtggacgaaagcaggtctgcaccgcgcaccacttcggtaacgcccatgcgggcatcgtccaccaccacggccaactgataggcgaacacgccatccgcccggcgcaggtagaagtcaccgcagtcatgcaaaagattttcggtgtgcgggcccatgcagccatccacaaatgtgatgtcctcgtccggcaccatcagacggtaggcaggggccttctttttgcgtttttcctcaatttcggcagcggtcaggccgcggcaggtgcccggatagaccacgttgccgtccgaggtatggggcgcgctggccgcgtgcagctgggcgcgggagcaaaaacacgggtacacaaggccgcgctcttccagctttttgtagcttgcggtgtagatctccgcgcactcactctggtaataggggccgttcggcccaccggtgctgccgccctcgtcccacgcaaggcccagccagtccagatcctgttccagcaggtcagcatagatgcgcgggcagcgctcggcatccagatcctcaatgcgcagcacgatgcgcccgccctgactttttgcgctgagccacgccagcaggctgcaggccagattgccaagatgcagccgcccgctggggctgggtgcaaagcggccggttggcggtattatctccgatttatcacaatgtgcttggttttgcattaggggatcctttcaaccgctggacgatttaaaattgccgacgcgttcgctttggcaatatcagcggaaatattatttttaaatttgtaactccgaaacgactgcggtcgtttcggagttactttttcacgggaaaggtcgtaacgggaaacggcatgttgctgctgtcggcttatcgccgtcgcgcagcgactataaatcggcggaacacaaaaaatcctttcgctctgcgcgggaagccgctttttccctattatagttgcccgtccgccaaaggtcaacagaccaccctgtccagccgccgctccaccgcctgccgcacctccggcgcgcggatgccgtacacgatctgcacatcgcagccgctttgcaccacaccgctgcagggcagggctttcagggcctgctccttgacgaaggccgggtcgttcaccgtgacacgcaggcgggtaaagcagttgtccaccgtgcggatgttctcccgcccgccaaaggctgcaatgagcttttctactccctgctcgtccagcggcagggccttttccggccgggacggctcttccgggcggcggcccggtgtgggcaggtccagcgccttgatgagcacagtgaacaccacaaaatacaccgcgatctgggcaaggcccagcagatacagcaccgggtagttcgtgcgggccgcaccagcggaaaggttcatcacaagcgaccccagaaggttcgaggtaaacgccgtgactccgcacaggtgcagcagcacgatgaagctgccggagatggctgcgtgcgccagccacaaaaccggtgccgagaagcagaacagaaaatccagcggctccgtaatggaagccagcgatgccgtaaaggccagcggcagcagctgaagggcagtctttttgcggctgccccgccgggcacagaagatgaatgccgccacaatgccaaagtagccgaaggtcttggtaaagccggtgtacatccacacgatgccatccgaaaacggcaggccgaggttatattcggtcatcatgaccacataggcaccggtataggtgacgctgcccaccataagctgaccgcccagctgcgagaactggaacggcatatacaccagatgatgcagccctgtagggatgagcagccgttccagaaagccgtacaaaaacaacccgatattgccggaagcggcaatgaagccggtgacggccgcaatggccttctggataggcggccagacaaagcaggccccagagcccagcaccgccgccagtgccgccacgcaggcaaaggaccaccgcacaccggagaacacaccgcccagaatgccgcggtgggctttttcgcaggtgcggtcatatacaaaggcggtgagcaggcccagcagaatgccgccgaacacgccggtgtccacagtctggatgcccagcaccatggtctggcctgcgctgtacaggccggtaagcgcatccggctgcgccagcaggcccaactcggtcagcgttacattgcccgctgtcaggtagacaagatagctcatcagggcgatgaacgccgcctgatgcttttcccgctttgccagcgccgccgcaagaccggtgcagaacagcacgctcagatttgaaatgaccgccgtgaggcatttgtaaatgatcctgcccgccagctgcaccggctcccaccgcaaaaagggcagcaccccggccagcggcgcgctggtaagcagtgcgcccaccaccagcagcaggcccgccgccgaaagatagctcagcggtgccagcattgcgcgggaaaaccgctccaatgcggctgtgatgcggtgcttcatgggcgtttccttcctttccggctgacgtgggcagacactatacttgtagtcaaccgatttttgcaaaaaatgtcaagaatgcaaagttcccaaaaatgcgttttttctttgtgcagggtgcatatttcccgcttgaaattcgttctgcgctgtccgattgacaaccgccgcggcagaacgtatacttagggtgtatcgttttgaagtgctgcggcccggctgcggcaccgctcaaggaggacattgctatgaaattgagatatgcccgcatcctctcgctgctgctctgcgcagcgctggcctgcagcattctggcaggctgcggcggctcaaccgccagcagttccgaagcgccaagctctgccagcagttctgcaagctccgctgcttccggcgaagacctgcctgattccaccacccgggccgacacctccggcctgaaccccggcgattttgacgagaactccatcttctccatcaccggcaccgctgccgcctttgagccttgtctgggctgggggccgggtgtttccggctgctcgctcaaatcggtgatcgcagcggcatccctgctgcagtgggcagaaaacgcccgtcttgcctcccgcaccccggaagccgtgcaggaagctttctacagctggtacgacacgctggacgctgatgagcaggaaagctttgccgaggcctggacgatgatcgagccggacgcgctgagccttttgagcgacaaggacagcatggctggccgcattgaggatgccggccttgacccggacaccctgcccggctgcaccctgaagaactggcaggccctgcagaccgtgctggacgactgcgtgcccgcagtgggtcagtgaacccaacataaaaagaagctgaccgggctggtcagcttctttttgtttttgcggaaaaggccggggccgcctgcggcatcagaccttcttcagcacatactggcgggtgcccatgccgatcttctcggcctgctccagcgtggccttccactcgatattgggattggaatccttgaagttgtcgtggtggcagttccagccgggctttgcaaggttctggcccagctggctgttcggcagcggctgtgcattcaggcaggcgtccgcgcaggcctgatccagcgccaccgggtcaaaggacgcaaagatgccgatatccggcaggatgggagcatcgttctcgcagtggcagtcgcagttggggctgatgtcctgcaccagagaaacatggaagcagggacggcctgcgcatacggcagccgcgtactcggccatcttgcggtccagcatctcattggcgctgtcgcactgagaatagatggcgtcaaagttgcaggcaccgatgcagcggccgcagcccttgcacttggtctgatcaatgacggccttgttgtttgcatcgtaggtgatggcatcggagccgcactccttcgcgcagcggtggcagccgcggcacaggctctgctgcacctccgggtgtccggcggcgtgctgtatcatcttgcctgcgcgggagccgcagcccatgccgatgttcttgagagtaccgccgaagccggtggattcgtggcccttgaaatgggtcaggctgataaagatatctgcgtccatgatggcgcggccgatctttgccgtcttgcagtattcgccgttcggcaccggcacctctgcttcatcggtgccgcgcaggccgtccgcaatgatgacctgacagccggtggtcatgggccagaagccgttcagctgggcacaggtgaggtgctccagtgcgttcttgcggctgcccggatacagggtgttgcagtcggtcagaaacggcagaccgccctgctccttgcacaggtcagccaccaccttggcgtagttggggcgcaggaatgccagattgcccagctcaccgaaatgcatcttgatggcaacgaacttgccatccatatcaatatccttgatcccggcggcgatgcacacgcggcgcagcttgtccaacaggctggtgcccacaggacagcggaaatctgtataatagaccttggatgcttccatagcagtttcctccattttgtttgcgcggcacgctgccgcatactctcttcttttgtagtatagcacatctttttgcaaagaaaaagtgctgtcgtaaaggacggcgggcacaccctccacgtcctcgcttccgggtgccagtccatccagcgcagaaagccctcgcactccgtaaaagcggcatctttaaatctggcaaagtcctgtgccctttggcagacaatggcatcgcgtcagcgctgccgcagagggcgcacccgccttggctgcatcgaaattttttgccgctcacagcaccgtaaaaaaacaaatgccgcttgccttcacgacccttcccgtgaaaaaacaaccccggaaaatccgcagattttccggggtcgtaaattataaaaataattcttccgcttaaaatcagaagattgccgtcgcagccgccactgccagcacgatgatgcccagcacgatgcggtaggcaccaaagaacttgaaatcgtggcgcttgacgtaatccatcaggaagcggatggcggcaaggctcatgccaaaggccaccacacagcccactgccagcacagccacctcggtgccggtcatcacagaaccgccgacaacgaacttgaccaccttgagcagggatgcgcccgccatgaccgggatggccagatagaaggtgaactctgccacacaggcgcgggacaggcccagcagcaggccgcccacgatggtggcaccggagcgggaggtgcccggaatgatggccagacactgccacaggccaatgatgatggcatcgcggtaggtgatctgctccagtcggctcacgtgcggcgcggcgcggcggttctccacaacaaagaacagcgcgccgtacagaatgagcatcgcggcaaccgtgatgtaattgtagaagtgagcttccatccagtcgtccagcgggctgatgatgagcaccgggatcgtggccgctaccaccttgaaccacaggctccacacgctaggcttggaaatgactctgccctgcttcatgccaaagggccacagcttgccccagaacagcaccaccacggccatgatggcacccagctggatgaccacacggaacatggacatgaactcttcgcttgcgttgaatttgatgatctgttccagcaggatcatatgaccggtggacgaaatgggaagccactcggtaatgccctccacaatgcccatcaggatggctttgatgatctcaaaaaacgtaagtacccctccttgtgcacaaaggcacagcagcttattttcttccagtataccatactatgtctctgcacgcacgcagaatgcgaaaatttttacgcccgccgccacttttgccctgcaggctgttactgcgctgggaaatgtgttatactgatgcaaagacccttttccttctattttatccgcaaatcaaaacagagtttaaacacccttggtatttttgttgaactattctacaacgaggtgaatccatatgaatattctggtgatcggctgcgaccaggtgggcgcttccctcatccgcgatctggaacgcatcggccatgatatctcgctgatcgaaaaggatcccgaacagctcaagcgtctggatgcctttgacgactacagctttggcggcacggctctggtgggcgaccccaccgacccggataccctgcggcagggcggcattgacagctgcgatgccgtggccgctgtgagcgaggacgactcggtaaacctgatggcggcacagatcgcaaaaagcatcttccgccgtgagaaggtgatctgccgcgtgtccgacccgcacctgcaggtgctgtaccacaaggcttacgagatcgacaccatctgccccacggtgctcaccgagcaatcggtgttccgcgcactggcaaagtaaaaagtgagggaagcatatgaaagtttgtatcgcaggcggcggcaaggttggtatgtacctggcccagagcctgctggcccaccgccacaaagtgaccatcattgaaccgcaggaaatgctgtgccgttcgctggccgattcgctggatatcccggtgatctgcggcgatgccatcagctttgacaccatgcgcacggccgacgttgccagctgcgatgcctttgtggccgtgaccggtgcggacgagaacaaccttgttgcctgccagatcgcaaagcgggagtttggcgtgaaccgcactgtggcccgggcctccaaccccaagaatcgcgagctgctgcacaccttaggcgtggacaccgtagtgtgcggcaccgacaacctgagccacattcttgagcgcgagatcgagacggataccatccgccagctgctctcgctgggcggcggcactgccagcctgaacgaaattttgctgccggagaacttcaagtttgcagggcaggcggtcaaggacatccccatgccgggcgatgtcattctggtgtgcatcacccgcgatgcggagttcatcatcccccacggcaacaccaccttactgccgtgggaccgcatcctctgcctgacgcaggatgacaccctgcacctgctgatggatgcctggggcctttccggcaaatgaccgaacgtgacctgctgcgcacggcgctgatcatcccgcccaagggccgggccgtgctgtgcgtctgggccgctgttcccggcgtgttctgcgcgccttttgtgttctggcagagcctgtttgccgggtgtattttctgtgccctgtgggcgtgccttgtgttcgccgcgtgggcaagagcctgcagctttaccgcagtgctcaccgcccggaacactgccgtgcgggccggtatcgccgttcccatcacacggcagcttccccgccgggctgtgactggcgtgtggaccctgcgcacgccgcttctgtggctggccgggtgcagcgtgctggtggtgcacggcccgggcgtacagctgttcctgccgggcgtggatgccctgcaggcgcaggcccttgccgctgtgctgatggaggaaacgccatgaccgaacgcggcttccacccgtttgcggtgctgcattttctgcgcaagaccattctgctgtatctgctgccgcttttgcaggtgctgtttgcccgcaactgggcggcgctgcgcacggctctggtgcagggcgcggcgctgctgacagtgcttgccgctgtgagcgccgccgtgctgcacgcaggccgctggcgggtggatgcacagggaaccctgcgggtgcgctggcggctgggcgtgcggctggaccgctgcctgaaagccaaccagctggcagcgctcaccatcgagcggcccctgctctaccggctggccggtgccagccgggtggtgctgtaccctgccgggcagaagcgcaccctgaccctgcttttgagcgcgcagaacgcgcagtttttagctgaccgcatgatgccgcgccgggatgctgtggcccacaccccgcgcggcggcgaaaagctggccttcgcggtgctgggtgccaacggcctttccactcttgctttgctggcgctggccatcaaacagagcaggccttatgcgccggatgcccagacggcggcctttgcccacctgaaccgcattgcggcgtgggcggcgcgctggctacccatgggcacagcatggctgctggtgctgggcggtgtgctgttctgcgcaagccttgtgcgcagtgcggcccatgcagcccactacaccgtgtggcgcaccgagagccatcttggcagcaggggcggctttgtgcgccggtatgagatgcgccttgcactggaacatctgagctatgcggacctgcgccgctcgcctgccacatgggcgctgggctgctgcccggtgttcgttacagcaggcagctgccagccggagatcccgttgctggtctggcgggaggacggcccttttctacaggagctgctgcccggctttgtcctgccgccaaaagccccggtggacaccgcaggccgcagcatcccggcgttttttctgcctgccggcatcccctgcgggctgtgcctgctgctgacagcggtatcccgctacaccctgcccgccctcacggtgccgcttctggtggtcactgctgtgtttgccgccctgctggtgggtgcgtacaacggctggcgcaaagagggcatctggctgcaaaacggccgcctgaccctgcgctggcagcacggcttccatctgcacgacatctgcgtgctccgccctgttccggccctgacggccatgcagtcgccgtgggccgcggcggtgcaccgcacgaacctcaccctcacctttccgggcggggtgaagtgcagggtgcgcagcgtaaagtgcagcgaattgccttttttacttttctgaaactgtaaggagtctttttctgtgataaaaactgtattattcgatctggacggcacccttctgaacaccatcgacgaccttgccgatgcgggaaactgggtgtgtgaacagcacggctggcccacctttacggtggaacagttcaagcacatggtgggcaacggcatcccgaagctggtggagcgcttttcgccggaaaatgcccgcacgccggagcagctggcggccacgctggctgaattcactgcccggtacgacgcccacaaggaggacaagacggccccttatcccggcatcccggagctgctggacgagctgcgggcacagggtgttcagtgcgcagtgttctccaacaaggccgacccgctctgcggcaagatcatcgcccactatttcggcacaggccgctttgccgctgtgcgcggcaacaggcccggcgtgcccaccaaaccgaaccccgccgggctgtatgcgctgatggacgagatcggtgcagaccgctctgccaccctttttgtgggcgacagcgatgtggacatcctcaccggacacaatgccggactgcccgccatgggcgcgctgtggggcttccggggccgtgcagaactgaccgctgccggtgcggatgcactggcagcggtgccggaggatatttttacttatatcaaaaacaactgaagacgcaaaaaggcgagccgcccattggacggctcgccttttgtgttcttcggggtaactttatcagcccagagtgacttcctggatcttggaggaagcgaactcgaagggccagacagtcttccactcctgatcctgcacctgtgcgatagcaacagaagcgtaggtgttgtcacggtagtgctttgcgccgccgatctcgtactcgggagcgaactcgatcttggagtagggcagaacgatcttgcggccgccctcgaatgcaccgtcgatggacagctctgccagagcgtcgcggacggcggcaccgtcggtggagccagccttctcgatggcggtcttgaacagccacacaacggtgtaggactcagcagagtgaccgttcatgttgacgttgtagaccttcttgaagtcctcgttgatctccacgccgttggtcaggtcggggttgaactcgacaacagaagccacgccgtttgcggatgcgcccaggttcgggatgaaggaaggatcggtgaagccgtttgccttggcaacgatcatcttgggcttgtagttctgctccttcagggtctggacgaacagagtagcgtcgccgatgtaagagtcgcacaggatggcatcgggatcagcctgcttcagagccaggacctgagaggacaggtcggtcgcgttggagctgtagtccacttcggccacaacatccagaccgtaatcgggtgcgaacaggttgacgcagcggatcagctcctgaccgatggcagccttatcggtgaagatggcgaccttcttgatctcgttgccggtctgctccttggagtcctgcagatacttcagcatatcttccacgtagacggagttcagcgggcacagacggaagaagtaatcgtagtccttgtggtcctcgtcggtcagacggtccagcgtggagatagcggtgatcatggggatgccgtactgctggcagacctgagccacgacctcggtaacaacggacatatggcagcccataatgacgttgacaccttcctgagtgatcaggcgctctgcctcagacttaccggtggctgcgtcgcctgcgtggtcgccgcggacgacttccagcatctggccgttcacgccgcctgccttgttgatctcatccactgcgaagtcgatgccgcgcaggatgttctcgccgatggctgcgttgccgccggacattgcgtagatggtaccgatcttgatggtatcaccgctggctgctgcagtgctgccggatgctgcggtgctggtagatgctgcagtgctggtggaagcggaagagccgccgcaggcggtcagagcagctgcgctgcccagaacagcggatgccttcaggaagcttctacgagagatctttttcataattgtcctccaattctgtttgtaaaaaacagcttgttaatccgagatgccccgccgcaccgtgtgaagtagtgcccgccggacatccagtttccaaaatcagatgccgaggtacgccttcttgacgtgctcgtttgccgaaagctcggcggcggttccttccagtgccacgcggccgttctcgatgacatagccgcggtcagccgctgcaagggctttggtgatatcctgctccaccagcagcaccgagatgccgtcattcttcaccatggtcttggccacttccagaatgtcgtccacgatgttgggggcaaggcccagactgggctcgtccaggatcagcagcttgggcataccgatcagcgcacgggccacggccaccatctgctgctcgccgccggacagagtgccggcagcctgctttgcgcgctcgcgcagtttggggaaccagttatagcacttttccagattttctgcaaaatgcgccttggtctccttattgaatgcacccagttccagattttccagcacggtcatctcggtaaagagctgacggccttccggcacctgcacgatgccgctgtccagaataacgcgggagcttttgccggagaggtcctccccgttgaactccaccttgccggagctggccttgaccatgcctgtgatggtgcgcaccatggtggtcttaccggcaccgttggagccaaggatggcaacgatctcgccgtccttcacctcaaagccgatgtcccacaggatgttcacagagccgtaaccggcgttcagaccttcaactttaagcacttgcgccctcctttttggtgcccaggtacacctccatgacgtaaggatcgttcatgacctgctcgggcgtgccctcagcgatcttttcgccgtggtgaaggacgatgaccttctcgcacaggctcacgaccgccttcatgatgtgctcgatgagcaggatggtgacgccggactcgttgatcttgcggatcagctggatggcctcttcggtctcagccgggttcaagcctgccatgttctcgtccagaaacagcacttcgggcttggtggccagagcgcgggccatctccagacgcttctggtccggcgtgcccatgtccttggagatcacatgacgcttttcgtacaggccggtgaagtgcagcacctccatggcgcgctccttggcctctttttcgctctttgcaccggcgtggccgaagtaggcggcggcggtgacgttatccagaacgctcaggttcttcagaggtttcatgatctggaaggtgcgggcgatcttcatgttggtgtactcatacgcctttttgttggtgatgtcctcaccattgtagaagatcttgccttcggtgggcgggtagtagccgcagatcatgttgaaggtggtggatttaccagcaccgttggggccgatcatgccggtgatggagcctttctccaccgagaaagaaacatcatgcacggcggtcagacccttgaaccgcttggtcaggccctggacttcaataataggcttttctgccatgattacttccctcccttgtctgccatcagctcatactcttccagcacgtccagagacggctttttgaggatcttttcatcgatgaaggtcttgaccttcgagttcatgtaccagcccagaataccggacggacggaagcggatgaccacgatcagcacgatggcatacatcagcatgttgatgccgggcaggatggcggcaaagtttgcacgcagcagttcgctcagcgggatcatgatgaggccgccgatcagcgggccttcgatgtaggcagcgccgcccacgactgccggcagcacgatctcagtggacttggactggatcataacatcggggtcgatgtagcggatgtagctgacgtagaagaagccgaccagaccggcaatgatagccgaaatgacaacggcaatgaccttgtacttggtggggttgatgccgatggcggcggctgcatcctcatcctcgcggatggtgcgcagcgcaaagcccagcttggagcggccgatcttcttcatgatgaggtaaacgcccaccatcatgatgaagccgatgtagtagtacggcaccttgctggtaaagcggaactgcgcaaaggagtccttgccgaagggcaggcccacaccggatgcgcggccgaaaaactccgagttgatgatgaactgacggatggactcggcaaacgcgatggacaccagcgtgaagtaggggccgcgcaggatcaggctggggaagaagatgacaccggccacaacgcccacaacgagcatatccagcacagcggccacccaggggttcatgcccgtctttgtgaccaccagacagcacacataggcacccagacccatgtaagcggccagacccagcgagttctggccggtgatgccgcccagaatgttccatgccatggacagggtggacatatagaaggtgagaacgaaaatgttgatgatgtaaggtttatccacgaccagcgggatcgctgcgaagatggcgacgatgatagccagaacgatcgccagattgcggtgataggttttaactgcttttctggtatccatcttatcgcctcctcagaatcatgacctgacgcacgaccagaatgatgatgaaggtgacgaacacgatcatatcactgtaggacgggctgatgaacaatgcactcatctgctccagcaggcccaggaaaataccggcgaagaatgcgccggggatggagcccagaccgcccacgaccacgacgatcagtgcgcggaagccgaagcttgcgcctgcggtgggatagatggtgtagaactgggtcagcagagagccggcaataccggccagagcaacgcccagaccataggtcaggatgtaaattttcttgacgttgatgcccacgacctcggcaccgatgggattctgggatacggcgcggatctgcttgccggtggtggaatacttgaggaaggcaaacagtgcaatggcaaccacgatcaggatcaggaagctgaccagacgcggcagcgcaatggtgaccgggccaagcgggatataggtctgcgaataaggggtaatgatcttataataggtggaaccaaagatgaccagagcgccgttggtgagcagcaggcccagaccgacggtgaggaacagcaggttcgtaaagctcttggtcttgagcgaaggggtgatcagagtggactggatcagcgcacccagaccgaacatgagcactgcgacgatgggaagggctacataggggtccaccccaaagtaggtatacagaacataggtgatgtacatgcccaccatcaacatttcgccgtggcagaagttgacgatgttcataacaccgaaaatgatgttctggcccatacccatcagggagtagaaaccgcccagcaggatcccgtttaccagtgcttgcaaaaagacttccattgacatcctcccgttctaagcatcaggcgatgggagcagatgatgcaaaaactgcacgctgcatccgccatcggcccgtactcgtgattgaaaaccgcccttgtggactccatttcctcccttctgctcgtacaataggatatcccagagtttttggtgtgcaagtcaatt

SEQ ID NO: 1135 - DNA, 6777 bp, Unknown
  gut microbiota DNA sequence
tggctagcattgtcaaacgcaataaccgatactgcgttgtctatacctacaaacacactaatggaacgctaaagcagaaatgggaaacctttaccgaccttgcagatgccaaaaaccgtaagaaagaggtcgaatacaaagaatccgtcggtacctttgtggcaccccagtgccgaactctaaaagacctgcttaaagaatacgtcaccctgtacggaagaaccaaatgggcactttcaacctatcaatcaaacactgcactgatttcaaactacatagaaccgcttatcggctcaatgaagctgcaagatctcaccacccgcgtaattgagggatattatcagcggctgcttaaatacgaagccgttgaccctatgtgtggaaagcgtcagcatcaatacgtttctcccggcacggttcgttcggttcacaaaattttgagaagtgcctttgagcaggctgtaaagtgggaacttatggaaaagaatccctgtatttatgccaccttgcccaaatacactgcaaagaagcgtgatatctggactgccgagaccctgttccatgccttagaagtctgtgatgatccacggctccggctttgcatcaacctctccttctcttgttccctgcgcttaggggaattgctcggtctgacatgggattgtgtggatatctcccccgaaagcattgaagccgggcgagcctccatttacataaataaggaattgcagcgtgtagatattgcttcgctgaacgccttggaaaataaaaatgtcatcactcgttttccctcgctgagttcccgctgcaccacggtccaggttctgaaaagccctaaaacagacagcagtatccgaaccatttttctccccaaaacagttgctgaaatgcttgtccactataaagccgagcaggacatgacaaaggacgcactgggtgcagagtatgcagactataatctcgtggttgccggcccgctgggaatgccgaccgaacaatccaccattaacggtgcattgaagcagctgattgaggaaaacgatctccccaaagtggttttccacagcttccgacactccagcattacatacaagctcaagctgaacggcggcgatatcaaagccgtgcagggcgattccggtcatgcacaggcttcgatggtcaccgagcagtacgcacacattctggatgatgatcggcgtttgaacgcacaacgattcgacgatttcttctatcagcatcatggtgcagagcctgaagccctccctcgcgcagagcaatccactcccaaagccagtccagtcgatacagatgcggtagcagctcttgctaaactgctggctgacctctctatggctacactcattaaaaatcttgcaaagaacctataagcctctatacataaacagcggcagttttccgtatatggaaaactgccgctatctgttttaggatgatcccgtttctttgtgttttttcgtcttagcttcctctatgtccatcttcagctgatgtgtaagctgttttacataatcgagtgaaacttcatagccttctgcgattttttctgccggcatcccatcaaggatacgggagatcacaatgttctgagtggcttgttttctcgactctgcaatcatttcctcaatagaggggcaatgtttattatgcatccaattcaagtaatccaagcgttcagcttctatccgcgatagaagcctgactgcataggaattgtcatctacctcgaagcgaacttcctctccgggtttgacttcaagtttttccagaaccgcatctgggagttttacagttccatcttcaccgactacaatattaaatttcttttccatcgcacactcctaaaatcacgcaaagttccttgcatccagtgcctttactcccgtaagaataccataagccccttccttttacaagacaatgcgcatttccattcgcactgttacatagaccagagttttctcgcagaaagctctggtctttttctattgaaaacatttgtccatcacaccagctacggctgtatggtctggttcacgaatgctaaacaagcaaatatccgtagggaaacgtacacttcccagctaatgaaaggtgggcattttacaatgaaccttccacttttcattagctctgctaattttctgctaatgaaaagccttttactcgttttatttcggggtttgtgttctttactcagattgacagcgcaacaaaaaatcaattgataaaacgttacttgttttacctacttttgcctaggatttatggcttcagcccctactcctaagcctgaggcccccggttcgaatccgggcggggacgccattttaagaaaatgcgaaggtcatttttccatgtgaaaaactatcttcgcatttttcattttgaaccgatcgccaaaattagccagcgaatgccattagcagaattttcggttccagctaataaaatcaggcttccagctaattgaggccaaaatcgccgttttctatgctttatgcaacttcacagcatgagaaaatcttttggacatacaaaaaagcgcagaaggcttcctttgagaaacaccttctgcgctttttgtttttacattgcgatccagcccagagcatttgccacagagctgatcaggataatggccgcaaagatggggcacagatactggatcatgaagttgaagatctttttacggcggaagggcttgccgcccagcgtcacctcttcttcgatcttctgcacgccgatcacgcgggacaccagcaggcagatagcaatggctgcaatgggcatcatgacagagttggtgaggaaatcgaagaaatccagaaactgcattccgaacaccgtcacgcccgccagcgggccatagcccagtgccgaaaggctgcccagcgccaccatgatcaggccgatcagtgccgttgcgcgctcgcggctccagcccagctcgtcctcaaaggtggagacagcgctctcggtcagggcaatggagctggtcacggctgcaaacagcaccagcaaaaagaacaggatgcccaccacatggccaaagcccatgctctcgaacaccttggggatggtaatgaacatcagcgccgggccggcctgcagggtgtccgggtcgccgccggagaaggagaacaccgccggaatgatcatcaggcccgccatgatggcaatggccgtgtcaaacacctccacgttctcggtggattcctcaatggagacctccttcttcatataggagccaaaggtgaccagaatgcccatagcgatggacagcgaatagaacatctggcccatggccgtgaccaccgtcatccaggaaaagtttgccacgttcggcaccagaaaatatctgacaccggccagtgcgcccgggcgcgtgaccgaatagcccgcaatgaccaccgaaagcaccaccagcaccggcatcatcaccttggaaacacgctccacgccgttgcgcacacctgcaaagatgatggccagcgtaaaggccgtgaagatcagaaagcacacctctgccgacagtccgctggaaatgaaattggaaaaataaccgtcctgcgaaagctcactgccatggccgctgatatactccgacagatagcggatgacccatccgccaatgaccgaatagtacggcacgatcagaatgggaatgaccgcattgatccagccgccgaaccgcaggccaccctttttgccaaaagctccaaaggcacccaccgggcttttgtgggtcatgcggcccagtgccgtttcggccacgatcatcgtgtagccaaaggtgacggccagcacgatgtacaccagcagaaaaatgccgccgccgtatttcgcggcgaggtacggaaaccgccagatgttgcccagacccaccgaagcgcctgcggccgacagcacaaagccgatcttgccggaaaaggcgctgcgcttttgtttttgcgtatccatgatttaattcctcttttcctatattcctatacacaagtggccttagtgtaccatatctgtccgtcaaatacaactgtcccgcctgtttgcgtgcaaaaaacaaacagcgccccgcaagggagcgctgcctgtctttataagaggtatacgcgttgagctcagaagatgctgtagcccagcagctgcggcagggcggtagtaagcgggccccacaggctgatggagatcagaacgatcacgttgcagatcacgtagggcgctgcgcccttgaagatctcgatgatgggcatacggttgatcttgttgcaggcgttcaggcacatgccgaccggcggggtgaccagaccgatggccagaccggtgatcatcatggcaccgaactgcagcggcgagaagccgtactgcaccatgaccggcagcaggatgggggtgagcagcaggatggccgggctgacatcgatgaaggtgccgatcatcaggatcagcacatcaaagatcagtgcaatggcccatgcgggcatgttcagggacatgaagaaggcacccaccgtctgcggcaccttctgcatggtcagcacccatgtaaagatggtggtaaagccgatgatgagcatgatggaggaagaagagatcagggtctttttcaaagcctcccagacacccttccatgtcagctccttgtagacgaagaagcccaccagcatggaatacagcacggccacaccggcactttcggatgcagtgcacacgccgaaggaaacgcagatgatgatgaacagcggcatgatgagggcaggaatgccagaaagcaggctcttggcggcgcgcttgccgtcaaacttgatcttttccggatgccagcccttcttggcgctgatgatgtacaccagcaccagctgggtcagaccgatcaggataccgggcacggcacctgccacgaacagcgcacccaccgatgcaccggagatcatggagtaaacgatcatgggggtggaaggcgggatgatcatgcccatggtagaggatgccaccgtgataccggcggaagcttccggcgggtagccttccttctccatggcggggatcaggatggaacccagagccgaggtatcggccacagaggagccggaaataccgccaaagatcatggaagccacgatgttcacttcgcccagaccgccgcggatgggccgcagcagctccatgcagaagttgatgatgcgctgggtgatgccgccggtgttcatcagttcgccagccagcatgaacagcggcatggcgatcatcagctcactgtaggcaccgttccacacgcgctgcggcagcatggtaataaaggtaggtgcatagatcaggatgtaagtcacacaggaagcgccgatggcgaaagccagcgggatgcccagcgcggcaaagaagatcagcagcaccagaaggatgagcattgccatagttgtgtattctcccctttccgcttatgcgtcgtcacggctcagcgcctgattcttgggcgcaaagtaggaaatatcggccttgtacagggtgatgatcttgatcacgacgcagatggcacagatgatgccgcacaccggcatgatgccgtacatatacatcatggggatctccatgccctgactgatctgcttaccggcaacgcccacatacttgaagccctgataggtgaacaccagcaccacagccagcacgatgaggtagttgatgatagccagccagcgcttgcgggcaggcttgacaccgtcgtaaaggatgtcgatcatgacgtgctcgtccttgatcacgttgatgcccatgccccagaaggtggtaaaggcaaacagggtggtgttgaactctgccagctgcttccagctcagggagaagcagtagcgcgcaataacggtaaagatcacaagagctgccagcagtgccatggcgatcacgccgatggtaaagtatatgtcaaacagcttcttgccgatttttttcagcttttcgatggtgctcagcccctttcggttattttacaactttttccatcggcctgttacagcagagggcagcccgcaggctgccctctcgcctttaccgtaacatggccgtttttgcctttggtcgtttctgcttatgcctttgcgacgatatcctgcatttccttgatctcgtcggcggtgcagatgccctcggtgacacactggtcgtacacggactgcacagcggtctggaaggccttcagctcatcggcagagggctcgtagacttcgcagccggaatccacgatggtctgctttgcggcgctggagttcttgtcgatcagctcgtcgttgtactcgcccatcttggtggcgcactcggtaatgatatcgcggtactcctcgggcaggccgttccaccatgctgcgttcacatagaaggggtccggatggaactggtagttgacctcggtgaagtacttctgcacttcatagaacttcatgccctccacgtttgcttatgtgtgataaagaagtaatagaagtgtaaaaaattttgccgttcctatccggcacttggccattgtgtcggataggtcgggcgttaggcttcgggcaagtcaatcttgccgacaaagctgtaataaatctcaatgtcctgcctgcgggtgccgttctcgtcatagctacactcatgcacgacgattttctcaatcatttcccgcaagagggtgggggtaagttcctcaaaggcaaggtgctttcggacgatacccataaacttttccgcgttgacggtggcggcctgcgacttgtccagttc

SEQ ID NO: 1136 - DNA, 33474 bp, Unknown
  gut microbiota DNA sequence
gaatatggaaagatggctgagttggtctaaggcgcacgactggaaatcgtgtaacgtgtcaaaagcgttctggggttcgaatccccatctttccgccaggaatccgaaaccttacggtttcggattttttgtttttttcagcgcttctctgttccgccttgacttttgtccgctgttccgctatgctgaataaaacatctgagggaggattttttatggcatcttccaaacgaaaaaagcacggcgcgggctatgtggtcctgatcgcagtgctcattcttgtactgcttgcagtcgtggccgctgtaaccgggtacagtctggtagcccgccgggtgaaagcgctgcaggcaggcgcggcctttacctttgattatgagatcacatccacagccgattcccctgccctttacaccatcctgcaaaagacaggctccaccaagggcaccgtcagcggcctgtatgcgccggacgcactgcagctgagcatctcggccccggatgccgttatcccggcaggcccgctcacccgggtgtatatcagcagcagcgagaccttatacgatgtcgggcagctgtacaaaaatatccgctcttccatcaccgacagctacccgctggcaagccttctgctgccggactggagccttggcagttatatctcgcaggcccagctggcaagcctgctgggtgtggacaccacagccaccagcctgcaggacatgaccgagtttgagctgccgcagaaaaagctgcagcgcgtacagccggaaaacgcaaaggacggctacctttattttcagctggataccggtgatgccagcgccaatgcaccggtacttgttatcgggctggaaaagagcaggttctttgcggatgccatcccggtgcacatcctgctcaccatcccggaacacggggtcagcatccagctcactggcaccgtgagtgcccagaccgtggtgctcactgcgcccacatcccgcatgaaggacgaagacatccagacgctggtgcagatccgcgataccatccagagcgtgctgcagttcgtgcagaccgctgccaacagcgtacagaacgcgggctgatctttccgcaaacatcaaaagccagaaacggcagcagtcgtttctggcttttgttctgtcattttaccggtcgaggatgcggccatcggtggagaaggtgactacattccacgggatgaacttgccgctgttcttcagagcagtgatggcagcgtgctccagcccgccgcagcagggcacctccatgcgcagcacggtcacgctcttgatatcattgctgcggatgatctcggtcagcttttcgctgtaatccacagcatccagcttcgggcagccgatgatggtcacatggcccctcatgaactcctcgtggatattggcgtaggcataggcggtgcagtcggcggcgatcagcagcttggcaccgtcaaagtagggcgcgttcaccggcaccagcttgatctggcaaggccactgtgccagctgggactgcatgggcactgcggctgcggcaggtgcggtctgctcacggtggaactgtctcatcatgctgcccgggcagccatggaacgccggtgcggcgggctgtgcctgctgctgggcggcagcggcctttttctgcttgttttccagcacagcctgctcgtcataagcggcggcttcgcgctcggtaaaggtgatggcaccggtggggcatccgggcaggcagtcgccaaagccgtcgcagtagtcgtcccgcatcagcttggccttgccgttcacaaggccgatggcaccctcgtggcaggcggtgacgcaggcaccgcagccgttgcatttttcttcgtctatatgaatgattttgcggatcatggaaaaatcctccttgctttgatgttctgagtatactataatcagaccgtgctttcggttgttataaccacagaaagaggatttttatgaaaaagatcgcgtcgcccctgtttcaggatctttcagaagccgagctggatacccttgccgctgccgggcacctgcgcacccggcagtttgcaaagcacgaggtcatcttccacgccggaagctgtgtgcgggagatcggcattgtgctgcgtggttccgtgcacattgaaaatctggatctctggggcaccaaaagcatcctgagcagcgtaggtgccgggcaggcctttgccgagacctacgccttttgcggcgaggccttgatggtggatgctgttgcggccgaacattgcgaaatactgttcctgcacactgccgcctttaccgatgcgcggatcgagccagcgctgaaagacaagctgctgcgccgcctgctggcggtgtccatgcgcaagaacctcagcctttcgcagcgcatcttctgcacaacgcccaagactgttcgcggacggctgctgacctatttttccgcacaggcagcacgctgcggcaggatggcgttcgaggtgcccttcaaccgccagcagatggccgactacctcaatctggaccgcagcgccctctccaaagagctgtgcaaaatgcgggacgaaggtttgctggaatttgataaaaaccgctttgttttaaagcagcttccagaataaccaaaagcgcccgccgggcagggctggacctccggcgggcgctttcattttaacaggtcaatagaacgagatcagaccgtctccttcttcttgcggggtgcgcacttgcgcttgggcttctccgcagcgggcttttcctctgcaggtgcttctgcctttacaggctctgctttttcggcagccttggcggcggtcttttttgcggcggtcttacgggcaggctttgcggacttttctgccggtgctgcggtctctgccttcccctcttctgcagcttctgccttggcggcagccgcctttttggtggtgcggggcttgcgggccgcagtcttcttggccggtgccttttctgcagcgggtgcagcttcagcggcagcctccacagcaggcgtctcggccttctttgcggcacgctttgcgcgctccttcacctcggcaatggtccacagctggtcatctgcgccggacacctcctgccagatctgcagcacggtgccaaccgcagcgcccatgccaacggtgtccacgcacttgccgccggcccaggaagagcgcaggcgcacagttccttccggggtgggctgaacggtccacatctgagaggtaccgcccacatcctcccacaggtgcagccaggtgccgttggcggtgccggtcatggtcaggtccagcagcttgccggatgcgcggttgcggatgcggtaaacgccgtcacccacgcggataaagctccactcctgctcaggcttatgctcgtacttgcccagacggacggtaccggcttccttggtgccctccacggcctgaatgacgttgccggtgtgcgcggcaatggtgtaaaagtgatcggcttcgatcacggtctgtgcaacagttttcatggtttgttcctcctatggatcgcagccgcccggctctgcccgcggctgccacttgtattttgtatgcagcctgtacagatgcacaggctcttttgtttctcttatggtaaatgataccacatatcgtgattttctacaagcaattcgaccagcctttagcaaaacagacaaaaacagtcaagctttccgtccgtttttctcccgctccatgggcatttcaggcaccattctgtaccggttcggctctcgactttttgccgcagctgcgttatactatggaacgtgcatcccgtgcgcacattcaaattatctgccgctctgctgctgggcggcttttcttgacctattccttatgataaaaggaggttctttcatgtcagcagacgagctcaacattcagcaatacaaaaaaatgaccgagacacccattccaaagctgatcctcggtcttgccgcccctaccattttaagtatgctcatcaccagcatctacaacttggccgataccttttttgtgggccagatctccaccagcgcttccggtgcggtgggcattgtttccagcctgatggccattattcaggcgcttggctttacactgggccacggctccggcaccatcatcagccgcagccttggcagccggaacactgatgccgccacccgctttgcttccaccagctttttttctgctctggccgctggcgtggtgctggccgttgtgggccttgccactctgcccagcttcatgatgctgctgggcagcaccgagaccattctgccccacgcctgcgcttatgcacgacccatcctcattgcagccccgcttatgatctccagccttgtgatgaacaacatcctgcgctatgagggcaaggcgaactttgccatgatcggccttgtgaccggcggcgtgctgaacattgtgctggaccccatctttatgttcggcttgggccttggcaccgccggtgcaggcattgctacggctctcagccaaagcatcagcttctgcatcctgctgtccatgttcctgcggggcaaaaccgtcagtcagttccgtattgctgccgtcacccgtgaagcgcgggagttcggcatgatcctggtgggcggtgctcccagctttggccgtcagggcctgcagagcatcggcggcatgctgctgaatatcgccgcccgcagctatggcgacgcagccgttgccggtatgagcatcatttcccgcattttcatgttcatcatctcggtagccattggcgttgggcagggtctgcagccggtggccgcgttcaactacggtgcgcgcaaattccgccgggtgcaaaaagccgcagtttttaccataggtgcagccttttgtatgctggtggtgctggtgagcctgtgctgggtcaacagcgatgccctcatccgcctgttccgcgacgacccggaagttaccgccgtggcgctgcccgccttccactatcagtgccttgccattctgctgcagccggtcattgtggtggcaaacatgaccttccagagcgtgggcaaagccgggcgcgccacctttctggcctgttgccgtcagggcgtgttcttcattccgctcatcctcattctgccccgcactttcggccttgtaggcgtagagatctgccagcccattgcggatgcgctcacctttattgtttccctgccgttcctgctggccttcctcaagcagctggaccggatggatgatgctgaaaaagccaaagcacagtcctgaaagtctgtcataaaactgtaatcaacagccgcgttttcctgcaatggaatgcgcggctgtttcgtattataattgaactggaaaacctttccggctttcttttaaactttgttcctttccatactgtaaggagtgatctttatgaagcgtaacgtttgccgcataggcagcgctgctgtatgcgctgccctgtgccttacccttggctgcagctgcagcgtgctgccgcccgcttccggcaagcctgctgctcctgcttcctcagtgcccaccgatgcacacggggatccgctttacgacagctcccggctggacgacggaaagctgcggatactttacggttacgacaattccggcggtgcctgcaccgttctgtgcggcagcaaggtgctgtaccagtccttccgcagcgagaacgtgaaccttctgcaggacaccgtgaccggtgagaccaactactggttccgcacctgggccgacccggacgcttattgcggacggcgcagcggcctgtttgacaaagacggcaatgaagtcatgacctttgagggggagcagaacgcctccatgcagaacggtctgctggtgctgcaggaagcccacgccgtgaacggcagctacgaaaacggctacgacgattacggcacctgtcaggtgatcgacctttccaccggcgaacgtctgcccgtgccggatggcgcataccgctgcatcgtgtgcggggacaggctggtgttcacctgctatgcccgcccagcagaccttgccgaggacgcatgggacgatgaacccgccctgcacagctgggtcattatacagacgaaggacggtacacagacttacggcgcagatgccactactgccctgagcctttcctatgcaccggacgttctgaccgactgggtggagctggacacctgccacgccagcggcgagccaacggacgaaacgctctataaccccgccaccggcgaaggcttcaccggcttccgacaggtatgcggcagcggcaccgcctgcttcgagaccagcgatggccgctacgagctgcgggatctcgccaccgtggaccgcaccctcattggcaccttcgacgaccagcccagcagctatttcccgggctatgtggtcacatggcgcacgagcggcgacttcggctatgatctgcacgaccttgttaccggtgaggtgacaccgctgtacgcttccagcgtcatgagcgacaccatcgccctttactatgaggacggacggttgaaggtgttcaacaccgaaaccggcgatttgatcaccgataccaccgtggagccagtggagggccagcaaagcgtgatgatggataacaagggtgacggctacgtctggctggagctgcgggataacgataactttgagaccaccgccacccgcgtgtacggccccgagggccttgtctccgacctgacccatctgcaggacaagtattatgccctgaactatctcatcaccacaccggagggcaggccgctgtactgtggcaacgccaatgcgcccagcagcaacggctcaatgtgtgacgtgctggatgaaaacggcaacattgtgttctatggccttggcagctgctacagctactacgacaacagcctgaaccagctgccagaacacgtgttcgttgcaaaacgcggcttttactacggctggatggatacgaacggcaaatggctttactgccaaagcatcttctcttccatcaacgccgacgatgaaatgggctactgacccaataggaggaacgccttatgaaaaatgctaaaatttcccgccgcagctttctgcttggccttgccgcctgctctgccgcaggcattctcactgcctgcaagggggatgacacccccgccagcagcgcttccacctcgccggaagcacccgcatcttccgtgagcgagcttgaacccatcgggctgtttaccgtggaagattttcccaagctggatggcagcactgcctgcatcccgctgatggcccagatgatggccgataccaccggcatcgatctggaagtagcccagagcggcatttcggtcagcaccacggcctatgcgtgggaaaacttcggcctgtacccggatgaggaatacactgccaggatgctggtggtctacgaagcgccggactacgtaaaggaagagctgaaagaagcaaacgcccagctggaacagaaacccattggccgggacgcactggtgttcatcgtgaacgagaacaatccggtcaagagcctgacccggcagcagctgaaggatatctatgccggtaagatcaccaactggaaggaagtgggcggcgaggatcttgccatcgtgcccttccagcggggcgaagactccggcagccagaccctgttccgcaagctgctcattcagggcggcgaactgatggacccgcccaccgagctggctcccgctgccatgggtgagctggtggacagcatcgccgcctacaacaacagcgccaatgccatcggcttctcggtctactactacatcgaccagatgtactcccagcccggcctgcgtctgctggccgtggacggcgtgaccccttccaacgacaccatcgccagcgaaagctacccgctgtgcaacgagttctatgccgttctccatgcggacgctgccgccgacagcccggaacgccagctttacgactggctggataccgccgccggacaggactgcatcaaaaaatccggctatgtagcggtggcacccgccactgcagcgaacagtgccgtctgatcttccagcaattgacagctttctgcatttctgttacaatattacacatgaatgttgaaactttttttgcaaaggaaggctcaatatggacaattcctcctcccatgtggaaagctgctggcgcacccagctgcgcaaccgcatcattcaggcgtccagtctgctggaaattttgctttccggccttgtgctcatcggcctgctgctcagcgctgtgccgctcatcaagtggatgcccggcctgctgtttgacggcaacgaagtggagatccgcatttttctggagcggagccttgacatcgtgatcggcatcgagttcatcaaaatgctggccaagcacagccccggcagcagtctggaagtgctgctctacgccattgcccgtcatctggtagtgggccatgactcggcagtagaaaacctgctcagcgtgggagccatcgccctgatctttattgtgcgcaagttcttctttgtgccggcctttggtgcccacctgccggacggccatccggcaccggatctttctccaaagcagagcggcatcccggcagaggagtttatctcccgtctgaaagaccgcgccaaggccgaggtggccgaggccattccttccgaagaagagacttttgacgagtacgattttgagcaggccgccccggaaccaaaataacataaacaaaaatgccccgcagcactgccggaaaaccagcaggctgcggggcattttataatgcttttattttttattgtgctttccgaagcggtactctttgccctcacggatgcgctggatattggcgcggtgcatatagatcaccatgccggacataaagccggagccaatggcgcacaccagcatatcaccggcggcatagccctgcagggaaccgtaaatgatggtcagcaccgggtagagtgctgccatggccacgctgcccagcgacaccatgccggtggggatcaggcacaccagaaagataatggccagaaacggcagcagcaccggctggatggccagaatggcaccagctgccaccagcacgcccttgccgcctttgaacccgaagtacagcgggtacagatggcccagcactgcaaagatagcggccagatagacacccagatacggcgacacaccagcatcggcgggcagcatgtgaaacagccaccggccaatgcacacggccagcacgcccttgagcacatcgcctgtcgcggtcatggcggcagccttcttgccaaaggtgcgcagcatgttggtcatgccggccgcaccgctgccatgattgcgcacatcgtcatgatatacgaatttgctgacgaggatgccggtatccacgctgcccagcaggtacgcctgcaggatggtggctgcggcgatcaggatcgctttcatcatagaaacggatgcctcctttgcgggcgcttacacgtcctttgcgcccacttcgccggagccgcgctcgcggatcaccagacggatgggagtgtgttccagaccaaagttctcgcggatctggttgatcagataccgctggtagctgaaatggaacagctgcttcgaattcacaaaggccacgaacgtgggcgggcgggtggatgcctgagtcagatagaagatcttcaggcggcggcccttgtcgctgggcggctgcatccgggctgtggcgcgggccagcatctcgttcagcacgccggtgggcacgcgggcaccgttctggctgtccacatcgcggatcagctgcatgagcttgttcacgttgtagccggtctgagccgagatgaagatgataggagcatagcccataaagctgaagcactcggcataatcgcggcgttgcagctccatggtgttggtctccttgccttccaccgcgtcccacttgttgacgacgatgatgcacgccttgccctgatcgtgggcataaccggccaccttgctgtcctgctcggtaaaaccgacggtggcatccacaaggatcagcgccacacggctgcgctccacagcggccagtgcgcgcactaccatataacgctccagaccgtcggtgatgttgctgcgcttgcgcagaccggcggtatcggtaaagatgaacttgccataagcgttgtccaccggggtgtcaatggcatcacgggtggtgcccgcctcgtttgccacgatcatgcggttctcgcccagaatgcggttggtcaggctggacttgcccacattcgggcggccgatgatggcaaccgggatgcggtcctcttccaccaccgtctcgctgaagtccagatgggcgcacacagcgtccagcaggtcgccggtgccgtggccgtgcacggacgaaatgggcatcacctcgtcaaagccgaggttgtagaactcgtacatctccatgggggcatcgcccaccttgtcgcacttgttcacggccagaatgatgggcttgtggctgcggcgcagcatgtgggccacatcctcgtccgcggcggtcaggccgtcgcgcacgtccaccaccatgatgatgcagtctgcagtgtcaatggcgatctgggcctgctcccgcatgtgagccagaatgccctcggtagcctttggctcaataccgccggtgtccaccagcaggaagtcatggccgttccactcgcagttggcaaaaatgcggtcacgggtaatgcccggcgtgtcctccacaatggcaaggcgctgaccgcacagcttgttgaacagggtggatttgcccacgttggggcggcccaccactgctacgatcggtttgctcataggggttcctcctttcttacaaccctctcaggcacagcttacgccgcgccagctcccccgaaagggggagcttttatcacttctgccgaaagatgcataaaacctcgcccttcgggagaggtggcatcgcgcagcgatgacggagagggttttcttttatgctcttcttctccttgcaatgtgcaggccgctgcgcagcagggcgcgggcttcgtcgccgccagaggtcggcagcacctccaccttcacgccaaggcgctgggccagctggtcggtggtgatgtcgtccagaaaggtgtctttttcctcccgcagcatcacggcgggcacgcccagcgtgccgctggtcagcctgccctcgcactgagcaatgatatcggtcgccgttacaagcccggccacacccacattgccgccgaagaatttgttcttgatggtgtgcaccgtcacctcgaccatggggtactggcggtgcagctcagccatcatctggcggatgagcggcgaagccatttcgcccgtgaccacgtccatctttttggtgccgtagatgcggtggggcttttccagctccgccagaaattccgaggcatacaggcgcatcatgcccacgccgttttccagctggtcgaagtcctcgtagaactcttccggcgggatgggcctgcctgccttgaggtaccattcatcactgggataaatgatgcgcttgccgtggcggcgcttgcactcatcgccgaattcttccatgatgtcgatgacttcggcgctggtctttgcatcatacggtgtctgcttgaacagcttctcgcggtagtccgtcacaccgcaaggcaccgcagcgatgctctgcaccataggggtcagctccaaaaggtcggagagggtacggcgcagttcgtcgccgtcgttgatgccgcggcacagcaccagctgacagttgacggcgatgccgccctccaccagacggggcagatacttgagcacctcgccgccgcgcttgttggctagcatccgcacacggagctgcgggttcgtggtgtgcactgaaatgttgatgggcgaaatgtgcatcttgatgatgcggtcgatctcgtggtcctgcatgttcgtcatggtgatatagttgccgaacaaaaaggaaagccgctcgtcatcgtccttgaagtaaaggctctcgcgcataccggggggcagctggtcgatgaagcagaacatgcagtggttggagcaggagtgcttctgatcgcccagataggtctggaaatcgcagccaaaggggccgcgctccgtgcgctgcacatcccactcgcggatgccgtctgccacccttgctttcaggtggaagcttttgctgtcagtgtaaaaatcgtagtccagactgtcgttcagctcgttttcgtccacgctcaaaagctcgtcacccgggccaaggcccagcacttccgcttcgctgccgggttccacccgtgcgatcttcattgccaccgcatccacctcctttcagacagaacaagaaggggaaggcatgcgccctccccttctgtacataacaccattatgccaccaattacgcgcaaattaggccttcttgatgacttcctcgcccttgtagtaaccgcagttgccacatgcctggtgggggagcttcagagagccgcagttgctgcacttgaccagtgcgggggcctccagcttccaaacattgctgcgacgcttgtcgcggcgggccttggaaagatgtctcttaggtactgccatatttttgcacctccttgatgggtttatcagttcagcagtgatttaaggattgcgagccttgtgtctacgggagcttcggcatgctctgccggctggcaggtgcattccgccttctttttgccgcacacggggcaaagcccggcgcagtcggcactgcaaagcagcaccgtggggatctggaacataaactcctgattgagccattcatctacatccagatgtcctttttcgtccagcggaaggtcaaaatccgggtcatccagatccagttcctttaccatccactccgtatcgaccgtctcctcccgaatgaccgggtccagacagcgggcgcactctccgtgcaccgatgcgtttgcccgcagtgtcatccggacctcgtcgccgtccgtctccgcttcaaaaacagcggtgaccggctgcgggatccttgccccggcataatcatgtgcagataaatcacactgaaactctgcatgatagggttgtctgccggtggcgataaactttctcaggtcaaattgcatagtacacctctaaaaggctgctttgttagtatagcgccaacacagccctttgtcaacaccaaaacaggcagaaaaccgaaaaaatttaaatttcccggttctctgcctgttcaaagtggttcagatcccgattttccggaattacaggtacttcttcacatcgtggggcagtgcagcctcgtcagcgctgacggtaacagtcaccttcacgctgtcgcctgcaatggctgccatctcgtccagcacaacgcccagacggttgatgtcatgatccagcaccttcaggatgccgtcaatgtacaggtcggtgatatcgtagttgcttgccatcaggccggcaacaaagccgtacagcatttcgccgccggagatcttgtactcgtccagatcgatcagacgtgcagcaggagcgatgtcgtaggtgagcttcatgcccttttcaacgacgaccacgttgcccttggaggtcttgaccgcatcattgatctggtcgatcatagccttggtcttgccggagcccttggtaccaacaatcagtttaatcatagttcagtcctcctgtattttccacgccttgcggcgggagatcatttttatttacttcagctttgcttccagctcggcggtcaggccttcgtagcccggcttgcccagcagagcaaacatattctttttatagctctcaacgcccggctgattgaagggattgacgctgagcagataaccgctgcaggcacatgcacgccagaagaagtagatcaggtagcccacattataagcggtcaggtcgtccacctcgatcagcacttcgggcacgccgccgtcggtgtgggcgaggatggtaccctccatggccttgcgattgacaatgctcatgttctggtttgccaggaagttcaggccgtcaaagttgccttccagcgggtcgatgaacagatcctgtgcaggcttcttcacgtccacgatggtctcgaacatggtgcgggagccttcctgaatgaactgacccatggagtgcagatcggtggagaagatgcagcttgcggggaacaggcccttgttgtccttgccctcgctctcgccgaacagctgcttgtaccactcgttcatcagggcgaagtccggctcgtagcactccagaatttcaacgctcttgcccttgcggtacaggatgttgcggatggcagcatacttgtaagcgtcgttgtccttgctcagaacggagaaacgctccatggaatcggcagcgcccttcatcaggtcgtcgatgctgataccggcagcagcaatgggcagcaggcccacagcgctcagcacggagtagcggccgcccacgtcgtcggggaccacgaaggtgggccagccctgtgcgtcggccagctgcttcagggtgcccttggcacggtcggtggtggcgtagatgcgcttgttggcttcttccacgcccatctccttttccagcagttcacgcagcacgcggaatgccagagaagtctcggtggtagtgccggacttggaaatgacgttgatggagaagcgcttgcccttgcacaggctgatgatgttgttcaggtaggtggggctgatgctgttgccgcagaagtagatcttggggccattttccagctcgttgtggaactggcccttgacggcctcgatgacagcgcgtgcgcccagatagctgccgccaatgccggccaccaccagcacatcggaatcctcgcggatctttgcggcggcttccttgatgcgggcgaactcttccttatcataatcacggggcagatacatccagccgaggaaatcattgcccgggccggactttgcttccagctggttatgggcagcttccacctgcggatagatggctgcatattcctcttcgctgataaagctggagaggtgttttgtgttcagtgcgacgctcattttattataacctccaaacgatttgccgggcctttgccctgcgaggaaatatcttggtataagtgtaccgttccctccgggcaaagtcaaggtcaaaatccttggatttcatacaattttaatagtgtttttttgtttcttcatccagaattgttcacacagacagttccacgcagcttaccgcagcgcgcttttgtacgctgaagcgtgcattcagctttcgcagccggtcaaagcgtcccacaacaggccgaatgcggtgccaaagtccattttttcagcatcggcagcggcgcgcacctcgtactcgcccagttgggtctccctgctcaggatgcgcaccgtgccaacggtctggcccagctgcaccggtgcttccagttcctgcggcagatccagctgcgcggtgagggcggcggcgttttccttgggcatcagcagcgtttcgggcagagcggtgtagtccagcggcacgctttcctctgcgctgccctttacttttataagaagaggccggtcctccatggcgggcagcggcacggcggcgtaggccgcaaagccgtagtccagcagggtggtggccgctgtgaaccgctccgagctggagagtgaccccagcaccacggcgatgaggtccagcccgtcgcgggtggcgctggcgctgatgcacacgcccgcgccgctggtggtgccggttttcaggccggtgatgccgttgtagcgcttgagcagcttgttggtgttcaccagctgggtggcaccgccgcgcagggtgtccgtccagatgccggtatagtgcagcacctccgggcaggtgttcaaaatctcgcggctcatgatggcaacatcgtgggcggtggaaagatgcccttcggtgtccagcccgcaggcattgtggaaggtggtgttcaccatgcccagctctgctgcacgggcgttcatcatctgcacaaagcccggctcgctgccgcccaccagctctgccacagccacagcggcatcattggcagaggacacacaaatggctttgatcatctcgtccagcgtgaactgctcccccggctccagccagatctgactgccgcccatgtggtaggcgtgttcacttactggcaccagcgtgtccatggcaatgcggccgtcgtgcacggcttcaaaggtgagcagcagggtcattaccttggtaatggatgcaatgggcatctgctggtcggcgttcttttcatataatatggtgcccgtctgctggtcgatcaggcaggcggcgcggcagggcagctccaaggcaggctgtgccgccgcgggctgcacaggctgggtctggtctgcagctgcctgcaccgccgggctttgctgccgcagcccattgccctgcgccgtgccaaaggccagtgcaaacagccagaagcacaccacccctgcacacaaaagcgccaagtttttccgctccatttcggtccctccctgcgcaatgtctcttgctgagagagtatgcaggggcctttttgtttagaatatcctgcgcccgcaccgcagcctgcattttttattttgtctttttctacaaaagggcttgacttttgcccaccttatagtgtaaattggagatggcccaaaaaggccgtattgctttaatttgtggaattactttttaggaggatactattatgattctgtctcgtcgttctttcctgaagatggctggtctgaccgttgttgctgctgcaggtgcttccatgttcaccggctgtggcctgaccaccttcacccccgtcaagttcgttgctggtgatccggcagaagttaccaccactttcatcaatgcaaccaaggatctgaacgtcctgctgtggcccggcgacgcttacaagaatgccgataagtgtaagaagaatgttgctacccagatgaccacctactatcacatcgacatcagcggcattgagtttgacaccgttgagtacaaggaagccactgaggaggctgccgctcacgtggagatcactgtcaaagccaagacccagcactaatcccaccaaagttctctttgagagacgggcgtttgcccgtctctttttgttttgcctgctttccagcaaaaaagtgcctgctgctgtgcatccggtcttgcgccgcaccgccgctgtgatatataataaagagcaatgcaaacaccaccccgttttttgtcgaaaggatatcccctcatgcgagtttgtttttatacccttggctgcaaggtcaacctgaacgagaccggcgcgctggaacagatgttccgcgccaacggctttaccattgcgcaggagaacgagcctgcggatgtttttgtggtgaacagctgcaccgtgaccaactttggcgaccagaaaagccgcaagtggctgcgccgcaaaaagcgcgagaaccccggcgcggtcacggtgcttaccggctgctacccgcaggctttcccggaggaagccgcccagttcaccgaggccgaccttgtgtgcggcaacggcgaccgcaaggccattttagataacgttctcaagctgctggacggccacgagcgcattgtggccatcacgccccaccagcgcggcgaaaaatttgaagagctgcccgtagagcggttcgagacccacacccgtgcctttatcaaggtagaggacggctgcaaccgccagtgcgcctactgcgtcatcccccgcgcccgcggcccggtgcgcagccgcgacgaagccagcatccttgccgagctgcgccagctggcggcttccggctaccgcgaggtggtgctcagtgccatctccctgcccagctatggtctggataccggcaccaaccttgtggagctagtggagcactgtgctcaggtggagggcatccagcgcatccgtctgggtagtctggacccggatatgctcacgccggagttcatcacccgccttgccgccgtggaaaagctctgcccgcagttccacctgagcctgcagagcggttgcactgccaccctgcgccggatgcgccgcgtttacactgccgagcagtatgcacaggtggtggaccagctgcgcgccgcctacggggagcgcccgctcagctttaccaccgactgcatctgcggctttcccggcgagacgcaggccgattttgaagagagctgcgaatttttgaaaaagatcggctttctcaaggtacatgtgttcccctactcccgccgcagcggcaccccggcctacgattttccggagcaggtgcacgagcgggaaaagcaggagcgcagccgcgtgatgaacggcattgccgaggaggtacgccgcgaagtgctgaccgcctatgtgggcaccgaggacgatgtgctgctggagaccccgctttccggcacgctgttcaccggctacacccggctgtacattccggtggtggtgtccgcccccggccacgaaagcgggcagatcgtgcacgtaacgcttggcgagtacgacggcgagcgtgtgcgtgcagcactttgctgagtttacgcgcttaaaactgttgattctgtacacgaggacgaatacaacaaatttttaacaaattttgcgttttatcccttttcatccggcacgctttatgctaaaatgaaagtggatcatcccgggcacagcgctgtttgcagcagtgcgttaccaatgtgccctgtaacgcgcccgccctgcgcggcagaacgctgtcggcagccgggtgcagcccgtttgtttttagcaaagcaaggagagaattggaatgagtttcagaggaatcaataccacggtcatccagatccgccgtcaggtgttcaccgaggtggcacgcatggcttacgccaacgtcaagggcgagcaggccaaccacctgatgcgcaagatcccctacaccatcatccccggcgaggaaggcaagctgcgcaaggacatcttcctggagcgcgccatcgttgaggagcgcgtgcgtctggccatgggcctgcccacccgccgcatggacgagcacaacagcgtcgtctccggtctggaggatgcttccatcgccgataagtattatgatcccccgctggtgaacgtgatcaagtttgcctgcaaccgctgcccggaaaagctggtcaaggtctccgacctgtgtcagggctgccttgcccacccctgtatggaagtgtgccccaagaaggccatcacatgggagagcggccgttccatcatcgatcaggacaagtgcatcaagtgcggccgctgcgtcggcgtgtgcccctacaacgccatcgtcaagaccgagcgtccctgcgctgcagcctgcggcatgggtgccatccactccgatgagctgggccgtgccgagatcgattacagcaagtgcgtttcctgcggccagtgtctggtcaactgccccttcggtgccattgccgacaagggccagatctatcagctgatccagggcttcaaccgcggcgaccgcatctacgcgctggtggctcccgccttcatcaaccagttcccgggtctggcttccaccggcaagctcaaggccgccctgaaggccgtcggcttctacgatgtggtggaggttgccattggtgccgacctgtgcaccgtggacgaagcacacgacttcctggaggaagtgcccgggaagctcaacttcatggcaacttcctgctgcccggcatggagcatgatggcaaagaccgctttcccggatcttgccaagaatatctccatgaccatgacccccatggtgttcaccgcccgcatgatgaagcagaaggaccccaaggcccgtatgtgcttcattggaccctgcgccgcaaagaagctggaagcttcccgccgcaccgtccgctccgatgtggacttcgtgctcacctttgaagagctggccggtatcatcgaggccaaggatgtggacaccagcctgctggaagtggacgaggccgaagctctgcacgctgcatccgcagcaggccgcggctttgcacagtccggcggcgttgccaaggctgttgccgataagatcaaggaatggcacccggatatggatgtcaagatcgcatctgcacagggccttgccgaatgcaagaagctgctcatgctggccaaggccggcaagtacaacggctacctgctggaaggcatgggctgcccgggcggctgcatcggcggcgcaggcaccattgccgaccctgcacgcacggccatccagctgaacaagtacgtcaaggaagctcccttcgccgacccggagcagagcccctttatgagcgagatccacgtgctgaaggacgaccccgactttgaactttaagcgctgatttttcaagaaccgcttctcctgccggaggggcggttcttcgtcatcttcgcctaccatattttatcaatgtgcaacatttctgtgaaagcttcacgaagcggattgacaattttgcacagccatgctattttagcattgacaaaccggtattaccgcaattgttcaacgccgcctctgtggcaggaaaggcagatcattcatgacgaacacttataagcgcgtaagcgccgccctgctctcggtgctgctgctgtgcatgttcacctttggtgcaagcgctgcttccagcctgaacgtaggcattaaattctggaaagaaaaatccgataaggaatccatggccaacaccggcatcgatgccagccgtgatgtcaccctcacccgccagtccaacggcacctacacgctcaccctgcccatccagcaggtaagcaagatgggtgtcaccggctgtctgtccggcctgaccattggtgatgtgacctacaccggcaccgtctccggcgatgttgccaagggcaccggcgtgctcaccatcaagaacatgcccgcctcggtgctgaccggcagcgatgtgaacaaggcactcaccgttacctgcaacattcagatggatctgagcgtgctgggcgagatcaacacctcggcccgcatgtgcatctggaacaagtaagctttttcaagcaaagaacggcgttccccaccggaacgccgttctttgcttttatcactccatgtgcttttccacaaagtcgccaaccattttgtccagctgcagcacagcgttctcggcacccttcatcaccttgcgggtggtgcggcgcagctggcgctggttctgggtggcggccatcacgcccacggcacccagtgccgcccccgcggccatgccaagcagcatcccggaagaactggtggattcatgtttcatagtaaaactcctttcggtgaaaaagatccggtctccggcgttattatttcctgtaaactatctggtatccgctttttttatgcagaaatttgtggtatactgttctacgatgttttaatgggcgggtgtgcccggctaaaaagtgcactgctcattccgcatactggtaaggaggttccttatttgatacaccctgttgaacccaaaaaagtcctttgcatccacgatctttccggcatgggccgctgcagccttgcagtgatcctgccggtgctgtcggtcatgggcgtgcagccggtagccctgcccacggtggtgctttccacccacacaggcgggcttggcacacctgcacggctggacggctgcgcctacggcgaacaggcgctggagcattaccatgcgcttggcgtggagtttgactgcatctataccggctatctgggcggtgaggatcaggtggcactggccgaaaaagcctttgccctctggcccgcagccaaaaagatcgttgacccggtcatgggcgacaacggcaaggcttactccaccgtaacgcctgctttgatcgaccgcatccgtgcactgtgcggtgctgccgatctgatcctgcccaactacaccgaggcacagatcctgctgcagcgccagccgcagaccgagctgctcaccgatgaagccgcacaggctctggctgacgagctgaccactctggcccccggggctgtcgtcaccggcctgccgctgggcaaatacatcggctgtgcaggcagcggaaaagaccgcttcctcatcaaaaagctgcacatcagccgcagctttcccggcaccggcgacctgtacggtgcggtgctcatcggctcgctgctgcagggcaacgccctgagtgccgccgccgacaacgctgccgagttcgtggcgctttccatccagaacacgcccgccgcgcaggatacccgctacggggtctggttcgagccgcttctgccgcgcctgtgcccggcaggctcggcagaataaggggaggtacaccgatgaacgaaaagccaaccttgaacatcgttctggtggagccgcgcatcccgcagaacaccggcaatgtggcccgcacctgtgcctgcactgcctgtcggctgcatctggtaggccccatgggctttgccatcgatgataaaaagctcaagcatgcgggtctggattactggcactacctcgacatcagctattacgacagtctggacgagttctttgccaaaaacagcggcccctattactattttaccaccaaggcaccgcagcgctacaccgatgtgagctacccggacggtgcatacctcgtgttcggacgcgaggatgccggcctgcccgaagccttgcttgccgccaatcaggagcactgcatccgaatgcccatgcgcgacacctgccgcagcctgaacctttccaacagcgtggccgtgggcgtgtatgaagtgctgcgccagtgggactttccggagcttttggaccacggacacttacgagactacgaatggaaatgagggacattatgagcaagattgcgatcctgaccgattcctcctgcgatatcccgcaggagatggccgaaaaatacggcatcgacatcatgagcttccacatcctgctggacaatgtggactacgtggagcgtgaaagctgcaccaacaccgaattttacgataagatgcgtgccgctaagggcgtgccctccactgccgccatcacccccatccagttctgcgaaaaatactgccagtacgtggacgagggctatacggatgtcattcatgtacccatcaacaaatccggctcttccacctacaataacgccctcatggcacaggggatgctgcgggaagagcgcccagagcaccacttgaagatccatctgctggacccccacacctattccatggtgttcggctggtatctgtgcgaaatggcccgcaagctgaagaacggtgcagagatcagccatgtgatccgggagtttgaaaagcagatggactgcatggagatcgttctgggcccctacagcctgaagcagatgaaaaagagcggacgcatctctgccgctgctgctgttatgggcgagctgatgggcattcgtcccatcatcaccctgatcgacggcaagaccaaggtggaagccaaggtacgcggcgatgacaaggtggtgcccgccatggtggagctgtgcaaacagcgcagcgaaggcgtggagaactttgattatatgattggccacaccaacatcccgcagaccgccgatctggaaaaggcctgccgcaaggcctttggcaagccgccgctgctggtgtttgagctgggcggtgtcgtttccgcaaacaccggccccgacacggtggctctggtatacaccggacaccccagagggtaacacacgattttaatagcctccgctttcgctctggctatttcagcggtaattttatttttattttgaggttccgaaaagcctgcgggcttttcggaacctctttttcaccggaagggtccaaaccaaaaactgcatctgtacctgattctgcgaaaattcgttgcaatctgccaaaaattatgctatactgccttttgctgtgctttttgtgcggcatcctttcagagcaacttaggattttaggctccccggcgtgtctcgaaccatgccgggccaaacccacaggggctggcggccctgtgcggtcaaaatcatcccgctggagtattatcatgaatcagaatccttccgtccgtaaactggtgcgctgcggcgtggtcgcagccatttatgttgttctctgcatggctctgcagccgctctcctatggtgcggtacaggtgcgtgtggctgaggcgctctgcctgctgccggtgttcggtgctgagtacattgccggtgtggtactgggctgctttttggcgaacctgctgggctccaccatcgtggatgtcatctttggcacccttgccaccctgctggcctgccttgtcacctacaagctgcggaacatccgcatcaagggtctggctgtggcggcttccctgccgccggtgctgttcaatgccgtgatcatcggcattgagatcgccgtcatgttcccggaccccacctccagcgctcccatctggctggcctgcatcaccaacggcatctccgtaggtatcggcgagctcatcagctgcaccgttctgggtgtgctgctggtgaagatcatcgagagcagcaaggccctgcgcaaaatttttgcagcttaatgaccgcaaggaggtttccatgcaggcaaacggaatgatcttctgggactggaacggcactttgatggatgatgttgatttcacccacagctgtctcaactggatgctggagacccacggttatccgcagcggtacgatcttgccgcttaccgggaaattttcggttttcccattgaggaatactacatccgcgccggtttcaactttgcaaagcacccttatgcagagctggccgagcgctttatggaacattataacgcaggtgtggatgcctgtcccccctctgcacacgctgccgagacgctggccgaactttcgcgccagggctggcggcagagcgtgctttccgcctcccgccgggactacctgatcgagcaggtagccgcacggggcctgcagggctattttactgagttgctcggccttgcagacatctatggcgtaagcaaagtgcaggtgggcaaacagtggcttgcacaaagcggcatcgcccctgctgcctgcgtaatggtcggcgatactcagcacgacgccgaagttgcaaaggcccttggcacaaaatgcgtgctctacaccggcggccaccagtcccgcgcgcggctcgaggctgtgtgcccgaatgtcatcgacgatctggcacagctgccgcagctgctggaaaccttataatgtacatctgaccacttctgatttgcaaaaatcagaggtgttttttgttttagctggctcgccctctcagtctcgcattcgctcgccagctcccccaatgggggagcctctggcgaaaccggaaactttgcgtggattgccaactttgggggagctggatgcgaccagcgggagcagacggagaggacgaggctgttcgcctccacaacatatcttttccttttatgaacccccttccagcgcaaatttacagaaaattcattcaaaaaccggctaaaataaccttgcaggtttgacgcgtctgccgctttggtgtatcatatatgtgtgtatttatgtctatctccgggaagcattttcccgaatttgatctatgaggtgttaccaatgtcccttgttgaaaaactctttggcagcttctcggaccgggagctgaaaaagatcaaccccattgccaagcaggtgctggctctggaagaaaaatatgccgccatgccggatgccgacctgcaggcacagaccgctgtgttcaagcagcagctggccgacggcaagaccaccgatgatatcctgcccgatgcctttgccgtctgccgcgaggccgcatggcgcgtgctgggcatgaagcacttccctgtgcaggtcatcggcggcattgccctgcaccgcggcgatatttccgagatgcagaccggtgaaggcaagactcttgtggctaccctgcccgcctacctgaatgccctcaccggtgagggcgtgcatgttgtcaccgtcaacgattaccttgccaagcgcgacagcgagtggatgggcaagctctaccgctggctgggcctttctgtcggcctgatcgcacagggcatggacggcgatgcacgccgcgccgcctatgctgccgacatcacctacggtaccaacaacgagttcggcttcgactacctgcgcgacaacatggtgacctataaggccaacatggtgcagcgcggccacgcctatgccatcgtcgatgaagtggactccatcctgatcgatgaagcccgcacgcccctgatcatttccggccgcggcgaggattcctccagcctgtacacacaggtggaccgctttgtgcgcaccctgcgcaagagcgtggtggtagagctggaggataaagtctctaccgacgagcagaccgacggtgattacgtcgtggacgaaaagcacaagacctgcaccctgactgccagcggcatcaagaaagcggaagcctacttcaaggtcgaaaaccttgccgccgccgagaacatgacccttgcccatcacatcgatcaggccatcaaggcttacggcgtgatgcagcgggacatcgattacgtggtcaaggatggtcaggtcatcatcgtggacgagttcaccggccgtctgatgatcggccgccgctacaacgaaggcctgcatcaggccatcgaagccaaggagggcgtgaagatcgccgccgagagcaaaacgctggctaccatcaccttccagaactacttccgcatgtacaaaaagctgtccggtatgaccggtaccgccaagacagaagccaccgagttcaccgagatctacggcctgaacatcgttacggtgcccaccaaccgcccccgtcagcgcatcgattatccggatgccatctacaagacggtcaacggcaaatacaatgccgttatccagcaggtgctggaatgccaccagaagggccagcccgtgctggtgggtacggtcagcgtggaaaagagtgagacccttgccaagatgctgcagaagtacacccgcgacttcaacgtgctgaacgcaaagaaccacgagcgtgaagccgagatcgtggcgcaggccggcaaaaagggtgccattaccattgccaccaacatggcaggccgtggtaccgatatcatgctgggcggcaacgccgagttcatggccaaggcccagatgcgcaaggaacacttctgcgaaaacctgctgaacccggaaaagcccgaggatgccgacccggctgcagtggaaatgctgctgaccgaagccaacggccacggcgataccgaggatgccaacatccttgctgcccgcaagcgcttcgatgagctgtacgcccagtgcaagccccagatcgatgccgaagctgagcaggtgcgcgctgcaggcggcctgttcatcatcggcaccgaacgccacgagagccgccgcatcgacaaccagctgcgcggccgtgccggccgtcagggcgacccgggtgcttcccgcttctacctgagcctggaagatgacctgatgcgcctgttcggcggcgaccgcgtctccagcctgatggataccctcaagatcgatgaggacactcccatcgagaaccgcatgatcaccaacacgctggaaagcgcccagaaaaagctggaaggccgcaacttcgagatccgcaagaacgtgctgaagtacgacgacgtgatgaaccagcagcgcgagatcatctatggtcagcgccgcaaggtgctggatggcgaggatatcagcaccgaaatgcacaagatgctgcgcgagaacatcgattccagctgcgaccagttcctggccggtgatgtgaaggacgactgggactttggtgccctgcgccgccactatctgggttggctgaccaccgaggaagacctccactacaccgtggccgactttgacgatatctcccgcaagggcattgccgaccagctctatgaccgcggcatgaagatcctcgccgacaaggagcagcgttacggtactcccatcatgcgtgagctggagcgcatctgcctgctcaagtgcgtggaccgcatgtggatggaccacatcgacaacatggaccagctgcgtcagggcattgcgctgcgcggctacggccagaaggaccccgttgtggagtaccgcatcgagggctttgacatgttcgaccagatggtggattccatccgtgagtccagtgtgaagatgctgctgaccatcgagatccgtcaggccggtgctgcccccaagcgtgagcaggtggcaaagcccaccggcgaaggctttgtgcccggcaacggtgcacccggtgccaagggtgcaccccacggccagcctgtgcgtgtcatcaaaattggccgcaacgacccctgcccctgcggcagcggcctgaagtggaaaaagtgcacctgcgccaagtaccacccggaaggcacatcgacgaacgaaaactaagtaaaaaacctctcaggctctgccataaggcagggtctgggaggtttttgataaaatagagggagttgattttggaatgatcacaccagaaaaactgctcgaatccgcaaaggagctggaaacccagctgcgcacatggcggcgcaccctgcaccgccacccggaggtaggctttgacctgcccgagacaaaagcactggtcaaaaaagccctgaccgagatgggctacaccccgcaggactgcggcaagtgcggcgtactcgcgctagcgggcggcaagcgccccggcaagaccatcctgctgcgcggtgacatggacgccctgcccattcaggaagaatccggtgaggagtttgcttccgagatcccgggccggatgcacggctgcggccacgatatgcacaccgccatgatgctgggtgcggcaaagctgctcaaagaacacgaggacgagatcgagggcaccatcaagctggaattccagcctgcagaggagatctttcagggttcgctggacatgctgaaaaacggcctgctggaaaacccgaaggtggatgccgcggtcatgttccatgttctggccgggatgcccctgcccgttggcaccgtgctggtgccgggcggcggcatcaccatggcaagctgtgagcagtaccacatcaccgtacacggcaagggcggccatggctccatgcccaacgcctgcatcgaccccatcaccgcagcggcccacatccacattgccctacaggagatcaacagccgtgagctggatcccgccaagtttggcgtattcaccacgggccggtttgaagctggcaaggcatccaacgtcatcccggattctgccgatatgtggggcactatccgcacggtggaccccgaaggtgccgtgagcgagcagatccaccagcgcatgaccgagatcgcgcagggcgtggcggcagcctatcgctgcactgctgatgtggagttcagcgaccactgcccctgcatggtggtggatacgcctcttgccaagaatgccctgacctatatgaccgaactgctgagccgtggtgccatggatatgaccgtcctcaccggcggcaagcccggcggcggcagcgaggactttgcctttgtcagccacgaagtgcccaccgtaagcatgtttctctccgcaggcaacgccaaggagggctatgtttacggccagcaccaccccaaggtacgctttgacgacagcgtgctgtacgtgggctctgcagcctatgtttatatggctctgcggtggctgagcgaccacaaggcataaccattcggaaaatttatcatttatttgaacctccgaaaaatctgcggattttccggaggttctttttcacggatgggttcggagcagcacactgcatctcttaaaaaaacgcctttataaacaaaaaatcccggaaggttcgcaccctccggggtcttttttatatcagttttgcccccgcatggggcaggctgtcggcaccaaggctctgcagtctctgcggcagggcggcgaggtcgccgccggtataataccacgcagcggcaaacgcggccagtgccagaatcagcagaaaaatcagggcattccgcaccctgtgccgtttgcgcggcgctgctatcggtgcatccggctccggcttgtccggcaggcgctgcgccgtcagggcatctgccggaatggccctgccatacttctgccagatcgttcccgccgcctgcggcagaccggaagccgcccggcggatcatatccagcagccacaaagcaggcgtatctgcattggccaccgtgcgcacccagcagcctttccggctgcccagaaacagcaccgtgtcctcggcgcgctccagacacccggctgcatagtctgcacccacaaggcgctgcgctgcccgcacacgggtaagttttgccggcaccggcccgcccttgacccggcagacctttgcgctcagcttttcccgcacctttgcatcggcatagctcatggctccaaaatcaaacactttttctgcgccggccaccgtttccatccgggcttccagcagagtgcctgcatccgcatcacagcataccagcagcctgtggtgcgtttccagcgcctgcaccgctgcatgaacaagggtcatctccccttctccatagagctctgccgcaaagcggccgttcagggccttgcgggccttttccagcccggcaggcgtttcggcctgcagcgcagccagtgtttctgcaccgcggctgcggcactgggcagcaagtcctgtctgctgcactgcctgttgtactgcccacagcggtgcgccaaacaaccgcagcacacaggtggtctgcgttttttcttcgtgtatcaactgcttcacccccgcggcccggggccgctcgtattaacccttgaggaaggtgctgtccagtgccgtcagagccgcagcatcatgccgggcgctttttgccagtgcctgtgtatctgcaggaactttgccctgagccagacgcagcgccagttccagtgccgcctgtgccgcgcgggcacgcaccagcgcacggtcggggcgggagacgaagagcttttttacatagacggtctcaccgcaggccgcacccagatacaccgtgcccaccgggcggacggcatcgccgccgttggggccggccagaccggtgacgctgacagcgatatcggccccggcagcttcggctgcgcccagtgccatctgtgctgccaccggtgcggacaccacattgtactttgcgatcgccgccgggtctacgccgatcatctttgccttggcctgctcccagtaggtaacaaagccgaagccgaacacctcacttgcaccggacacattggtcagccgctgggcgatcatgccgccggtgcagctttctgccgtggcaatggtgagcccctttttcttcagggtgtgcaccagagtctcttccagaccggtcacatcctcatcatacaccgcatcacccagcagatcatagaactttgtggcgtatgcgcggcacattttttcggctgaactgtcggtttctgcccgggcagtaatgcggatctcgcactcgccggtcttgcagtagatggcggcggtgggatttgcgttttccagcagatgccgcacacggtattcgatatcgctttcgccgcccagcacccgcagcgtgatggaatgcagggtgcagttctggcgggccagcagcagcgggcacacgctctcctcccacatggccttcatttcgtgaggcacgccgggcatgagcacagcacagtggccatcctgctcgaaccatgccccgggggcagtgccgtggttattgatgatcttgtggccgttcaccggcaccatggcctgcttgcggttgtttggggtcgtcttgcgcccggtacgagtgaagaaatccacgatcttctgccattcttccgggtcaaaagccagcgtatcaccgtagcatccagcaaccgtctccttggtcaggtcgtccgccgtggggccaaggccgccggtgaacaccagcaggtcgcaccgctgttttgcttcgttgacaaaatctgccagacggtcgtggttgtcgccgatggtgctctcgcgctggacggtgatgcccagagccgccagctcccggctgaggtactgggcgttggtgttgagaatgttgccgagcagcagctcggtgcccacactgatgatctctgctgtcatggctttcacccctcaaattcgacctgatcggtgatacggatgcggatgcgctcggcgctctctgctgcttcggcttccagcgcggcaaggccgggcatggcggcttcggcttccagaatttcttccagttccgggcggatcttcgggtgcggcggggtgaagatggtgcagcagtcctcgtagggcaggatgctggtctcaaaggtgttgatgtggcgtgccgtctccacgatctcggtcttgtccatgccgatgagcgggcgcaggatgggcagatcctgcgcagcatcggtgcactgcagggccttgacggtctggctggctacctgagccagactctcgccggtaacaagggcttcgcagccctgcttcttggcaataacgttggcaatgcgcatcatgctgcggcgcatcagcaccgtgaacagcacatccggagcattatcccggatgtactcctgcggcttggtgtagggcacgacgaacagattggagctgcccgtatagatgctggtgagctgcgccagagcttttaccttgagctttgcgcgctccgaagtgtacggcggagacgcaaagtggatgtggtccagtgccagaccgcgctttgccatgcggtaagccgccacgggactgtcgatgccgccagacagcatgttcaatgcacggccgctggtgcccacgggcagaccgccctcgccgggcactttggggccgtggatgtaggcgccgtaatcacgaatttctacgatcaccttgaaatccgggttatgcacatccaccttgaggtagttgtgtttgcccagcagataggcacccagctcccgcatcagttcagggctggtcatggggtaggtcttgtcggagcggcgcgcctccaccttgaaggtgcggatgccgtgcaggctggcgccgaggtaatcctcagcggtctggcagatggtgtcaaagtccttgtcgcagaccacggcgcggctgagcgccgcaaggccgaacaccttgctcacccggtcaaaggcgaggtccatatccacgtcctcttcctcaggctccatgtaaaaggtggactgggtgcagtagaccttgaacttgcccacggtcttgagccggtagcgcagaattttcatcatcgccgactcgaattggttgcggttgaggcctttcagggacatttcaccctgatagcccataatgatttcatgcataaatgttgtatctcctgatcgtaggatttgtaatagataacttttgagggaccccaagtcaccttgggtgacagccctctctgagatggggcc

SEQ ID NO: 1137 - DNA, 18278 bp, Unknown
  gut microbiota DNA sequence
cgaatcccgttctcttaccccccagcagtccgcgctgctgtcgtccttcgatcagctcaatgaggaaggccagcagaaggccgtggattatgtagatgatctggtgctcaccgggcgctataaaaaatgtgctgcgcttggcctgggcacaaaagaagcataaataaaaaaattccgtttcgctacttgccgaaacggttcgtttgtactggagtgattttcatgttttctactggtatttcttacaatgaagccgaatctgccattcagaaacttgacccttccatgcgtgcagactatgaaaaaagtctctccgacctccgaaaagccgagaccgtctatgcggaagaaggacggcaagccatcagttacatgggtttggcgctcaacttggagaatgccatgcaggaactcgccgccacaaagtctctcctagatcaggaacgcgaaaagtgtcaattcctcgaccgtagtatttttccaatgcttcttctgctctgcggttttttgagtgctttcatcataccgttgcttgcacattctttgtctttttcacccttattggccgttgctggctctatcgctttttctgtcattctatcatttatcggcatcgtctatacctacggaatttcggagcaccttggcaaggatcctgatttctatttgctctataaatcctctcaaaaagtaaaacttgccttttttgtgcttctgcccttgatggttgagaccatctatggaattattgaatatttccgccgctaatcataaaaaaatccccggcacaaatgtgccgaggaagaaaggattattatggtttctttttgtgggcgtaagcctcccgaagagccttattctccacctgaggtcgtacctggcgatatcaacagctacatcaagaaccgcctggatgatcagatcacctggtacgataaaaaggctcaacaggcccagcgcacctataaacggatgcagcttactgagttgatcgttgctacagccattccgctgcttgccaattatacagccagctgccctgccatcgcttttgttgtcggtctgcttggcggtatcattaccgttattgaaggcacagagcgccttggccgctatcatgagaactgggtcgaataccgctctgcctgcgaaatgctgaagcatgagaagaatctctatctcatggacgcatatccgtatggcaccgacgaaaccaaagagcagctcttcgtccataacattgaaaatctgctttcctctgaaggtaacaaatggaaagcctccaatatcaaggccgcttctcccaaagagaaaactcactctgagaccggttcataagttttttcaaagatatccggcttacagggatatttttccccgttcacgccggtgatgatccagtctcccggcgaagcatgcataacgccttccagcgtttcaatgtacatgtccttgtccgtctgatatgcgtcaacgatcactctttttttctggaatttcatactgtcctccaatagttcagaaaggatgtttaaaatgcccgctttatatgattatcgtatttttatcagtcacgcatggaagtatggcgaagactatgatcgactggtttccatgctggatcattctccgtggttttcattttataactactcagctccacaggaaaaaccgcttgcattatcttccagcaacgccaccgatgccgaaatcgagcaagccatcacagccaaaatcaaaaacgcacaggtcgttcttgtaatcggcggcatgtatgagctctaccataaatggatgaaatacgaagtagacgaagctatgcgcatgggcaagcccatcattgctattatgccctggggccagtcatatatgccggttgagctgcaagcaaaagcaactcagatcgttggctggaactccacatccatcgtgaaagctatccgcgatttagcctgacttattttatcatttttatccagcctatgcaagctgctccattcaaacgatttaacgtaaatttcatttttgttatgttgatatcatgcgtgaattgcaatacaatagacgcaaggaagacgatctcatggcaaatagagtttcccacctgacgcggatgaagcgccagaagaataaccggaggtgtttttatgagtgaccgagaaaaaatcgttcagctgctggatgaagttcctgcctataagcttggttacattctggcatacgtgcaaggcctgaccgctgatgaagatgccgatgatgcttattgtgagcagctttaccagaactatctgaaagacccggatcgcggccagaccctcacggaggacgaagtctgtaaacagctcggtattgctttatgagctataccatcctgtacgagaagcctgctctcaagttcatccagaagcagccaaaagaacagcagcggcgtatcctggaagcagttcatgccctgcccgattccggcgacatcaagcagttgaagggtcacaccgggctgctgcggctgcgtgttggttcctaccgcatcatctacacggtcgataatggcagattgatcgttcgtatcatagatgctggcaaccgcgggcagatctataaccgctattgaccttcaggagcgcccacccggcgctccttttttacaaacgcaaagaacccctcagctgtttccagccaaggggttctctgctctgctgtctgtccaaaagaaaagtaggagtttctatcatggaatgccttgcaaatcccgtcgcgtctccgcttttctattgtaaatccaatatgatccttctgcaacccagaattttttcagaggaggtgtgtacacatggcaaacaaaaaaggttccgatggccgttaccgctaccgtgtctgcatcggcaaagatgaaaccggtaagcccaaatacaaaagcttttatggttccaccgcaaaggcagcgcgtgctgctgccgaagcttaccgcacagcactgggcaagggaatggatcccgcccaatccaaagccacccttgctactctgtacgataacctgattgctgccaaaacagccaaaggcatcgggcaaaagagtctcgaccgctatgaagacaataaaaaccattggggtccgcttctggatcagcctgcagcagaccttcgcactgccgactttcagcgggttcttaactctctggcccagtggcacaatggcaaaccaccactgtcccacttcacgctgtccaatctgcgcagcagcgccaaggctgcctatgaactcgctatcccagaagtggtacaatacaatcccatagttaaaaccacctgccctgccggtgctgatcctgagcaccgtgagcctatcacagaggaacagcagcagtggatccgcgaaacgcctcaccgcgcccagcgtgctgccatgctactgctttactcaggcctccgccgcggcgaagctaccgccctcacttgggccgatgtcgatttgaaagaagccacgatcaccgttcacagcggttataatttcaaggataaaaaaatcaaggatcccaaaacagaagccggtgtccgggtcgttaatattccaaagatccttgtggactatctcaaaactcagcaggacgattgcttgtatgtactgcatactgtaaagggccaccgcatgacagagcaggcatggaaaactctgtggagcagctacatggccgatctgaatgcaaagtacggctatcacggcgaaaaaagcaaaaagcgcccaggcggcctgcccatgcgcattgaaccctttacacctcaccagctgcggcacaccttttgtaccctgatgtactttgccggagtcgatgttctcaccgcccgcgatcaaatgggtcataaggatatcagcgtcaccctcggcatctacacttctcttgacaaaaaattcaagaagaagaagatcaatcgtctggactcctatctcaagaaacagaccggctaatttgtagtggcgcaaaagtggcgcgcgttgtttgtatttttatcgtatttatgtgttttattctaaattccatgctcgctcgtaatgagcaggtcgcctgttcgaatcaggtcagtagctccaaaaatcctacgaatttacgtttagaatcgtaatttcgtaggatttttttatttagtctcgcaagttttcgcaaaaccgcaacataaaccgcaacatcgcccacaaaacaagacaaaataaaacgccccgtgacaccatttcatagggcgttatacgcatttttatgcttttgggggacaggctccttgagttcacaatgtaggtttgtcaatgatgagttggtcacaggatcttgcgcagctcctgcacaaggtcgccgatcacgatgggtttggacaaaaagccggtcatgccgctttccaaggcattgcggcggtcttcatcgaatgcgttggcagtcatggcaaggatcgggatctttgccagtgcagggtcggccagtgcgcggatctgccgggtggcggtatagccgtccatcaccggcatctgcacatccatcagcaccagatcatagctgcccggtgcggcagtgcttaccttttccaccgccacggcaccgttttccgccgtatcgacccggaagccgtactcgcacaggatctcctgcgcgatctcgcggttcagctcgttgtcctctaccagcaggatgtgcctgcccttgaagttggtgttctttttcggcagaagctcctgcgccgcatccgtctgtgtctggccgatggcgctcatcagggtctcgcgcaggtcggacatgaacatgggcttggagcagaaggcggtcacaccggcagcctttgcctccacctcaatgtcggaccagtcgtaggcagtcaggatgatgatgggcgtatcattgttcaggctgcggatctggcgggtgacttcgatgccgttcatatccggcaagcgccagtcgatgatataggcatggtaagcatcgctcatctcgatggactgccgtgcacgcagcaccgcttccttgccggaaagggtccactcggcacgcattcccaccttgaccagcatttttgtcacgctgtcgcaggtgttgaaatcgtcatccaccaccagtgccttcaggccttccagttcggtgatcttttccaccggacggtgctctgcctgcgcacgcatgggcacgcgaatgataaactcgctgcccttgccctgcgccgtctgcacctcgatggtgccgcccatcatatccacgatgtttttggtaatagccatgccaaggccggtgccctggatccggcttaccgtggaggtgcgctcccgctcaaacggctcaaaaatctttttggcgaactcttggctcatgccgatgccgttgtccttgacgcggaactcgtactgcccgcagccgcgcaccgctccggcaagctgccgcacccgcaccgagaccgtgccgcccgccggggtgaacttgatggcgttggacagcaggttcagcagtacctgattcagccgggtcttatcgcagtagacgtcctcatcggtcacatccatggcatccatataaagctccagctgctttgcgtagatctgcccgctgacgatggttttcaggtcgtgcagcacatccgaaaggttgatttccacttcttccagatggatctttccgctttcgatgcggctcatatccagcacatcgttgatgagggaaagtagatgattgctggaagcgagggtcttggcaagataatccttcacccggtttctatcgtcaatgttgctgagtgccagcgtggtaaagccgatgatggcgttcatgggggtgcggatgtcgtgggacatattggaaaggaaggtgcttttggcgcggttggcagtctcggccgctgcaacggcatccgaaagtgcctgattcacctgcctgtcggcggtgcggtcggacaagacaaggatatacttggtcctgccctctacctcgctgcccatggcgatgttatggaaccagcgccgctctttggtctcccgatgctcaaactcgaaatcccattcgcgttgctgcccgctgagcagtccttccagaaagttcttgtcgcgatccgggtcatctttcgggtgcagcgctgccagagcacgggcatcctgccgcacttctttccacgggatgcccagcagccgttcgacgttggggctgacataatccaccttggaggtctttgcgtccagcatcaggaaaacgtcgtccacgttcagcgaaagcttttggaacagctcgtcccggtacaggatctcagtgtccttccggcgcagggtcgtatggcttctgcgcaggatcagcaggatgatcagcacagcaaggccaaaggcgatgcccgccacgatctgcaccgtgtggaaccacagcttatccagactggcattgacaatgctgaccggcacaagccccaccatcgtccagttctggaccgcggtatcctcgtagaccagataataactggtgtcgcccagtttgacccgcaggtttccgctgcggccctgcgcaaaatcatccgaaagggcaagaatctgttcctcggaaaggtcggaatggtcgcgcagcatcgcaatgaagttgtaaatgatttccttgcggtttacggaattgtcaatcaccacccgcccatccgggtagatcacatagttgctggcattgccctgaaaagcagagctgtccagcaatctcagcacagcatcattataataggtgatggcaacagcgtcataggcaaagccccggtagctgccctgcgtttcggggcagatgaacgcaagcatcggggctttgccgggcagcgccgtattcacgacgatatcctcgccatcggagagcttttcgtccagattggtctgcaggccaaggtagccggttcccccggtcacggtcgtgtagttgccgtcataggaaagaaagtagaagtcaacaaatccggctgcctgctgtgcttcctcgatataggcctgaatttcatcctcattcgaggtgtttttcagaaagccgttgcacagatgcagataggtcaggtttctgcgcaccatctctttcagcatactattggatttatacagcacctcttccagatgcgaggtgctttcctgatagatggtctgcgacataaacgagatgtaccggaagctgaaaccggctgccagaaagaccaaaagaaggatggcagcggcggcaggcagccacttgtgccgggaatagcagctgcgtttggattcgtgcttttcgtctgccattccgctcacctcagtgtcatgtagttttccggctctgcaagcgctgcgccgccggagatataatcgcgccatgtgttttttacccacgtatcttcgccagcagacgtgccgctatcgctcgcaagcagcgcttccatctgcttttccgttgcaaggcaggtcacggtaacggtgtcgttatctcccagcggctgcccgttccgggtgatgccggtcagggtatagctgccgttattctcttttacctccacagcaatgccgctgaccactggcagagaaccgcggttgaagggcacaaacccgccctcgcagccttccacaaaggcgtggacggtctctttcagctccgcaccggtcatggtgcgctggcgggacatcagaccgtttggcatgatcatggaagctgccattttctggttataatccgcctgcagcacactgccggtaaagctgtttgcggtggcaagcagcacatcggtgccatacacgccgcgcagcgtgtttgccataacggagaaggcagcgctgccgccgtttgcgtggaatacgttggaataggccttcccggaggtcagcacggtctcgttgtcggcaggctcctcatcggcaaggagctgggcattgaaggcctgatacgcctgctcagcggtaagctcgcctgcgatcattttggagaccacatccttggaaacggcaaagaaatcgttggaggcgatgcggatatacatgtggttttcttccaccacgctgcggacgtccttcagatactcggtcaggcgcaggggaacgttctggctgtagctcagtacgtcctgcccctccgagacgatgcggttctgcgcctgttcggagagcatgacgttcagcaccttcatggctttttcgcggcgcgcggtgtcctgctccagatcccggttcagggcaacttggaaatagggggtggtcatgatccacggttcgccgttctggctgaagaagggcagaaagaccgtgtcgatgccctcatcctgaaacatcttcacgccggcagagctgccaaagtacatggcaacttctccgttccggaacattccggtcacatcgtcgtaattcaatgcaagatcatctgctgtaaggtgggtatcctgaatgaactgctccatccgctcaaacgcccccggccatacggtgtcgtccagacccacccgcgcggtgctggcggggtcgctgtaggtagtgcgccacttgcgccccgcggtggtggtaagctcggcagcggaaagcccctgcagggtttccatgcaggtgtagtcgtaggtataatcggaggtaaagccgcggatgcctaccttttcaaaagcctgacaggccgctacaaagcttgcgtaatcggtgggcaggggaatatcgtactgctcaaaaaggctacggttgaccacaaagccgtgagcatccgcgcagaccggcagccagttcacgctgccatcctcgtttttgaagctgttgaggtaggtgttgtacacagcgcccgcctcattggtcatggcaaggttcatcaggctgtccttcaacggtgccgcatcgtgcagcgagaagcggcagcaggtgatgatatccggcagaccgccgttctgctgcaaaaacttgtaaaaatccagatcgttgttgccgacgatgaactcaatgttcacgtccggcagctgggactggacatagggggcatagttttcgtacaggctggtgctccacagatacacctgaatagtctgagcgtcttcctgctcctgtgttcgttccgcatttttttcgctgcatccggtgagcagggatagccccatcaccagtgccgcaagcatggaaaataggcggcgcaatgtttttgttttcatccgatccttctcctcacacttcttgggcagccatcgttttgcggttggctgctttggcttactgatcatacatcaccgcccgcaagagtgtgcgctgtaaaacccacccacggaaaggatgccgcaatttttgcgtcttttctgttttgcgctctccctctaccgcgaaggggcacagaatgaaagagacataaaaatattttaccactaccatgaaaaattttcaataaaatttcatatattgaaccataaaagctgtgtaggattacaatagatgtgtcacaaagtgaaaaaagacgaatgagccgttctgtggtacagttaaattgctacaccaaccatcacagaaactgccgttcaggcataagaaataaagcacccgcagcaatttgctcaccggagattcaaaacctctgtggcgcttgctgtgggtgcttttgggcgctgtttatttcagtacatctgcaaggacctgcagcaggtgcggaatatccagcggctttgcaatatggccgttcataccggccttcagtgcgttctgacggtcttcctcaaaggcatttgccgtcattgcaaagatggggatgccagcctttgcggcatccggcagcgcacgaatctgccgcgttgcctcgtagccgtccatgttgggcatctggatgtccatgaggatcaggtcatactgtccgtctgccgcctgcttcatcttccggacggcgatctcgccatcctcggcagattccacctcaaagcccgcttccttcaggatctccactgcgatctcacggttcagctcgttgtcctccaccagcaggatcttttttcctttgaaggcctccgcgttcagctgcaccggcctgcaggcaggctctgcaccgaacggctctgccagcactctgcgcagctccgagaggaacagcggcttttcgcagaaggcggtaacaccggcagcgcgggcttcctcttcaatatcggcccagtcgtaggcggtcaggataatgatggggcggttttttccgatcaccttgcggatctgccgcacgatctcgatgccgttcatatcggggatcagccagtcgatgatgtaaacgctgaattcatccccctgctccatggcataccgggtgcggatcaccgcttccctgccggagatcgtccactccggccgcatcccgatcttggacagcatggtgctgacgctcaggcaggtgtcggtatcgtcgtccgccaccagtgcccgcagcccttccagctgcgggagctgcctgagctccaccttttgtccgctgagcgcaaagcagagattcacgataaactcgctgcccttgcccggctcgctctcaatggcgatggtgccgcccatcaggtccacaatgttcttggtgatggacatgccgaggccggtaccctgaatgccgctgacggtggagttttcctcacgggcgaactcctcaaagatgtgcttctggaattcctcactcatgccgatgccgttgtccttgatgcggaactcatagcaggcccggcccgcaggcgcaccgtttttctcagcaatgcgaatgctgatcatgccacctgtgggagtgaacttgatggcattggacaaaatgttcagcaggatctggttcagccgcagcgggtcggtgatgatatcctcgttctccacatctatggtatcaataaaaagcgacagccgctttgccgaaacattgggctgaatgatggagcgcacatcgtggacgaggtccggcagatgcaccgctttttcctcgatctttacctttccgctctcgatgcggctcatatccagcacatcattgatgagggaaagcagatgctggctggaggtggagatctttttgaggtagtccagcacctgttccctattgtcgatatgggttgcagccagcgaggtgaagccgatgatggcgttcatgggggtgcggatatcgtggctcatattgaacaggaactcccgcttggcgcggtttgccgccccctcgtgctgaagcgcgatctccagcttgcggttctgttcctccagctgggtctggtacttcctctcctgctcttttttctgcagctccatctcctgcgcggagcggcggcgcagcagctgaaggatcattacaagcaggatgtagccgaccagaaccgtcaggatcagcaaaagcgactcccggaagattattttttcatccgtgtacgcatagagatcgaaggatctgccatggcagaacatcccgaaatagcagccggagccgttccagtcccgggtatgggtcagcttctctgcggccccggctttgcgaattccctgcgccagcggactgcctgcaacatcctgcccaatcagctccgggcggtttgcggcaacgacctgattgttctgcacgatgaacagcgtgccgctggtttctgccgggtaaccatccagtatgctctggatggacagcgccgtttcctccacaaattccgccggggtgtaccggtaggcaagcaggagcagctctgtgctttctgcccggtgcgccgcaacatccacagcagagccatcttccagcaggacgcgcttcacataggtctttcgcgggtaagataaaacgtccagaacagcgtcatttttcagctggtcgccaaaccggtcatagccgatgccgttggtcgtggactcgcaccggagcgtgccatccggtcccagaaccgaaatgccggtgagccagagcttttctgtctgcctgttcaagcactgcgggtcggagaggtcaagcgcaggattctctgccagctgatggactgcgaccgccgtgcggcggagtgcctttgccgtgatggtatcgttgtgcttttcaaagctggtggactgggatttgacaaactcaagggtctggcaaaagcgttcctctgctgtgcgcattgcccgccagctggagaaaaaagcaacaccggccatcaagagcacgccgatgatcagataggctgtccatatccttttatccggggtggttctgtttttacgcgccaatggtgtccacctccagatactgcgaagcattttcaaggtatcggccaacgatctgctccagcgtgccatccgtgcgcatctgcgcaagggtatcggtcagctggctgtccagcccgcgggtgtcgttcttggcaaaggcgatgcccagcccggtgaccagcagcggttcctccaaaatgcggaagtctatggcattgtccttcatatattgcaggatgcctgtctcgtgggcggcgatgccgtccacatagccgcaggccagcattgcgtactgcacactgcggttttcgatgctgagcacctccaccgtctgcgggatgcgcgggtcggagccgctgagaaagatctcttccggcttgccggtgctctgcacggcgacggtcttgccggcaaggtcgctaagggattggatgctgctgtcggcatccaccgcaaccacctgacggctcaccatgtaaggccccgcccagcggtatacctcttcgcgtccatccatggaaaagcagccccagatgcagtcgatggcgccgctttccacaagatttgttttctgctcccagttgatcgtttcaaaccgggcagcataccccatgcggcggaacgcctcggtggcgatctccacatcgattccggtgggaacaccgtcattattcagatagatataaggtggatagctgtcgcttcccacaacgatttgtgcaagaccgctgtctttcgcttccttttctccgcaggaagtcagactgcttacggcagcagctgccgccagcagcgtgcatccgttcaggaatgcacggcgtgagattctgtgtttcattcgggctttttatactcctgttttgattgcatccgcagctcagttgtgctgctgtaattcttctttcagggcagcttggatatccgtcaggcattgcagcaagagcggcttcctgttgatgaagtttttccaaaagctgctgctcacgcgctttgtaatattcctcgatctcggaaagtgtattcacgttctaatcttctcctgcatcattcacatcgtttgtgtgcttcctctgcggaaacgcgcttgtccgctatttattttcggggggataacacggaagcgttttaccgtctgctccagcgcagcgatatccacaggtttggacaggtgctcgtccatgccggcttccctgctcttctgcatatcctcaaggaaggcattggcggtcatggcaaggatgggaatgattctgcccagcggattctcgccgctgcggatgcggcgggtggcttccaagccgtccatcacaggcatctgcacatccatcaggatcatgtcgtactcgccgggctttacgctggcaaaggcatccacgatttcctgaccgttggagcagatggtgcagcttgcgccattggcttccagcagcatttccagaatttcggcgttgatggcgttatcctcggcgcagaggaacttcatgccggacagaggagaagtttcttcctcttcctccgggagtacctgtgcctctggcaccgtatctgcttcggcatcaacgggaaattccagcaccacctcaaagcgagtgcccttgccggtggtactctccacattgatagagccgcccatcaggtccacgatgttcttggtgatggccataccaaggccggtgccctgcaccttgttggtgccggagcgttcctcgcgggtaaaggggtcaaaaagggtcttctggtaggcctcgctcatgccaatgccgtcatcctgcaccacaaagcggtatcgggcgtagtgctcgtttcggggcagctcgtccacctcaaaccggatatgcccgccggtgggcgtatacttgactgcgttggagagaatattcatcagcacccgattcagacggttggggtctgccagcacgttttcgtgctgcagatgggtgtttaccgtaaaggtctggcggcgttggcctgcctgctggcggatgatgctgtccagctggctgatctgctggggcagattcattttttccacattcagggtggtcttgccgctctcgatgcgactcatgtccagaatatcgtttatgatgcccagcagcaactggccggaattttccagcttgtccagatgttcggccagcttttccggctggtgcagctcgtttttcattagagtggtaatgccgatgatggcgttcatgggggtgcggatatcgtggctcatgttggcaaggaagtccgtcttagccttgctggcgcgctcggcggactgtaacgcctctgcggcaatgtcctgtgcctgccgcagctcatcgtttacctgcgtcagatggatgttgtattgctccagacggaggttcgcttctttttctgcctgcagctcctgctgctgcttttgccgcaggagaaaccagccgacgaaaactgttatgaccgagaacaccattgcaatgacgatgatgatgatcatgacgatgctgaccagcttctgcgtattcacggccacatattttgccggaacaaggaacgccagtgtccactgggcgttttccatctgcttcagggcgtagaaatactcggtcccgtccagcacggcgttggaatagcaggagcctgtgcggtcaagccgctcctttgcctccgcaaaggaagaaccgtgcagataggacatccgggagagcacggtgtatacgttatgccccttcagcagctcggtatcattggcgttgaacagcttgaaaccgttgtcgtccagcacatagacactgttgttattttcgtaggcatcacagcggaaataatcgttcagttgggtcatgctttgcgaaataccaaagtagcacagggtgatctctttttctccgctttgcagtgtgatgggggtggagagcttttccagaaacaccatccgggagtcgtccacggtcagcgagttggaaacgtagctgacccactgcggagagtctgccagatagttcatttcccttagcagccccatgccgccattctcggtatagtaatgtccgtcagagtccacggcaaccagttcgatctgtctttcatggtaattggaaagctccgacagctttttcagatagcgatagaactcggtatcggtctttaacggagtgcagtacaaataattgcattgtacattcacctcgtcccagtgggtgtcgatcacatcctccagactgcggaacatctggtgggtgacctcttccatctggttcagccgctcatggtagacaaggttctggatgtaggtctggctcatgataaaaagggtcaggatgaccgcaacaatgacaaagccggtgccccaaagcagctttttatataggttgttgttcacatccggtatctcctgtccgttctgttcagctccatgcagtgtctgcccggctgatggtggtgtatgcaccaaagaaggcttttgcggcatccatgcccaccacgccgctgtctgtgaccgtggtctccgcagccagctggtcactcacaccgcagatggcaacctgataggtcttgcccgcatccggctgcaccgggcttaccagcacataggggtagcccttgccgttgccgtaggcatcgtagcccgtggccagcaggtcgttgatctgctgcccggtcagagtaacggtctggatggtgcggttccagccggtgggcaggatcaccgaaaggtcgtaatccgtaatgcccttggcgtacagcttggcagctacgccgtgatggttctgatcggtggggttgccggggatccatgtgctcagcgacaccagcgcaaggtcgctgccggtagcctgtgcaaagcagcggcccaccagcatggcgcagtcctcctgcgaaagctcctccgtaacggtagtgatggtatccggggtgttgttcaccacactatcctgatcctcgtccagctgacggatcacatcctccatggtggcattgcccttcatgaagtccagcattttaaggccagtggtcacgatggtgttttcccagccggaatagataaagggcgcggtgttgcctgcattcagggcatcggcgatgtcggcatagtaggtgccgtccgcttttgcgtccttgaagggcagcaggctgcttttcagcgccgttgcaggctgcagagcgctggtgcctgcaacggtggaaagcacacgcatcaccttgagcgcatcttccagcttctgggggtcctgcttcagctttttattcagaccgtagaagcggttcacattcagcacaaaaacgttctgggtgccgtcctccgagagaaacggcatcagcccgtatttatcggcgttgccgtctgcctccacgatgccgttggtgccgcccatcagaaacagggtgttgccctcgatcatcctctgccgggtcacattgtcgtcaagagcgtcgccggtgtcgttcagcatcccgatgtccttccacttctggacataggccatcgcctgcatcatgccgggggtattgctgacattcgccttaccggacagataatcccgctgccacagcctgccgtccagtgtgccgaggaaatcggcgtccgcaatgttgcacagatactggaaaccgtagcccgggtactggatctgtggcagacagagatcgaccccggtttcctttgcctttgcagccagttcttccagctcagcgaaagaattgggcagctcccagccgtattttttcagcagggtcttgttgtaggtgatgccgtagcagttgtaggtcgagggcagcaggtagatggcaccgttgtcgaacacgtcctgcagacgggactccacatagttatccgtaaaatcgtagccggaaaggtccagcagtttgtcggagaccagatcgatccgggggtcgtagtaggtcaaggtgcagacgtccggcaggtcgcccgccgcaaacatattctgcaaacaggtggtggtgttatcgccgctgtagggcacgacctcgatgttcacttccgggtaaacgctgtgtacctgctcaataaaggcttctatctccttataaggtgccataaaggtgatggcttcgtgcgcatcgtcttttttcgccgtttcggtcttaccgccgccgcaggcagtcaacgccgccgtggctgccgtaatgccgcagacctgcaaaaaagagcggcgggagatctttttcatcatataaatatacctccctcacattatcggaaagtgcagtagcgcagtgctgccctagctattcttacacatcccataggaatccacacacccgcggcctgtccgcatgggctttgcgccgagcttccataaaataacattattattgtaccattgcaacaaaagtgtttcaagttgtttttgaaggcttttacatacgaaagaactttttatatctgattctgccttttgcatggcataaaatgcaaaacgacctattgaggaaataatcgtagatggttagcatgaatggaaaaaatgtgcaggctcatcatcaacactaaaccgcccagtgtgaagaagagcttttcacatccggcggctgcgtggatcagctgctgccaaaggccctttttctgcataaacaagatccagcccatggaggcaatgtaggccatgccgacaccgagatgactgagcattatctccatgttctacaacaccggcacccggctggggcttatccacgaaacaggtcatcgaaaaactgaaactgctgaccgatgcggagtttgccgaactggaatttcccccggactgattattgccgcctgcgggcggcgtacataaagtattttgttcttccaaaagatatgctataatcaaattagacaaaatttctctcttcaagcgatttctccgcaattttcctgtggctctgctcgtatcaaaaataagggaccgatttttaattgtcagaacggaggaaccattatggcaatccttgaaaagaccatccgaaacaagaattttgacaaactgcttcggaagctggaacaagaaatcccggacagcagttggtcggcagatttagaggcaggcagtgatttcaaagagggcgatgcccggtgcagtgtccgtgtatttgaacggtacagcatgatgggcggcaaccgcctgagtctgacactgaccctgttccagaatggagacagtccgatccg

SEQ ID NO: 1138 - DNA, 17147 bp, Unknown
  gut microbiota DNA sequence
aggacttgaacctccaccgagttgccccgattagaacctgaatctaacgcgtctgccaattccgccatatccgcatattctgttttgttcgcgagctgtgttgctcggaacgatagttattataccagatatggcagaattgtcaagcattatttttaatttttctcgacaaaattttgcttgaaaattgatgcattctgaatggcagctgcagggcgaaatttttgccaaagtgtgatacaataaacaggacgcgccgggagggtgtcctgcgcgcagactgagaaaacgaggaaaatgcagaatgttcaatatcgttattttcctgctgggagcaggcatcatgttctttatggctctgcgcagtgtgctggcacggcgcaggctgtgcacgcaggggcagaaggtcacggccacggtggagggcaccgtgcggagccgggatggcggtgcctatgtgctggcctttaccaccgcaggcggcagccatcggctgcactacccgaagcctgcgcggggcaagagctttgcggtgggggataccgtcaccttatactatgaccccgacgacccggagaagatgtacgtggaaggcgaccgggccacgctgggagccgaggtgctgtatgccgtgataggtgtggccctgctggtgctgaccgtgggcattgcccgctgaaaggggaaaagaggatgaaactggaacattttggcatggctgagccgggcgactgccggctggtattcacagccggtgccgaggaactggcggcagccgttgcacaggtgcaggcggagccggacgcgccgcaggaagaggacggtctgctgactgaggcggtgaatcgcaccattcttggcggcttttcggcgctgtatgagcagctggtgcgggagtaccatgtggtgccggtgaccgacccggattttgaattgctggcggtgaaccgggccgagggcttccgggcgggtgcgcagttctacgcgctgccgccgctggaagtgggagcatacaccggtttcgtgcagcccattgagccgcaccccatccggcagctgaccattgaactggagatcaaccgtcaccacggcgacgaagaacgtgcagccgatgcagcgggcaaggcggcgctgcggcagcaggtggcccgcgagatctgggcacagcgctgtgcccaggctgagcagcgggcacgcaaggagttggtatggcagctgggcgatgcagtgaaaggcccgctgccaaagcagctggtgggcggtaactattttgccgagcagcgccagttcaacctgagcctgcaggccaatggcatcaactttgaccagttccttaaagtgcgcggccagacggtggaagagttccgtgcatggctccacgcgcaggcagagcgcaagctgcgcagctggctggggcttctgctggtggcagaaaaggagggccttgcacccacggacgccgaggtggaagcagccgctgcccactgggatgccaagctggacggcgagcgcaccttccccgccaacgatgcacgcaaggtgcgccagcgtctggcccgggagagggcggagcagttcattgtggagcactctaccctcacgccgccgcccgatgaacccatcgtgcagaaagttgaaagcaaataataacaaaaaggagcgatgcgctgcatcgctcctttttgttattattatcaggaactctcaggtctccacgccctcgaactggctgttgtagagcttggcgtagaagccgtttgcagcaagcagctcgtcgtggctgccctgctccacaatgtggccgtccttcatcacaaggatcacgtccgcctcgcggatggtggaaaggcggtgcgccacaataaagctggtgcggccctgcatcatgcgggcaaaagctttctggatacgcacctcggtgcgggtatcgatggaggaggttgcttcgtccaggatcagcatcggcggcaggcagagcatcacgcgggcaatgcacagcaactgcttctggccctgactgatgttgccgccgtcctcggcgatgacggtatcgtagccctccggcaggcggcggataaagctgtctgcatgggcggctttggctgctgccacgatctcttcaaggcttgcgtccggcttgccgtaggcaatgttttcccgcacggtaccggcccgcagccatgtatcctgcagcaccatgccgtagctgccgcgcagggaagcgcgggtcacatcccggatgtcggtgccggacaccttgatggaaccgccgttcacatcatagaagcgcatgagcaggttgatgagggtggtcttgccgcagccggtagggccgacgatagcaatgcgctggccgggctttacgtcgagggaaaggccctcgatcagcgggcggtcgggcagatagcggaaggaaacatcctccagctgcacatggccgtccggctgcagcaccttggcgttgtccacttccggcatctgatcgtcggcatccagcagctcgaacacgcgggcggcgcaggccagagcgttttgcagctccgtcaccacgccggagatctcgttgaagggcttggtgtactggttggcgtagctcaaaaacacgcttagctggccgatggtgatgccgccccgcaccgcgtacacggcacccacaaggcccacgcctgcgtacacgatgttattcacaaagcgggtggcggggttggtcaggctggaaaagaagatggccttcaggctcacgtcctgcagacggccattcacctcgtcaaaggcggtaaggctctcggcctcgtggccgaaggcctgcaccaccttctggccctcgatcatctcgttaaccagcgcggtctgctcgccgcgcacggcgctctggctctggaagtaaccatagctgcgcttggcaaggaagcttgccaccacgaggctcagcggggtgatgcacaccaccactagcgtgatgggcacattctcgctgagcatgaacagcagggtgccgaggatggtcagaacgccgctgaacagctgtgtaaagcccatcagcaggccgtccgcaaaggtatccacatcggccaccatgcggctgacgatatcgccggagggatggctgtcgaggtaggaaagcggcagggtctgaattttgcgcagggcttcgttgcgcaggttgcggctgacaaggaaggtgatgcggttgttgcacacgctcagcagccactgcgcaagagcggccacaccggcaaccaccaacacctcgatgataatgcgcatcacaccgccaaaatctacggcacccttgcccagcatcatatcaatggcgctgccgcagaggatggggatatacagctgcgcgcccacgctcacagcggccaccacaaggctgcacaccacaaacagggaataaggtttgattttgcccagaacacgggtcaaggtggccttgcgctgctgcggggtcagctttgtttttgcttttgcactcatttctgcgcatcccctttcttgaactggctctcgtagatctcctcgtagacggggcaggtctggcgcagctggtcgtgggtgccgatgcccaccagatggccgtcgtccagcaccagaatttgatccgcgtgctgcaggctggcggcgcgctggctcacgatgaacacggtcaggctgccgggcagagcagccagtgccttgcgcagggcggcatcggtggcgtagtccagtgcgctggcgctgtcgtcaaggaccagaatttctggcttgcccacaagggcgcgggcgatggtcaggcgctgcttctgtccgccggacaggttgcgaccgccctgctccacaggctcgtccagcccaaggggcttggctttgacgaactccgcagcctgtgctgtttccagtgcagcccacaggtccgcatcggtggcattcttgttgccccacagcaggttggagcggatggtgccgccaaagagctgggccttctgcatgaccatggctgccttgccgcgcagttcttcgcggggatagttccgggcatcgcggcccatgatctccaccgtgccctcggtggcatcgtagaagcggggaatcaggttgacaaggctggatttgccgctgccggtaccgccgatgacaccaatggtctggccgcgctttgcagtgaagctgatgtcggaaaggctgggtgcaccggcacccgcataggtcaggcttacatgctcaaagcgcacggcatcgccggatttttcggcgggcacctcgcccagaagcttttccgggaaggccatgccgggcgtggtgtccagcacagcctgcacgcggcctgcgcaggccagcgccttgctcacctgcacgatcaggtttgccagcttgaccagctccacaaggatctggttcatgtagttcaccagcgcaatcacgtcgccggaagccatgccaccaacattgatctcaatgctgcccacatatagcagtgccacaatggcaatgttgatgagcacataggtcagcgggttcatcagggcggaaatgtggcccacatggagctgcatcttggtcagcaggtcgttggcgttctcaaagcgctctacctcgctcttttccttatcaaaagcgcgcaccacgcgcacgccggtcaggttttcgcgggtcaggcccagcacccggtcaaggcgattctgtaccgtcttgtacaggggccgggtagcagccatgatgccgaacaccaccacgctcagtagcgggatggtcactacaaagatcagcgctgcacgggcattcaccgtaaaggccatgaccatggcaccgatcaccacgaacgggctgcgcaggaacaggcgtaaaaacaggttcaggccgctctgcacctgattcacgtcgctggtcatacgggtgatcagggtgctggtgccgagggtgtccatctcggtaaagctcagggtctggatgtgctcaaacagggcgtggcgcagaactgtggaatagcccacggccgcctttgcggaaaaatactgtgccgtcaggctacaggcaaggccgatcatggccagcagcagcaaaatgccgcaccgcacaagaatatagtggaagtcgtgggcggcaatgccgatgttcacgatatccgccatgaccagcggcacgaacaggtcgaacgtggcttccagcatcttgaaaaggggcgcaagcacgctctcgcgcttgtagtccttcagatagcctagcatcttgttcaaggcgatactccttctttcttgcattataaggtttatgaaatcctacttattatagcgtacaaaaacttaaaaagccatagaaaatgtttttattgcaaaagtgtgctgaaaaccgccgggcaaaatgccgaaaacggttgaaaccagggtgggggtatgctacaatgattttaaatattgcacaaaaggggaaacaggaatgctgataagtttggtcgttccgtgctacaatgaggaagaatcacttcccattttttataaagaggccagcaagatcgcacagcagatgggaatatcccacggagcagattttgagttcatctttgtggatgacggctcaaaagaccgcacactgcagatcgcgcgggaattgcaccggaaagatgcccgtgtgcggtacatctccttcagccggaactttggcaaggaagcaggcatttatgccggattaaaagcggcaaagggcgattatgtagcaacgatggatgcggatctgcaggacccgccctcgctgctgccggaaatgctggagctgctgctctccagcgaatatgactgcgcggccacccgccgcacgacacgcgagggtgaaccgcccgttcgcagctggtttgccaaaaagttttatcagatcatcaataagctctcggatacagagatcgtggatggagcaagagacttccgcctgatgagccgcaaaatgactgatgccgtgctgagcatggcggaatataaccgcttcagcaagggcattttcagctgggtcggctttaaaacaaagtggatcgactacaaaaacgtagagcgtgtggcgggcacaacaaagtggaacttctggggtctgctcaaatattcgatcgaaggcattgtgggcttttccacagctccgctgctgatggcggcgggccttggccttgccttttgcgtattggcgtttgtaggcatcatgatcgtggtggtgcgtgcactgatgttcggcgaccctacttccggctggccgagccttgtctgcattatccttttgtgcagtggtgtgcagctgctgtgtacgggaattgcgggcgagtaccttgccaaaacatatcttgaaacaaagcacagaccgatttatattgctgctgagaccgaagaagatctggacgcggaataaggcgtttcaggaaaaatgtatttttaacggggtgccagaagaagctgatctggcaccccgctttttttgagcagggaaaaatggatacatacagataggcgttgtacccaaagccatttcctgctatactaaaaactgactagaaactggaagaatggtgagcagatggcaaaaagacaagacggcggcatccggctgcgcccggtgggcacccgcaagcatcggcagaacgctccggcctacagcccggcgggcaccggctgcccggcctttgagcaggcagtggaaaatttatataaaggccagaacgaagaaagcttctggacgctgatgggcgctttgaactatgcactggaaatggagacccatgttctggtgccgctgcgcacggcactgacggtgcacaacacgcctgcaccgtggacggagcatccggtgcccacggcaaaggctaaggacctgcagctgtggaccctgcgcaacgagaagggccgcacatggctgcctatgttcacctctgcagctgcggcctgcgccgaccgcagcacttctgcccggccaatggcagattacaccctgcaggatgccatggagctggctctttccactgaggggatcgacggcgtggtgctggacccgtggagccactcggctacgctggacggcgctctgctcaacggtttgctgcacgcgggtcatacgccggaagaccccggtgatgagaaagcagatgccggaaaggaagccgcccgcaagggcaattgggcgcaggctgtggaatgctttgaaaaagcagccgagcttggcagcgccatgggacttgccctgctggcagactgtatttataagggccgcggcacccgcacgaaccgtgccaaggcccgccgcatgtggaaggaagcagcagacagcggcgagatcttatccaacattgcactgggcgatgactgcgctgcccggggcgacaatggccgggcacttttgtattaccgccgtgcccgcgccaacgcagcccatatgccggatatcgagtacactccgcaggtgtgcctgcgtgtggcccagaccgaaacgcgctacaccagccgcaaaaaggcgctggcactggccgcagaagcaaggcagggcttttccatcaaggcccgtgagcacgagccggacgcagagcagtggctggccgaagccgaccagctcatccgggaactgaccagtgaactgcctgcccgagccacagcttacgacatggaatctttacaattggactaaaaaatcgtcatatcgggacggtaagatatactcggaaatgatttgaagagctgcgcccaagatgcacagcaccggagaggaaacagacagtatgagcaaagtaatcggcatcgatctcggcacgaccaattcctgtgtggcagtggtggagggcggcaagcccgtggtcatcaccaatgcggagggtgagcgcaccacccccagcgttgtggccttcacgaaggatggtgaacgtctggtgggcggtgcggccaagcgccagatcgccacaaattccgggcgcaccatctccagcatcaagcgccatatgggcagtgactaccgggtgcacatcgacggcaaagacctgaccccgcaggagatcagcgccatgatcttggccaagatccgccgcgatgccgagagctatctgggcgagccggtgaccgaagcagtcatcacggtgcccgcctacttcgacgacagccagcgcaaggctacgcaggatgcaggccgcattgcaggcctgaacgtgctgcgcatcatcaacgagcctactgctgccgctgtggcctatggtttggataacgaagcggcgcagaagatcctcgtctacgacctcggcggcggaacctttgatgtgtccatcatcgagatcgaggacgggacctttacggtgcttgccaccggcggcgacacccatctgggcggtgacgacttcgatcagcgcatcgtggaatatgccgtggccgagttcaaaaaatcggatcgcatcgacctctcccgcgacccggcagctatgggccggctgaaagaggaagccgaaaaggcaaagaaggagctttctgccgcgccgtcggcacagctgaacctgccctttatcgcagtgggcaaggacggccctcaccacttggatatctcgctttcccgcccgcagttcgaaatgatgaccggcgacctgctggcccgcacagtggctcccgtgcagaatgccctgcgggatgcaggcatttctgccagccagctgggcaaggtgctgctggtgggcggcagcacccggatgcctgcggtggagcgtcaggtgaaggagctgctgggctgcgaacccagccacagcctgaacccggacgagtgtgttgccatgggtgcggctgtgcagggcggtctgctgcagggcggcggcaagctggccggtgccaccggcgcagcggcgcagggccttgtgctgatggatgtgaccccgctgaccctctccattgagacgctgggcggcgtggccaccccgctgatcacccgcaacagcatgatccccacccgcaagagccagatcttcaccaccgcacggcccatgcagaccagtgtggagatcaacgtgctgcagggcgagcgccactttgcccgtgacaacaagagtctgggcaaattcaagctcaccggcatccgggcaagcttctcctccaaaccgcagatcgaagttaccttcgatatcgatgtgaacggcgtggtgaaggtgtctgccaaagaccttggcaccggccgggagcagaacatcaccatcaccggcagcaccaacctttcggaaaatgagatccagcgcgccatggcagacgctgccgcctacgaggccgaggacagccgccgcaaggagcggctggatctgcacaatcaggccgaggtgctggcctacaaggtggacgaggctctttccaaatgcaaaaaggagctggacaaggacgagaagaaccgcatcaaaaccgacctcgccaacctccgccgctgcctgcgcaaggataagcccgaaaagatgaatgaaaacgaggaagccaatctccgtcaggccaagacccagctggaagaaagcgccaaccatctgatggtgctgtataccagtgagcaggaaacagatggtacgaataatgcgctgtaaaagttgcaacaaaacagaatgatgagaactgtgctctgtggaaaatagaaaccacagagcacgtttttttgcagaaatagttgcaggagataggctgacattgtataatacaactatatagttttggctaaattcgggaatgatgccttgtttgggagaaagacatggaaaaaactgcggaaaagctaaaggtaaatgagagcctgttaaaaacagtactgtgcagtgctactttttggggattgttggcgcatggtatggttctgttcaacaaatactcattccatgatgatgtacggtatttcaatgaagtgggcgctacttacgaatctggacggtggatgctgggcattcttggaagtctgagtgcaaatttgctgggtagtaaaaactacagcctgccagtggtaaatggtacgattacgattttgtgcattgcagcaatcgtatatctgctggtggatagtttgaagatccagtcaaagcctcttgttattctgctgtgcggaagtatggtgacatttccgtcagtgacgggaacattcagttacatgtttactgcaccatactattatgctgcatccctactgggagttgttggagcatggatttttcaccagaaaaagaatgttgtcgctctattactctgcacggttttgatggcttgctctgttggtgtgtaccaggcaaatatcccggtctgcatctgtacattgctgctttatatgatggaagatatccggcagtctgatatgaactggaaagcgttttggaaaatggccctgtgtaatgcaactgtgtgcattgggtttgttacagaatattttctagtcaatcaatattttctgaatcagtttggcgttgttttgacggattacaaaggtatcaatcattttggaagaacaaatctgagcaattatatttatcggatactgtgcggttacggctcattcttttatccaagcactgctgtggaagacttcagcgcaagatatgtctatactttgttgatcattgttactgcgatcattgccatatttgtgctccggaaaatgtatattcttaagaccccaaaaggatgtcaaaccctattgatcctaatcgcatatcctattgcagcatgctttgtatacctgatggtagagccttgggatgttcatgccgtaatgacttttggacaggcgtttgcctttgctttggttgtatggtttattgataaatatcccgaagatagaacaaaagtagaaggtgccctatgtaaagctgctgttgccctattaggagtacttgtgactctaaatattcgttacagcaatatcctctacctaaaagcagacgtgatgcagacacaaatgatcagttattacacaactttgatcacgcgaattgaaagtatcgaaggttatactgaagatgcgcaagttgtttatatcggggagtatgacaagcacgataaaaatcttgttggaatcagcgaatatttcgatgatttggatctggctacatataaaggagaacctattttcaatgattacgcatggaaggaagccatggagttttggtgtggctttgcaccggaattaggagatgccgcagagtttgacggtaatgccgaggtagcatctatgccctgctatccggatcagggctcgatccggtgcatcaacggaaaaattgttgtcaaatttgcagatgagccgtaagaactacgaaaaagcagggaagttaaatgaaaaaattatcgttaattatttcagtttataacgaagaagccgttctggaaaagttttataaagctttctgctccatcgaacagaatttggaatacgggggagggggatatgagctgatttttgtaaatgatggcagtaccgatgccagtatgaatattctggaagtgattgcgcagcagaacaagaatgtccgtgtaatcagtttttcgcgaaattttggccacgaggctgccatgattgcaggcatcgatcatgctgcgggggacgtgatcatttgcatggatgccgacctgcagcaccctctggaatgcatcgcccccatcatggcgaaatttgaggaaggctatgaggttatcagcatggtccgaacctccaacaaatcggcaggtgccatcaaaaactttacatccagagcattctaccgggtgatcaacgccttgtctgatcaagtaaagctggaggaaaatgcatcggatttctttgccatcagtagccgtgtggcagatgttctacgtacaaattaccgtgaaaaaactcgttttctacgtggatatgtacaaagcgttggtttccggaaaacaacgctggaatacactgctgcggaaagagctggcggtgccagccactatacgctaaaaaaactgatgaattttgcaatcagcaccatagtcggtttttctgattttccactgaaactcggcctctatgccggtgctgtaagttttcttgctgctgtgatttttgctataagtgcactgtgtggattccgcgagtataaggtgatccttgcggcagtcaatgttttatttgccgttctctttttgctggtcggaattatgggtgaatatttttccgttgcatttgcagagctgaaaaaccgtccgatctatattgtggaaaaggaaatcaattccgggcactgcgtatgatacaaataataaagcaactttattttcgttataaggaattgatcaactatgtgatcgtaggtggtctgactacggtagtgagtctggcaagttactattttttcactgcagtctttctgaacccgcaagacccatttcaactgatggctgccaatacgctctcatggatctgcgcagtctcttttgcttacatcacaaacaggaagttcgtttttgaaagcaaaagtgctgataaattgcgcgaaatgctgaaatttttcagtgcgaggatttccactctccttatcgaaatggcctgcatgacattgctggtaaatattctgcactggaatgaccggatctctaagtttgcggtacagttcatcgtcatggctctgaattacattttcagcaaactgtttgtgttccgcatcaaagaataatacagagtaaaaggggctgctgcacatgcaacagccccttttactctgtggaaaaagccttacagcatcttagaaaggaatgctttcagtctgggatgcttcggattcgtgaacagctcctgcggcggctcgtcctcctggatcttgccgtcgtcgatgaagatgacgcggttggacacctcgcgggcaaagcccatttcgtgggtgaccaccagcatggtgatgccggtgtgggccagctccttcatcagttccagaacctcgcccaccatttcggggtcgagggcgctggtgggctcgtcgaacaggatcacgtccgggtccatggcaagggcacgggcaatggcaatacgctgctgctggccgccggaaaggctcttggggtaggcatcggccttgtcggccaggcccacgcgggccagcagttcgtctgccttggcggagatggcttccttatccttcagcttcagcagggtaggggccagctccagatttttcttcacagtcaggtgcgggaacaggttgaagtgctggaacaccatgcccatcttctggcgcacagcgtcgatgtgggcttcatccacctcggtgccctcaaatttgatgctgccggaggatgggatctccagccggttcaggcagcgcagaaaggtagatttgccgcagccggaggggccaatcaggcagaccacatcgccgcggtaaatatcaatatcaatgcccttcagcacgtccagcgtgggggtgggctgctttgcgcccggctttttttcgccgccgtaggtctttgtcaggccgcggacttccagaattttatcggtcactttgagccagcctcctctcaaactttgccagcagacgggtgaacagcatgaccagcacaaggtagatcagcgcaacgcccagcagcgggaacatggcctcgtaggtgcggttcatgatgccctgcgcggcatacagcagctccttgccgccgatgaccgtgatcagggaggtatccttcagcaggacgatgaactcgttgcccagtgcgggcagcaccgcacggatggcctgcgggatgatgatgaccaccatggtggtcatgtagttcaggccaaggctgcgtccggcctccatctggccggggtccacggccatcaggccgccgcggatgatctccgaaacataggcaccggagttgatgcccagtgccagcgcacccaccatggtaaagttgcggctgttggcaaagatgaccatgctcatgatgagcagctgcaccatcataggcgtgccgcggatgatggtggtgtaaatttcgcagatgatgttgaagaagcccaacaccgggttcttgtggccggggcgctgctggtcgtgtgccacacgcaccagtgccaccacgctgcccagcacgatgcccagtgccagcgcaatggcagtgaccagcagggtggtgctcacgccgttgatgtactgcgtccagcggtctttcaggatgaaggcctgataaaatttgaagaagaactcctgcccgaagctgagcttggtgccgctgttgagcagctctttgagcagttcgtattgagcagccattcgcatcctcactttcctgttttgttagaattttgtaaccttatttttccaaaaaaggggaggtgccccagttggggctgcctccccgtggttccgttatcagccagctgattattcagcggtgatgtacttgtccacgatggactgcagggtgccgtcagccttcagctcttccagagcggcgttgacggcatcttccagagaagaaccctttgccataccaatggcgtaatcttcctcggcgtagctggtatccagaatgaccagaccgggattggcagcaacgaactccttggcgggagcgttgtcgatgacaactgcatccacctgaccattgttcagagcctgcacagcggtcagaccgtcgtcgtaagccacaacactgtcgtcgccgaaatcatcggagcagtagatgtagccggtggtgccgcgctgggtgccgatcttcttgccggccagatcatccggggaagcaatgtcggagccttcgggcacgatgatggactggatgccggtagcgtagctgttggagaagtccatcacagccttgcgctcgtcggtaacggtaacgccagccatgacgatatcggccttaccctgctgcacgctcagcagagcagcgtcaaagtccatgtcgtcgatctgcagctccagacccagcttgtcagcgatggcctgagcagtctcgatgtcgatgccctcaaactcgcccgcatcggtggtcatctcatacggagggaaggcagcgttggtagccatggtcagcttgccagcctcaacggtggtcagctcgccagcggcagcgctggtggaagcagcttcagaagaagcagcagagcttgccacagaggaagccacgctggaagaggaaccaccgcaggcggtcagagccagagcggcaacggacagaccggcagctgccagaaagctgcgacgagagatctttttcatattcaaacactcctcaaatgtactgtatgtttttgcggtacgccagaacgatgcgattcatcgaacatctggcgaacgaatttagtatagattgtacaaattgaaaagtcaatacttgtgcaaaaaatctcatcaattgaaaccgaattgaaaacaattatacaaaaaatgcgctgaagaaatgtatatatacaaattatagatattttgcgatctcttctttgctccgctttggcacgcagtaatcccggttctcgtccagataatattttacgccggtctcagccgtcagcggcacaatgtgagccttgtgggccgggtagccgaacgccaccatgaatgccagcttctgcggttcttcaatgcccagcagttcggtgagggcaggcttgttgatcgcgcccatgatgcagctgcccacgcctttgtcccatgcggcaagagtcatgttggcaagggcgatgccggtatcggtggcaaggtcgccggggatggaagtgtcctgcaccacggccacatacagggtgggcagctcgtcggctttgggcgtgccctgctccggcggcagataggcagcccacttgaccagcggctgcacctttgccaccgcctcgggcttgttcaccaccaccagacgcacagcctgacggttggctccgcaggaggacaggcggacggcctcgacgatatcatccaccacatcctgcggaacagctttctgtgcaaagcggcggtaggtgcggcggctgacaagagtatccataacagacataaagagcacctcctttatataagtgttgtcaaaagtatagcagatgcggcagagtcttgcaacgctccggcgcaaaaaagcttgcacgttgggcagtgatcttgccttttgcgacaggctgcgattgcatccgacaaatgatatatggtaaaatatggtagaagaaaggaggcggcgcaatggtattggcggcaggcatcgtgggttttattctgggggtcaatttgggttttttgtttgccgggctgatgcgggcggcaagaggggaacatgagcagacagaagatgaaaacaagacatgttgagaatgaatgaaaataacggagaacaaaaagggccgctgtacgggatgctgtgcagcggccctttttgccgggtttgaccgaacttacgattttctcttggtcgctcctgtttttctgtatccggcggaaaaagatgccaaaaaccacttgacaaacggttaccggggggggtattatataggaaaagcaggctccacaaaaaaagtgatgggggcatgcagaaaagattgtgaggttgattcttatgtctaacatttctcgtcgtaagttcctcaagggcgcaggtgtggctgctctggctgttgctgctgccggtgtgctggctggctgctctggcaatgatgtccccgatgtccccgatgtccccggtgtgaccactcgtcctgttacggttatcttcatgaaggacgaaggcaatggtgtgaccaacgttgtgggtgagactgccaagattgatgttctgaagaccgagaactctgtgaaggttgctgacatcgataagaagctgcttcccgaagattaccatctggagaacgagaacgctgttgttgaaatccgcaaggacgacagcaagggtgagtacatcatcgtcttcgtgactgatgtgaccatgactccgaccaagaagaccatcgatgtcaaactgctggagctgccgaacaacttcattgaggctaaggctgaggttgcagtcgatgcaactggcgtcagcgctgctgatattcagctgccggacggctacaagctgagtagcgccgactacggcacggaggaagagctgttgaaggttcgtcccttcgggactgtcttcattgtgaccaagctctgatttcctggcacagaagttttttgaaaaaactcaaatagcaccaacagggtggcggccaacaaggtctccgccctattggtgttgtttttt

SEQ ID NO: 1139 - DNA, 49170 bp, Unknown
  gut microbiota DNA sequence
ctgttcgcggagaaagctccccgctggcctgcggtgtttcacacaatcaattctacggtagagccgccggtgtgggctttgcgcaccaccacctgtcggtcgatgcggtctttcagagcacctacgtgggagatgatgcccaccagccggtcgccctcggtcagccctgcaagtacgcgcatggcctgttccagcgattcgtcatccagactgccgaagccctcgtcgaggaagagcgtgtccagacggatgccgcctgccgcgctctgtacttcgtccgaaaggcccagtgccagcgccagcgatgccttgaagctttcgccgccggaaagggtcttgacgctgcggcgggtgccgttgtagtggtcgatgatgccaaggtccaagccggactggctgcgctggttctcggcaccaatgcgctccagctcgtactgcccggcggtcatctgcatcaggcgggtgttggcgtggcgcaggatgcggtccagatagttcatctggatataggcttccaatttgatcttctgtttgctggtcagggtgccgcccgccgtggcggcaagagcactcacccactgccagcgctgttcaagctgagtgcgcgcttcggcagaggtgcggtatttttcagcggctgcacggttgggcagccgctgtgcggccagctgctgggcctgctcccgcagggcagtgcgggcggcggcaaggcgggcctgttctgcctgtaaaaattccagcggctgggcaggcccggcggtttcggcagtggcttgctgggtctgcagggcatccacagcggctttggcagcggcataggcctgctctgcctgtttgagggaatgctgagcctgctccatgccggtgcgcagggcggtgcggctggcttccaatgtatccagcgcggcctgtgcctcggcccgctgcgggtagggcagggctgcacgagcggcagcggcctgctgttccagcgcatcggcgctggcattctgcgcggcggcggtgctgtcagcttcagcggcggcctgttccagtgccgggcgctggcggctttttgcctgacggtcggcctccaatgcggtgcggcgggcgcagtctgcttcggcctgccgaagcgcggcgacacactcggcctgtgctgcgtgcagggcacaggcttcttccgtcaggacagcgttcatccccttgaaggtcagctgcaccgtcccatccggggaggtgaagcgctctggcaataggctctcagcatcccggcgcagggagcggcgggcttcgtcggctgcggcaagggcgctctgtgcggcagtgctggcagtctgggccagtgcatcggccttttcggcttcctgcttggcggcatccacctgcgcctgcgtgggggctgtgtggggcagttgggcttttgccgggtggtggacgctgccgcacacggggcagggcgcaccctcggccagcgcctgcgccagcagtccggcctgtgcgtccagaaaggctttgtccagcgcatcccgccgggcatgggcctgctccttggcttcggcggcagtgcggtaggcatcctgcgcacggtgggccttttgtgcctgctgctggcaggcggcaagccgctggttcagggtggtaagagcggtgctgcgctgggccagctccttttcccggttctgcaaggccagcagccgggtgggagcatcttccagcgcggtcagctccttttcagcagcggccagcgttgtgtccagtgcggccagctgggtgcgtttcgctctggccttggcagcggccagctgggcagcatcccgcgcggcctgctgctgatggcacagggcatccagctcatcgtaggcggcaagggccgtctgtgcctgcgtcacctgtccggcaagaacatccagctgggcggcatcgcctgcgtggcgggtgctctcggcacgggcagcttccagcacaggcagggtagcggtaagctctgcctgctttgcggccagctgtgcggccagctgtcgggcctgctgggcagcacccagctgacgttgtacttcgtccagcttggcttcggtgtccttgagggcagcagcaacggtctcctgcgcggcctgctggcgtgccagcagaccttccagcagggcaagggccgtctccggctcggtctgggcgttcagtgcggcaagggcatcggcatccgggtcgtcgggagaaaaccggatgccggagagcagactgtccagctttgcattctgggtggtgcgctgctggctgagagcagcgctttcggcctgcaggcgctcctgcagccgggcatagcgctgggtgcggaacagcttgcggaaaatgcggctgcgctcctcggtggaagcgttgagcagctttgtgaactgcccctgtgcgatcatggcgatctggcagaactggctgtagtccagcccgatgatctccatgacggcggcggtcacgtccttggctttggtcaccggcgggcgggtgtcggggaaggtgaggacggcatccgccttttcggtggtaaagccttcgccgcgcaccttgggacgggtgtattccgggttgcggcgcacggtatagcgctggccgttcacctcaaattccaactccacaaaggtgggtgttctggggtcggcatacttgcagcgcagcatggcaccctcgcgcacaccgccgctggaatggtcgtacagggcgtatgtaatggcatcgaacagggtggtcttgcctgcgccggtgtcgccggtgacaaggtataagccgcccctgcccagctttgccagttccagaaccgtctcggcggcataggggccaaaggccgaaagagtgagcttcagcggtctcatgcgtcctcgccctccttccagatctcctcaatgagctgctggcagaatgccgcctgctccgccgtcagcggctggttgttctgcagctggtagaacgccgagaagtgttccagcggggtgatgctctcggcgcgctccggtgcggtgatctcctgatcttcccgggtgcggaggttatcgtagtccaaccgcatcaggttggggtagatcacccgcaggcgggccagcgcgtccggcacgtcctgctcatcggtcagggtaatgtgcaggtagtcgtccaccgcagtgccgtcgtaattgcggcggtcggtcagctccatgtagctgccgcgcacttcccgcaggtcgtgcttcggggtaagcggcgcggtggtgatggaaacttcgcccttgagaccgaactccacaaaggtggcgctcttgtgctggtctgcttccgaaaaggagtatttcagcggggtgccgcaatagcgcacggcatcgcggcccaccttctgggggctgtgcaggtggcccagcgccacgtagtcaaaggcatcgaacaggctggcatccacgctgtccacaccgcccaccgagacttcctcgctctcacagcaggcggcaccggctgcgaactggtgggccaccagcacgctgcggtgggccgggtccggcgggcagtggcgcagcacgcaggcaagggcatcgttgtagctctccacaggctcgtccggccagacatgccgcaccatggcgggcttgaggaagggcagaaggtacacgtccagcgtgccgtactcgtcggtgagggggatgggcaccggcgcaccggagaacaccgggctgacgtacacccggctgttttgcagcagggcagagccgaaggcgatgcggtcggcggagtcgtggttgccgctgatggcgaacacgggcagcctgcgttcggccagctgggtcaaaaaccagtccagcaggcgcacggcttcggcagggggaacgggcttatcgtagaggtcgcccgccagcagcacaccgtccacaggcttgctgtccagcagggagaggatctgttccagaatgtaccgctggtcgtccagcatggagaactcgcacacccgcttgcccagatgcaggtcggaaagatgcagaaaacgcaaacggaaacaccgccttttcagagttttctttattatacagcagggcgggggtgggggcaaggaaaactcccccagtcatcgctgcgcgatgccagccccctcggggatggggcctttggcagtgcggaaaagcttccggttttgccagaggctccctctttgagggagctggcacggcacaagccgtgactgaaggagttcgcttcccttaaatcagaacatcttctcccatgttccttcgccgaccgcgccgtcggcggtaaggccgttacggcgctggaaccgctgcacagccgctgccgttgccgcgccgaacctgccgtcggcgttcagccgttcacccagcgaattgagcttctgctgcaccagacgcaccgtgccgccggaagagccgctgcgcagggcaatgccggggtagggcacatgcaggccgtgcttggccgtgtagcgggtgtagagcacgttccatgtgttcgcgcccaccttgccgtccacattcatcttgtttttgagttggaactccttcacggcgttctcggtggaaatgccgaattttccatcggccttcagctcgctgtaccaggtgcaggcgtcgcgcacaccgttgagccaggtctgcacaagagctacgtccggcccggaggagccgcgctggagcagggaataataagcagggatcgccataatgatcacacgctcctttcgccacatgctatgcggcaaaagtgccgggcgttaccccacaagcaccacatcctcccggcgggcggtgcgctgctgcacccattccaccagccggagccggaggatgtactccccgcacacaaggtcgttttcggcaggctgggcatagctgccgcaggcagagcggcacaggcccggatagagcacgcaccaccagttgcggccttttccggcaccgatctggatgcgcagcgcgtcgtaccgcccggcaggaagagtgccggaaccatagcgccgggtggcaaagtacatatttaccagctgcacctgcaccggcgtgcggatgttcagctgtgccagcgcgtgccgggccgtgagctgcagctcaaatagatgctgcgccgcccaggcgatcgcttccggtttgctctgtgccgggcaggcggtgtccagataggcaagcacggcatcccgcacatggagctttgcgctctggctggcaatggaatcgctctcagcccggatgtgcaggcgcagggtgtcggcgcacaccagcgccccggtgtccagctgggtgcggccccatgcaaatgcctgccatgcgccacacagggcaagggcgagaaacaggccaaggcagagcagagccatttgagaacgtgtaagcattctggataacataaaaacagacccttcttctggaaatgttatccagaggatgggcctgttggagtagatttattctcttagttcttcagcgactgcatgggggcaggcaggcggccgccgcggttgatgaacacggacgggtcgtgctggttcacggccatgatggggccatagcccagcagaccgccaaagtccagcacctcgccagccttgcggccaatggcgggaatgacgcgcacggcggtggtcttgctgttcaccatgccgatggcggcttcgtcagcgatcagggcgctgatgacagccggggtggtgtcgcccgggatgatgaccatatcgatgcccaccgagcagacggcggtcatggcttccagcttttcaatggtcaggcatccggtctcggcggcgtggatcatgccggcatcctcgctgaccgggatgaaggcaccggacagaccgcctacatggttggaggccatcacgccgccctttttcacggcatcgttcagcagggccagacaggcggtggtgccgcagcaaccgcaggtctcaaggcccatctcttccagaatgttggccacactgtcgccgatggcgggggtaggtgccagcgacaggtcgatgataccggcgggtacacccagtgcctgagaagccagattggccaccagctggcccacgcgggtgatcttgaaggcggtgcgcttgaccagctctgccacctcgtcgatgggggcatccttgggcaggcgggccagtgcagcgcgcacagcgccggggccggaaacgcccacatggatctcacaatccggctcgccggggccgtggaatgcaccggccatgaaggggttgtcctccggtgcgttgcagaacaccaccagctttgcggcaccgatgcactgacgatcagccgtcagctcactggccttcttgacggcctcgcccatgagcttgacagcgtccatattcagtcctgccttggtggcaccgatgttcaccgagctgcacacgatgtcggtctcggccagtgcgcggggaatggactcgatcaggcggcggtcaccggcagaaaagcccttgtgcaccagagcactgtagccgcccacaaagtttacacccacctttttaccggcggcatccagagtttttgcaaactccacagggtcggcatccgggcaggcacccagcagcatggcgatgggtgtgacactgatgcgtttgttgatgatgggaatgccatactcggcactgatatgctccacggtgggcacaaggtttgcggccttggtggtgatcttgttatagatgttctcgcacgccttcttcgggtccgggtcgatgcagtccagcaggctgatgcccatggtgacggtgcgcacgtccagattgtcctgagtgaacatctcgatggtctcgaggatgtcaccggtattaaacatactcatagctgtgtactccctccatcagatggtgtgcatggcatcaaaaacttcctgacgggtaacattgatctgcatgcccatctcggcagccagcgcgtcggtgcgcttgtgcagctcttcgtggctcacattgcagttgctgatatccaccagcatgatcatggcgaacatgccctgcaggatgctctgggtcacgtcctcgatattgatattcagttcggtgcacagaccagcgaccttggcaacaacgcccacggtatcgtgaccaatgacggtaatgaatgctttcatcgtttccaccctcgttttccttttgatgaacggtgccgcaagcgttccggcacactcttactcttccagtatagcagatttggcaaaatttgaatacactttttgtaaaaaagaacagacacgaggggaaaaagacattctatcccaaaaattgggtgcaatcttttacagcttgtgctatacttataaataatttatttcccggttacgggctgagaaggagcaaaatactatggaacagcttttgaagatcctggaagacaatgcgcggctgcccattgaggatatcgccacgatgctgaataaatcccccgccgaggtggcggccatgatcgatctggcccgggcgcagggcatcatcaagggctataagacccttgtggactgggaaaaggccggtgtgaaccgtgtggaggccgtcatcgagctgaacgtcagccccaagaagagccgcggctttgacgagatcgcagccaccattgccgcctttgacgaggtggagagcgtgctgctgatgagcggcggctacgacctgcagctggtgatcaagggccagaccttccaggagatcgccctgttcgtggcaaagcgcctttctccgctggacgatgtgctgtccaccgccacccattttgtgctgcgcacctataaaaaagagggccgcctgtatcaggacgaagaaatcgatgaaagagagtgcacggtgctgtgatggactacgataaactgatcgcgcctgccgctgaggccatgcgcccctccggcatccgcaaatttttcgatctggctgccgaaatgcccgagtgcatcagtctgggcgtgggcgagccggacttcaaaacgccatgggccgtgcgcgaagccggcatcgagagtctggagcatggccgcactcgctacacctccaacgcaggcctgaaggagctgcgcgccgaggtagcaaagtatctggagcgccgcatgggcctgcactacgacccgctgcacgaggtgctcatcacggtgggcggcagcgaagccattgatatgtgcatccgcacgctggtgcagcccggggacgaggtcatcatcccggagccctgctttgtgtgctacgagcccatcaccaccctgtccggcggtgtgccggtgcatgtggcctgccgtcaggaggacgagttccgcctgcgtgccgatgcgctgaaagcagccatcacccccaaaacaaagctgctcatcatgccgttccccaacaaccccaccggtgcggtgatggagcgcgaggatctggaagcggttgctgaggtgctgcgcggtaccaacatcatggtgctctcggatgagatctacgccgagctgaactatggcctgcggcctcatgtttccattgccaccctgcccggcatggccgagcgcaccatcgtggtgaacggcttctccaagacttacgccatgaccggttggcgtctgggctatgcctgcggcccggcacccatcatccggatcatgaccaagatccaccagagcgccatcatgagtgcccccaccaccagccagtacgccgccatcactgccctgaaggagtgcgacggcgagatcgaccgcatgcgcgacgagtacaatatgcgccgccgccttgtggtgaagtcctttaacgatatgggcctgacctgctttgagccgcgcggtgcgttctacgcctttccctgcatcaagagcacgggcatgagcagtcaggatttctgcacgaagctgctggaacagaagcatgtggccatcatccccggcgacgcctttggcgcttccggcgaaggctacgcccgcatttcctacgcctacagcgtggagcatctgaaggaagcgctccggcgcatccgggaattcctgcaggaaaacagcatctatcacggcatctgaggaggaacaaatggcaaggctgaactgcgtgaccattctggcccccgcaaagctcaatctggcgctggacgtggtgggccttctgccgagcggctaccatgatctggacatgactatgcaggccatcaccctctacgagcgggtggtgctgcgccgcagcccctacctgaacctgcgtctgccgggcagtctggtggcccccaataacaaaaacactgccatcaaggcagcgctggccttttttgactacaccggccttctggcgggcgtggacatcaccatctataaaaataccccggtgcgggcgggcatggcgggcggcagtgccgatgctgccgctgttctggtgggcatgaacgagctgtacggtgcgcacctttccatgagtgagctgtgcgcgctgggcgcaaagatcggtgcggatgtgccctttgccctgatgggcggcacctgccgggtgcagggtgtgggcgattttctcaaagcgctgccgccggtgccggagtgctggttcacagtggtgatgccggactacggcgtttccaccccggaggcctttgcggcctacgaccgggtgggcagcagcatccacccggactgcggagcgcaggaagccgctatccgtgccggagatctggatgccctttgtgccgccgccggcaatgcgctggaagagtgcagcggagcaaaggataccggggccatcaaggccctgctgcgggagcatggcgctgtcaccgccctgatgaccggcagcggtgcggcggtgttcggcgtattccgggacgaaggggccgcacgggctgctgcacaggccgcaaagcggcgctggaagcaggtgtacgtggcgcagcctgaccgcggcggcgcacgggtgagccgataaaaatgcatagacctccttcccacggggcatactgcccgcaaaggaaggaggtcttttttgtgcagaccttttataaaatctgtctgatcttaatgattgtgggcggcatcaactggggccttgtggggctgttccagttcgattttgtgggctggctgctgggcggcagtgcatccatctggtcgcgcatcgtgttcacgctggtgggcattgcagccctgtgcggcatcccggggctgttttcggacgatagttcctctgaaagctgaaaaatcatgtaaaaacaaaagcacttgcaaaaccaattgcaggtgcttttgcttgttgactcaattactgcttccgtcaagatcatcccagcctaccagatccggcagggtgagcgtctcgtcggagcagtgggggtgtgcacgccgctggtcctcggccatggtgcgcaccacctcgcgggtgatctcacggatggcggcgcagtcctccggcaggtcggtctggctgcggccggagtgggtaaacaggatcttacccatgtggcccaccaccagcgtcagcggcagctgctgcggagcattgctgttgtagcggtagccctgctctttggccgctttgtagatgcgctgggccgcaaagctccagctcaggatgccgcgggcctgttctacgccaaggtagccgtacagcacccccggcgcgtcgcagatgagagtgaagggaaactcggccccctgcgtggcttttgccaccatgcggggagaggaacgcaccacgcaggccagccgcacgccgcgcagtctgggcagtgtctgcaggtagcgggtcaggtattcccgggtgacagggtgatcaaaggcaggcaggaagatcatgaccagagggtgctccccttcgcacagcttgtaaaaatcattgcccggtgtggtgggggtatcaaaggtaaagcgggggatggaggtgcccaccagatgttctgacttcatgccgcaatgcacatcctttcaagataataaaaaatccacacactgcatctctgcagaaagtgcagaggacagaggtggatggattgctataaaaagatcccgcccggtcgtctgcggtcaatcaaacctacccttacggacaggtgggtgccctgtctccgggttcgcgcttcctcatcgagccttcatggtcgccccatgacggggaggtctgcaatccaccggggaactccaagctcccgttgaatgattagtaggatcatataaaccgcaacaaatcgagccgggcaggaagttttgccgggtaatttgtctggaattattcttcgatgtcgtactcgtcgctcaggcgctcttcaaacagcttgcccagctccagcagcagctcgtcgtcgtccacgacgtccagatattcgccttcatcatcctcgccaacgctcaggatgaccagctgagcattctcagcttcctcttcggtctcggcgtattccacagcagccagataatgcacacccttgtggtccagcgcatcgatcacctcaaatgtgatctcgttgccgtcctcatcctccagggtcatcaggtcgggctgatcttcttcggtattagggttcttgatttcgtcagacatagatattgtctcctgtatcgtgtcataaaacgggctgtttgtgtgccgcccgcttggcctgcatatagtgtagcgtttttttgcctgctcgtcaagatgctttttcgcacagaaattgtgcagcaaattttcacgcatttgctctcgcactctgcggcagaatatgatatactatcctctgaatcttctgtgcacggtgtgccgtgcaggttactatagagtatggagcgtgggcggaaatgatgcataaaaaaagatgggcggcgtttgtgctggcagcggcgctggtgctgacgggctgcagtgccgggagctttctgcactttggcaaaggcagcggcggcagtacagtccagaaaatcgaccgcccggcagtggaatcggcagagctgcagtttgcccaccctgcggcgggggacaccattgcggtgttcgatacctcggcaggcgtgttcaaggcggtgcttttcccggacaaggccccgcaggcctatgataactttgcgggccttgtgcaggcaggctactacaacggcctgaccttctcccgcgtggagagcggctttgtggcggaagccgggcagggggccgacggcaggggcaacaccatctggaacggcagccgctacccggctgagaccaccgacagcctgcaccattattccggtgccctgtgcatgggcacggatgcttccggcgagtgtgccagcgtcttttacatggtgcagacgctgccgggagaccagtcggtgacgcaggagcttgtggaccagatgaacagcgcgggctaccgcgcggaggtggtttcggcctatcagaccgccggcggcgcgccttatcttgactacaccgataccgtgctggggcaggtgtacgagggcatggacgtggtggatgccatcggccagaccgccgtggacgaaaaccagaagccctgtgaggacatcaccatcaacagcgtgagcattacgcagtacgaataagaaaaaggacaccgtcaggtgtcctttttcttatatctcccccggatgttccttccgccatgcaagataatcgtccagaatgacggtggcgctgaccgaatccaggatctccttgcgctttgtgccaaaggtgccgctttcgtccagaatgtcggcggcggcgcaggtggtctggcgctcgtcccacatgcgcaccggcaggccgctccagatctcgaccgtctttgccagcttgcggctcttgatggcgcgttcgccctcggtaccatccatgttcagcggcaggccgatcacgatcagctcggctccgatctccttggccacttcgcacacccgtgccgccaccttgttgcgggctttcagggtgatctgcggggtgatggccgttgtaaggaactcggtgcggtcacaggtggcaaggccggtgcggctgtcgccgtagtcaacagctaaaattttcatacaggcttcctctcttgtgtggaaaagtttgtcggtccaagtgtaccacagctgcaggctaaagggtagagaatcacactttttttgagaggattttcgtgttacaataaacacagatcgttttttaggaggaaatgccccatgctcaaactggttttaggcggctccggcagcggcaagaccaccctgctctattcccgcatcaaggcccgggccgaacagggccggcgcagcatccttctggtgccggaacagttcacttccagcacggagggccgcatctaccgggaactgggcgatgctctttccggcatggtggaaagcttttccttcacgagccttgcagagcgcatcctctctgccgagggcggcgcggcggtgcagaccctttcggacgcgggccgcgccgtgctggtgcgccgcgcgctggaagagctgcaggatcatgtgcattactactaccgccaccgccgcaatgcggctttctgccagatggcggcccagaccatcgacgagctgaaaagtgccggcctttccggcgcacagctggcagagcttgcgccggactgcgggccggaaagcggcaagctgagcgagctggcactgatctttcaggggtacgaaacgctgctggcgggcaccggcatggaccccgccgaccggctggagctggcggctgaccggctggaagctgctcttgcccggggcgaactgccggactttctgcgggagcgggaagtgttcattgacgagttcgataccttcaacgcacccaaaaagcggctgatgggcgcgatgctggcggcgctgcccaccgtcacggtggccctgtgcgacgacggtgcgcccatggtgccgggggatatggggcttttttccggcgcaaagcaggtggccgcacagctgcggcagctggcccgcaaaaacggtgctgatgcggcagtgccggagctgctgcgccgcgacctgcgccataaggatgcgcccggccttgcggctgtgacagagcttttggagactggcacctgtgaggtgccgcccgctgcgccggaggtgcggctgtttgccgctgccagccgggaagaggaagcccgctgcaccgctgcggccatccgccgcctgatgcggcagggcgtgcgctgcggcaaaatggccgtggtctgccgcaatatcccggattaccgtgcggccatccggtacgagttccgcatggcagatatccctctttactgcgatgaacccaccaccccggagttcagcgccccggctacggcggtgcgtgcactgctggcactgctgcgcggtgcggatatgaccgaaaacctgaccattcttgccaagaccggcctgtgcgctctgaccgagccacaggtctgcgcgctggaaaactatgcctatacctggtcgcccaatgcggcggcatggcgcacaaaatttgagaaaagccccaagggcttcggcgaaaatgaactgtccgatgaggatgcaaaaacgctggaggatgccgagactgcccgccagctgctggtaacagccgtggacgaactgcgcagcaaggtgcggggcggcagcgccgaacagatcagccgggaactgtatttctgcctgaaaaagctgggtgcagaagagcagcaggcagcgctggtggaagccgtccgcactgcccggggcatcccggcggcagaggaagcggcccgcgagtggaacgtggtgatgcagctgctcaacgagatggcccacctgctgggcgggcagggtgtgacctttgcagaatatgaggacctgttcagcctgctgctgcgctcttcggaccttgggcacatcccgcagacgctggatgccgtggtgctggcaagcgcgggcaaaatgcgtctggacgcgccggactatgtgttcgtgctgggccttgcggagggcgaatttccctgtgcaccgtccgagacgggccttctgacccacgccgaccgcgatgttctgatggcaaagcagatcgatctgccggactgctttgagaaccgcgtggtgcgcgagcaggtgtgcgtttacaaagccctcaccgcaccggcaaaggggttgtggctcagctggcccaaggggcagggcaagaccctgtgcgcagcgctggaacccatcgtggaggccctgcacccggcggcaccggagctggagcttcccgaccttgcagccacccccgccgatgcgctggatacgctgggcggctggccgctgaccgacacggaacgcgccagcctgactgaggcgctgcgcctgccgcagacggatgcaccccggggccttgctctgctgcagcgcatggaggaggacccgccccggcaggtgaacgacctgtctgcgctgagcggcctgctggggcagcggctgcgcatctcgcccagccagctggaaaaatactatacctgccgttacggctattttttgcagtatgtgctgggcctgaagccccgcagacgggccgagctttctgccgatcagagcggcaccctgatgcactgggtgctgcagatggcgctggacccgcacccggatgcggataatccctgcgccgggctggccccatttctggagctggacgatgatgccatggcaggccttgccagcctgctggtggacgaatatgcaaagcgttatctgccggaggatacggcccggttcgcctatctgctctcgcggctcaaaaaaagcatgacaagccttttgtgctacctgcgggacgaacagaagcagtcctgcttccacccggcagcctgtgagctgcgcatcggctccggggaggatgccgtgcccgggcaggtgtatcatctctcggacgggcgcaccgtgcagctggtgggcacggtggaccgcgccgacgagtgggtggaggaaaacggcacccgctgggtgcgggtggtggactataagaccggtaccaaaaaactgaacctgaaagaggtatactgcgggctggactgccagatgcttttgtatctgttcagcctgacgcgggataagagcggccgctttaccggtgcggaaccggcaggcgtgctgtatctgctggcagacccggcccccaagaccaccaaccgccagcaggcacagcaggacgtgcagtacgagctggacggccttgtgagggacgagcagaaggtgttcgatgccatggatgcggatgagacgggccgctacctgccctttggctaccgcaacggtgtacccagccccagccagaaggataagcgtgccgatattgcaaagctcaaccgcatccagctgcatctggatgatcttgtcacccagatgggccagcagctttacgatgggcagatcgctgcggaaccgctggtggccggggcgggcaggaacccctgcgtctggtgcgactacagctttatctgctgccacgagaccggcatcggcgagcgggcactggaagctccggccaaaccctttgagccggaagaagccgacgacggaaaggaaggtgagcaggcatgagtgaacccaaatggaccccggcccagcgcgctgctattgaggaccggggtggtgcgctgctggtgagcgcagcggcgggcagcggcaaaacagccgtgctgaccgaacgcgccgtgcggctcatcaccgatccggaccacccggtggatgcggacaaactgctcatcgtcacctttaccaatgcggcggcggcagagctgcgggcacgcatcgggcaggcactgctgcggctcagccagcagcagccccacaacacgagcctgcgccgccagcggatgcttttgcagcgcgcacccatctgcaccattgacgcgttctgtctggacctgctgcacaagcactttcaggcactggacatcccgccggattttgccccggcagatcccggcagcgtggaggtgctgcgggcttcggcgctgtccgaaacgctggaaaatgcctaccgcgacccggacttctgtgcctttgcagacctttacggaaagggccgcaccgatcaggccgcaggcaataccatcctgcatgtgtacgattttctgcgcgctctgccggactacgaccgcaggctggacgaatatctgacaccatggcagcgggaaaacggctttgcttttacctgctggcatgacctgctgctggcggaagcggcccgctgcgcaaaggccgcgcgggaactgctgacggcagcactggcagactgtaaggaagattttgtccttgcacaggcacaggccgaggaaaaaggcaagaccgctgcttccaaggcaaaggccgtggccggtgtcaacgataaatttgcagagccgctctcccggctggaaagcgccgccgccctgctgggcgaggtggaacggctggctgcggcagggcagtggacaccgctgtatgataagctgacaccctatgtgctgggcatggaggagatgcccggcttcaagggcatgaaaaaacggctgaccggcgatcataaggcggcggtcaggacccgcgcagacgaagccgccaagctgtttgagcgcattacggagcttgtctcctgcagcgaggaggaagccgaagcggaccgcagagcggccctgccccggctgcgggccctgtttgccgcggtgcgggactttgacgcccgtttctcggcaaagaaaaaggagcgcaagctgctggaattcagcgattttgagcatcaggccctgcggctgctgcgcacaccggatggcgtgtgcaccccgctgtgccagagcatccggcagagctatgccgccgtgatggtggacgaatatcaggacaccaacgctttgcaggatgccatttaccgctgccttgcttccccggcgggggatgacctgttccttgtgggcgacctgaagcagagcatctaccgcttccgtcaggccgaccccagcatcttccgggctaagctgaacgcatgggcaccgttgcccagcggcactgcccgcccccgcccggaggagggtacggcaggcggaaacgcgctgctggcgctggatgccaacttccgctccgccccgcaggtggtggcaggcatcaactttatctttgaacagctcatgaccccccagctgggcgatacggcttacggcgacggccagcggctggtgtgcggtgcacccggcgaatacgccggcagcgtggaagcgcacttcctgcccgacgaaaccgctgagaccgacgcggcgtggatcgcccagcgcgttgaagaactggtgaaaaacggcgaaccagtgcgggacggcaactccacccgcccggtgcagtacgaggattgctgcatcctgctggcggcacgcggcgacttcctcgcttatgaggaagcgctcacggcccggggcatcccggtgtatgcggatgcgcgcgaaaacttgatggaagcagcgcacatccggccgctgatctcgcttttgaaggtcatcgacaacccggcgcaggatatctaccttgccgccgccatgctggggccgatgttcggctttacggacgacgaccttgtacgcctgcgtgcccagagcgccgcaatgcagaaaaaggcgcaggaggaacagggcgcgaaggaaacgggcaaaagggcttcccgcatgagtctgtacggcgcagtgctgcaggtggtgcagaatgacgatgaaacaccgttcacccgaaaggtgaaagacttttatgaccgactcaccgcactgcggcgcatggcccgcagtgccccggcagaacagctgctggaagagatctttgtctccaccggctatcttgctgcgctgggcgtactggaaaacggtgcgcaccgccgggaagatgcccggcgctttgcggctttctgtgcacagaccggagcaaacggcatctcggcgctggtgcgtgccatcgacgcggcggcgcaggccggttctaccgggcaggacactgtgcccggcggtgcgcggcctggctgtgtgaccattatgaccatccatcgctccaagggtctgcagttcccggtggtgttcgtgggcgacacggcccggcacttcaacctgagcgacacttaccagccggtgctgctgcaccgggaatacggcgcgggcctgcgcctgcgcccggaacagggcgagagcatgtacaagactgcagcctacgcagcccttgccagcgtccatgcacaggaaacgcgcagcgagcagatgcgccttttatatgtggcgctcacccgtgcacaggataagctgatcctcacggtgccgctgggcatgaccaagaccggcaatccctttgccaaggcggcagcattccttgctgcgggcgcgggagaaacgctgaaccagcaggcgggcagctttgccgactggctgcgtgcagcactgctggtgcatcccttcggcgggccgctgcggcggctggcaggagatctggaactgccttttgtgtttacggaaagcgagatcatggtcacggtgcaggaagctcagccggagccggaaacaccggaacaggaaccggaagcggcagagcctgttccggcagacccggcattggtggctcagctgcaggagggctttgcatggcggtatccggcggcaaaactggctgcggtgcccgccaaggtcagcgtgaccagcatcgtgcacaaggccgagcaggccacgctggaacgccctgcctttctctccaaggacggactgaccgccgccgagatgggcacggctctgcacgcttttctggaacatgcggactttgcctcccttgctgctgccaaagcggcgggcacgctggaggaagccatccttgcagagcgccagcggcaggtagacacccagctggtggccccggaaattgcggaaaaactcaatgcaggccgcatccgccgctttgccgagagcgaagcctttgcaaagatctgcgcagccgaaaaggtgctgcgggagctggccttcatcacggcgctgcccgcgtcggccgtgctgacggcacagggagcttccgcgcaggaagccgccgccgtgcaggatgagcaggtgctggtgcagggcattgcagaccttgtgctggtgttcccggatcatctggaactgctggattacaagaccgaccgccgcaagaccgaagcggacttcctgaacgcctaccgcccgcagctgaacctctatgcccttgccatcgataagcgctttgcgccgaagaaggtaacgtataagggtatctactcgctggagctggggaggctgatcgaggtgtaaactccttccgtcatcgctgcgcgatgccactgctcccctttttgtcacttgtgtgacatcttcccccggccgggggaagtctttctcattgagggaggctctggcgcagccgaaaagctgaccgtattgccaaaggctccctccttgagggagctggcgcacgaagtgcgactgaaggagttgattcatatttttcccgcaaaacgcataaaaagtgcttgacagcgctttctgcctgtggtagaataaccgggtaaagaaagcagctacggcctgtgccgcgctcgccttgcgagggaaagatcccccgggctatacctgaaggcagttcattatgagtggactgcggctttgagtgaatttttgcgcggctgtcctgaaaatgggcggccgcgttttctatgccaaatattgcaacaaaatggattttgtttggaggtgcattcattatcgctaccgctggaaagtcgaaggaactggagatcaacggtcagatccgtgaccgtgaggtccgtctgatcggtgcagacggcgagcagaagggcgttgtgtccattcaggtggccatgcgcgctgctgaagatgctggtctggatctggtcaagatcgcaccgcaggctgttccgcctgtgtgcaaggtgctggattacggcaagtaccgttttgaacagcagaagaaggagaaggaagccaagaagaaccagaaggtggtcgaagttaaagagacccgcctttcgctcaacattgacaccaacgacttcaataccaagctgaaccagactgccaagttcctggcagctggccacaaggttaaggtttcgatccgcttccgcggccgtgaaatggcgcacagtgctctgggtgcagacgtgctgaaacgttttgccgaggctctgcctcaggcatccaccgataagccgccggtgctcgagggccgcacgatgtccattctgctgatcccgaaacccaataaggactaattttaggaggaaactaaaatggctaagatgaaactgaagacgcactccggcgctaagaagcgctttaagctgaccaagaacggcaagatcaagcgcggccacgcattccgcagccacatcctgaccaagaagaccaccaagctgacccgtggctaccgtcagcccagctacgttgataagaccaacgcagctaccatcaagagcatgctgccctacgcctaagagcgagccgcaggcaaacacattctattgagacaactaaaggagatataaaaaatggcacgtatcaagggcgcaaccatgactcacaaacgtcgtaagaagatgctgaagctggccaagggcttctacggctgcaagagcaagcactttaagatggccaagcagcaggtcatgaagagcggcaactacgctctggctggccgccgcatgaagaagcgtcagttccgcaacctgtggatctgccgcatcaacaacgcagttcgtcctctgggcatgaactactccaccttcatggctggtctgaagaaggctggcatcgagctgaaccgcaagatgctgtctgagatggctattaacgatcccaagagctttgcagctctggtcgagaccgtcaagaacgcctgattaggaacttgaatcgtgacgcccgcgcgtatacgcgggcgtccgttttgtatccggggttcttacggcaggggaacatgtttttcagggcagcgccctgccgcaggaacgctttgtggcagacgctgccctttttgcattttttgaacaagacggcagactactttttgaacgacagtacagcgaaaggttgaatacacacgatggacgaaaaaatcaccagccgggaaaacgcaaagatcaaatacgcctgccgcctttcttccagcgcggcattccgccgcagcgagggctgctttctggccgagggccgcaagctctgcccggagcttgcccgcggtgcgcagctggagaccttattttatacggagagcgctatggcaaagtgcccggagcttgctggtctgcccggtgaacactaccttgtggaagaccatgtggccgataagctggccgatgtgggcacccatcagggggtgttcggcgtgttccgcaccccggtgcacacactggacgaagtgaaggccggcgggcggtatctggcgctggaacgggtgcaggaccccggcaacgtgggcaccctgctgcgctctgcagctgcctttggctttgacggcgtgatcctgagcgacggctgtgccagcgtgtgggcccccaagaccctgcgggcttccatgggagccgccgcgcgcatcccggtaatcgaagccggtgccatgcccgatgccatcacccagctgcgcgcaaaggggatcacctgccttgctgccgcgctgtacaagtctcagccgctgagcgcggcgcaggcaagctaccccggcggcgtctgcgtcgtcatcggcagcgagggtcagggcctgaccgatgagaccattgctgcctgcagcagcacggtgcgcatccccatgaccgaccgggtggaaagcctgaacgccggcattgcgggcagcatcctgctgtggcatttccgggaggaaagcttatgagcggccttgcagggcagaccagccttttcccgccggagcctgccccggatccgctgctgtgctggctgtggctggcccatgtgcttggcccggccagcgttcacgcgggccgtgtgctggatgcctttggcggtgcacaggaagcatgggaagcccgcgatacggcagaatttcgtcttgcagcgggggaggcagcagctctgcgggcgcagcagctggccccggaacagtaccacccgctggtgatgcggtgcgatgatctgggtgtgcgcatcctgccgtttgacgacccggactatccgctggcgttttcccgcatcccggatatgccgctggtgctctactgcaccggcgatccgctctggctcaacgagccgggcgcggtgggcatcgtgggcagccgcaagcctaccgaatacggtctgaacgcagcggcggacattggcggggaactggcccaaagcggcgctttgatcgtcagcggccttgcggacgggctggacagcgccgggcaccgcgctgctgtcaaaaacaactgccctaccattgctgtgatgggcgtgcccatcgaccgcacctatcctgcggccaatgtggtgctgcggcacaagatcgagcagaagggctgcgtgatcagtgagtacccgccccgcagtgagggcgttggcccaaatggatttttgcagcgcaaccggctcattgcggcgctcagctctgcattgctggtggtggaagcgcaggaaaaaagcggcaccatgtccaccgtgtctcacgccgaacgctatggcaagccggtgttcgcggtgccgggcagcatctactcgcccaattccgcaggcacaaacggccttttgcgggacggcagagcgtgtgccgtgtgttctgctgctgacctgcttggcccactgggcctgcgccggcagagcgcagcggcggtgacggcaaagcagccggagcctctgagcgagaacgagcggaaggtgctttcctgcatcgggccgcagccccttggcattgaggagctttgcgtgcgcagcggcctgcccacagcggtgctgctgggcaccctgatgaagttggagctttccggccgggtgttgtgcatgccgggcaagcggtatgtgataaaatagtataatttctgctggcgtagcacacaacagctgtggtatgatataaaaatagagaatcccgtactgtgcagttgcacggtgcgttcctgatagagaagaaagaaaatttgaaatgggagtaaactcgaatggcgaaactggttatcgtggagtcgcctgctaaggcgaaaaccattggcaagtatctgggcgatgattacgaggtcaccgcaagcatgggccatatccgtgacctgcccgcttcccagctgggcatcgatgtggagcacggctatgccccacagtacatcagcatcaaaggcaaggaaaagctcatcaaggaattgaagagcaaggccaaacacgcagacggcgtgctgctggcaaccgacccggaccgtgagggcgaagccatcagctggcatctggcaaacattctggggctggacccccacgagccgaaccgtgtgacctttgacgagatcaccaaaaagggcgtgaaggagggcatggcccatccccgcgccatcgacgaagatctgttcaacgcacagcaggcccgccgtgtgttggaccgtctggtgggctacaagctcagcccgttcctctggcgcaaggtgcgccggggcctttccgcaggccgcgtgcagagcgtggccgtgcgcctgatcgatgaccgcgaaaaggagatcgagagcttcaagcccgacgaatactggaacgtggatgccaccctcggcgcaggccacaagagttttaccgcccggctggccaccgatgccagcggcaaaaagctgctgcccaaaagcgaagccgaggcccgcgccattgaaaagggtctggaaggggccgagtacgtggtggcagagctgaaaaagggcaagcgggcaaagcagcccactccggcttttatcaccagtaccctgcagcaggaggcatcccgccgcttgggctttacggccacccgcaccatgcgcgctgcccagaccctgtacgaaggcgtggacattgcgggccacggcaccatgggtctgatcacctacatgcgtaccgacagcctgcgcatctcggatgaagccgttgccgccgcaaaggaatatatcgcaggggcttacggtgaagcctatatctgcccctacaagcgcacatggaagaccaagagcgccactgccgcacaggatgcccacgaggccatccgtccctcggtgccgtccctgacaccggacgaggtggacaagagcatcagcggcgacacagcaaagctctaccgcatgatctggagccgcttcatggccagccagatggcagactgccagcaggacaccgtgtccgtcacggtcagcgcggcggactaccgtttcaaggccagcggctataccgttacctttgacggcttcaccgtcctgtacgaggaagccaccgacgaaaaggaaaagaaggagaccgctctgcctccgctggagcagggtcaggtgctgaagctgcgcgacctcaagagcgagcagaagttcacccagccgcccgcccgctacaccgaagcgaccctcatcaaggcactggaagaaaacggcatcggccgtccctccacctatgcgcccatcatcaccaccatcatcgaccgcggctatgtggagcgcgaccagaaaaagctcaagcccaccctactgggccgggcggtggatggcctgatgctggaacagttcccccacatcgtggatgtggacttctccgcccagatggaaaagaatctggataagatcgagagcggcaaggctgactggcacaagacggtggatgacttctaccagggctttgcggcaagcctcgagcaggccgaaaagaacatggaaggcaagaaggtcaaggtgccggatgagccttccagtgaggtatgcgacctgtgcggccggcccatggtcatcaaggtgggcaagtacggcaagtttttggcctgcagcggcttcccggagtgccggggcacaaagcggctggttaaggataccggcggcatctgccccaagtgcggcaaaggccgtatgctggagcgcaaaagctccaagggccgcatctattatggctgcgagcgctacccggactgcgactttatgacatgggacatgccggtgcccaccaagtgccccaagtgcggcagcaccatgttccgcaaaggctccaagctgtattgcgcaaaggaaggctgcggctacgagatgccggtgccgaaaaaggactaaaaggataaaactatgaactataaagtaaccgtgctgggcgctggtcttgcgggctgtgaagccgccctctggctggctggcaagggcgtgcaggtagacctgtacgaacagaagcccgtgcatttttcgcccgcacacaaaagcgcaggctttgcagagctgatctgctctaacagcctgaaagctgagcggctggactctgcttccggcctgctgaaggaagagatgcggcggatgggcagccagctgctgaacgccgccgagacggcccgcgtggccgctggcggtgcgctggcggtggaccgcgacgcattcagcgccgaagtgacccgcatggtggaaagctgtgaaaatatcaccgtccaccgggagcaggtggagcacatcgatgcatctgcccccattctggtggctaccggcccattgaccgacggcgcactggccgatgagatcggggccttgaccggggacgagcggctgcacttctacgatgctgtggcccccatcgtcaccgccgagagtctggactacaacaaggtgtttgccgcctcccgctatgaccggggcgaggccgactacctgaactgccccttcaacaaggaagagtacgagaatttccacgcagctctcgcttcggcagagcgtgcccctctgcacgactttgacaccggggccgagcagtctgctcagcccgacccggatgcccacggcaaaaaggccgataccgtcaccgtgtatgagggctgtatgcccatcgagatcatggccgcccgcggtgccgacaccatgcgcttcggcccgctgcgcccggtgggccttgtgaatcccaacaccggccaccgtccgtgggccaatgtccagctgcgggccgaaaataaggaacgcaccctgtataacatcgtgggcttccagaccaacctcaagtggggcgaacagaagcgggtgttcagcatgatccccgggctggaaaatgccgagttcgtgcggtacggtgtcatgcaccgcaacaccttcctcgatgcgccccgggtgctcagcgcccagctgtgcctgaaagaacaccccaatgtgttctttgcgggccagatcaccggctttgagggctatatggaaagcgctgcctgcggcctgctggcggcccgcagcctgtatgcccggctggaaggcaaagaactgcccgccccgcctgtggatactatgtgcggtgcgctggtgcagtacctgaccaccgagaacaagaacttccagcccatgggcgcgaatatgggcatccttcctccgctgccggaggagagccgcccgcgggacaagcgcctgcgttacatggcacaggctcagcgcgctgttgccagcttccagcactggctggatgaaacttctctttaagaagggagaaaagctatgaagattatcgtggatatgatgggcggcgacaacgcccctctggccgtgctggagggtgccgcacaggctgtcaaggagtacggtgtgcagcttatcggcgtgggtaacgaggcgctggtgcgcaagaccgctgccgagcacagcatcccgctggacggcattgagctggtgaactgcaccgaggttatcgacatgtgcgatgagcctgcccgtgccatccgccagaagaaggattcctccatcgtggtgggcctgaacatgctgaaagacggcaagggcgacgcctttgtttccgccggcagcaccggtgcgctgcatgtgggcgcaagcctgatcgtgcgcaccctcaagggcatcaagcgcccggctctggctaccatggtgcccgccaaaaagcaggcttatctgctgctggactgcggtgccaatgtggagtgccgccctgagatgctggcggcttttgccgtgatgggcagctgctatgtgaacagggtggagggccgccgcagccccagcgtggcgctcgccaacaacggtgcggaggagagcaaaggcacccccatgctcaaggaagcacaccagctgctcaagaccacccccggcatccgctttgtaggcaatattgagccccgcgatgtgcccaatggcgaagtggacgttgtggtgtgcgacggctttaccggcaatgtgatcctcaagctgaccgagggcgtggcaaaaatgctgctgggcatgctgaagcaaatgttcctcgcaaacctcggcggcaagctggcctacctgctgctcaagggcagcgtggcagacctgaagcaccagatggacagcgaggagtacggcggcgcacccttcctgggggccaagcagccggtcatcaaggcccacggctcttccaaggccaagggcatcaagaacgccatccgtcaggcaaagatctgcgtggagaacgatctgtgcggcaccatgcagtctgcgctggacgagctggctgcggcacagaaaactgaggaataagggaagcgggcttgccctctccgtcattgctttgcaatgccacattccccactctgtcgctattgcgacatctctccccggccggggagagtctttcctcagagtgagaggctttggcagttcgtgcagactgcatcgatttgccaagggctccccctttgggggagctggcgaacggacgtgagcctgagagggcgaggatgctgaccatcaataagggagctaaaacatatgagccatcagttggaaacaattattggttataagttcaaaaacccggagctgctggagatcgcgctcacccataccagctatgccaacgagagccgcaccccggtcaagcacaacgagcggctggaatttctgggcgacagcgtgctgcagatcgtctcggcagactatctgttccacgcctatgccgaccggccggagggcgatttgacccgcatccgcgccagccttgtcagcgaaggtgcactgttccagttcgcgcaggagatcgatctgggcgagtacctgcgccttggccgcggcgaggagcgctgcggcggacgcacccgccccagcgtggtgtccgatgcgtttgaagcgctgatcgcggctttgtatctggatggcggcatggatgtggcccgcagcttcatcctgccctttatcaccgagggcaagcacgccgaggccgactacaagacccgcctgcaggagatcgtgcagcagaacccggaagagcggttgagctatgtagtagaaagcgagtccggcccggatcacgacaagcatttcgtggtggcggtgcggttcaactctgaccgcgtggcccgtggcgaaggccgcagcaaaaaggctgctgagcagtgcgccgcaaaagaagcgctcaagctgctgggcgtgataaaggaaaagtaaatggtattcaaggaactggagatccagggcttcaagagctttcccgataaagtcaaaattcggttcgacgcaggcgttaccggcgtggtgggtcccaacggctccggcaagtcgaacctttcggacgcagtgcgctgggtgctgggcgagaccagctcccgccagctgcgcgcggcgggcaagatggaggacgtgatcttcggcggcacccggcggcgcggagccatgggctttgcgcaggtgcggctgacgctggataacgcagaccacacctttgatttggatgcggacgaagtgaccattggccgcaaatattaccgctccggcgacagcgagtataccatcaacgggcaggtgtgccggttgaaggatgtgtacgaacttttgctcgataccggcattggccgcgacggctactcggtcatcgggcagggccgcatcgcggagatcgtggccgcaaaaagcagtgagcgccgcgagatctttgaggaagcctgcggcattgccaagtaccgctaccgcaagaccgaggcagaacgccgccttgctgcggcgggcgaaaaccttgaacgcctgcgggacatccttggcgagctggaaagccgggtaggcccgctggaaaaagagagcgccaaggcagaaaagttcctcgagctggccgcacagcgcaaaacgctggaagtgaccctgtggaccgacggtgtgcaccgcgcgcgtgaagccgtgcgccagcaggtgcgggactacgagacagcacaggccgactacgagcgctttgaccgggagacgaaagccgccgagcaggaggctgaggagatccggatgcaggcacagcagcttacggttgctgttgagcgcctgaatggggatatccgcagcatcaccgagcagatcagcgggtcggaaagccgtatcgctgtgctggaaaacgacatcctccgcaacgaggagagcgccgcatccctgcaggaagagatcagcgccggggaacaggacagcaccgaggcacaggccgccttgcagcgccaccgtgccgtggcaaagaccatggaagcggagggcgaaaagctggcggcagagatcgaggcactgaacgcggagatcgcacgtctgaccgatgccagcagtgccagcggtgcccgcaaggataccctgaaagcagaacttgccggcctgacagcccggcgcaccgaagcgcaggtggcgcaggccgctgccgaagctgccggggaaacagcccgccagcgcctgcctgcccttgagcagagcgtgcaggaaagcaccgcccagcgggacgaagcaaagcaggatttggacgacaccatcaagtatcgccggatgctggaagaaaacgagaagcagctggcaaatgtccgttccggcatggaactcaagctgaaaggccgcaaggctgcgctggacgatgccgacgcagcagagcagtgccttggccgtgagctggatgcggcccgccagcgcctttccgtgctgcgggaactggaaaagaacatggacggctaccagaactcggtcaaggccgtcatgcgtgctgccggtgcacgccgcctgcggggcatcatcgggccggtgtccgccatcttaaaggtggagccgggctgtgaagtggctgtggaaacggctctgggcggtgcgctgcagaacatcgtggtagagaacgaagccgctgccaaagcggccattgccctgctgcgcaatgacaatgcaggccgcgccaccttcctgccgctggataccgtccagcctggcgtgttccgtggccgactctccggtacggcacggcttgcctccagtctggtgcaggccgaccgccggtatgacaacatcgtatcgaacctgctgggccgcatcatcgtggtggacgacatcaacgaagcctcccgcgtggcgcgggacaacggcttccgcagcaaggtggtcaccatggatggtcaggtgatcaatgcaggcggcagctttaccggcggcagtgtccagcgcagcgcaggcctgttcacccgcaagcaggagatggaagagctgcgggtaaaggctgcaaaactgcagaaggactgccttgccgcgcaggaaaagaccgaccgctgcaaagagcaggtagatgcccttcaggcagagctgaccgccacggccagtgaacagatcaccgccgccaacgacaaagtgcgtgccgaggcagagcagaagcggctggaagctgctgccgcccagctggaaacggcccgcagcaacggccagcagcagatcgacgctttgcaggcggccttgacagagagccgtggcaaagcagaggaagctgccagcctgcaggcccggctgacggcaaagatcgacctgctgacggcggagatgaaccgaattgccgaaggtgacgacaactttgtggcccagcagaccgaactgagccaaaagctcagcgcaaagcggctggaacaggtgacccgccagaaggatgcagagctggcctacagccagatcgcagcgctgcaacagcgggcacaggatgccgctgcccgccgcgccacgctggaagaaagccttgtggcactggcacagcgcagcgagagctgccgggcagaaattgcagccatccggcaggcaaagtccgacagccagaccgagatcgcccaaaaagaaaaggccatccgggaagccacggaacagcggctggaacgccagcaggctgaaacagcagcattgagccgggcgcgtacttcctccgacagccgcgaggaaatggggcgcgagatggcccgccttgcagagcgcaaggccgctgccgagaccgagtacgaccagaccgtggcaaagctgtgggatgaataccagctctcggtcagtcaggcagagaacctttgcgtggagtttgaaagcctgacggccctgcgcgcacaggtggccgacctgcgcggcaaaattcgcgcccttagcagcgtgaatgtgagcgccatcgaggaatacaaggaggtcaaggcccgctacgatgccctgatgcatcaggtgaccgatgtggaggaaagccgcaatgagctgacccgcatgatctccaagctttcggcacagatgcgggagatcttctccgacagcttccgcgccatcaacgaaaactttggccgcgtatttaccgagctgttcggcggcggcgaagccagccttgtgctggaggatgaaagcgatgtgctctcctgcggcattggcatccgggtggcaccgccgggcaaggtgatcaagaatctggaagcgctttccggcggcgagcaggcgctggtggccatcagcatctactttgccattctggcggtcaacccggccccgttctgtattctggacgagatcgaagccgctctggacgatgccaatgtggtgcgttttgcccagtacttacgccgggtgagcgacaagacccagttcatcgtcatcacccaccgccgcggcacaatggaagccgcgaatgtgctttacggcgttaccatgcaggaggacggcgtgtccaagctgctcaagcttgatctggaacaggttgacgcaacgctggtttcctgatatatattaaagaaaaagataggaggacaccatggggttcttcggatttggcaagaaaaacaaagaaaaagaacaggaaaaaatgaaaacgggtctggaaaagacccgcaccggtttctggggcaatatcctcaacaccctcaccggcagcgtcatcgacgatgatatgtacgatgatctggaagagcagctcatccttgcggatgtgggcggcgaggtggccgtgcgtctggtggacaagctgcgcgaccgtgtgcacgaaaagggcctgaagaccggcgaagaggcggcggatgccctgcgcgacatcattgccgaggaaatgacaccggatgccgagatggatctttccggcaagccggccgtcattctggtcattggcgtgaacggcgtgggcaagaccaccagcattgccaagctggccgatcactatacccgcgagggcaaaaaggtgatgctggccgcaggcgataccttccgtgccgcagccagcgaacagctggagatctgggccgaccgcgccggtgtgcccattgtgagcgcaggcgagggcgcagacccggcggctgtcattttcgacaccgtaaagtctgccaccgcacgcggttatgacatggtcattgccgacaccgcaggccgtttgcacaacaaggcaaacctgatggcagagctttccaagatcagccgcagcgtcaagaaggccagcccggaagccagccttgaaacgctgctggtgctggatgccatcaccggccagaacgccatcagtcaggccaaggaattctgcaaggctgcagatgctaccggcatcatcctgaccaagctggacggcaccgccaagggcggctgcgtggtagcggtcaaacagcgtctgggactgccggtgcgcttcatcggcgtgggcgagggcatcgacgacctgctgccctttaccccggagggctttgtggaagagctgctcccgcgccagtggaagcactaaggagggtcgcagcatgaaaatttgtgcagccaccggcaacgccggaaagctccgcgaactgcgccgcattctggaagcgcagggccacgaggtggtcagccagaagcagctgggcatcaccattgagccggaggagaccggcaccacctttgccgagaacgccctcatcaaggctgaaaccatctgcaaggcatgcggcctgcccaccatcgccgatgactccggcctgtgcgtggaggcgctgggcggtgcgcccggcgtgtacagcgcccgctactgcggccgccacggcgacgacgaagccaacaacgataagcttctggatgccatgcaggctgtgcctgccgggcagcggggtgcaaagttcgtgtccgcggtgtgcttcatcctgccggatgggcggcatctgacctgcatgggcgagtgcccgggcagcatcgcctttgaacggctgtgcggggactacggctttggctacgacccgctgttcatccccgccgactgcggcgtgggaaagcacgataagcgccccaacaccgagggccgcagctacgcccagctgaccccggatgaaaaggacgccatcagccaccgcggcaatgcgctggcggtgctggaacaacagctgccgggatttctggcagaatgaactcccccagtctgcttcgcagacagattcccctttttgtcacctacggtgacatcttcccccggccgggggaagtcgtcctcggagatggggcctttggcagtccggcaagcgtttcgtttctgccaaaggctccctctttgagggagctggcaaagccgcaaggctttgactgaaggagtttctcaccacaagcggagacaattctaaatcgtttctttatcgaaatatcaacctcaaaataaaggagaaaaactatgctgacaagcaaacagcgcgccattctgcgcggcaaggcaaacaccatggaccccgttttcatcgtgggtaagggcgagatcgacgagaccatgatccagggcgtgaaggactgtctggatgcccgtgagctcatcaagctcaaggtgctggaaaacagcatgtacaatgcccgtgaagcttcggtcaagctggctgaggccaccggtgccgactgcgtacaggtgatcggctccaagttcgtgctgtatctgcagaagaaaaaggacagcgcctacgctgatctgctgaagtaaaaatgaaagttcttctctacggcggtacatttgacccgccccataacggacacctgaacaatctgcgcgctgccgctgcccgcgtgcagccggataaggtggtggtgatgcctgccggactttcgcccttcaagcagaagacctctgcgtcgggcgcactgcggctggaaatgtgtagctgcttccatgcactggaagaggatgcggacacgatcccgcagctggaagtcagcggctgggagatcgagcaggccgctgccggaaaccgcaactatacggtgctcacggtggaaaaactggcccgggactaccccggggcacagctgtaccttgccattggcagcgatatgctgctaagctttgacggctggcaccgctggcaggatatcctgcgccttgcccatctggtggtcaccagccgccatgtgggcgacgaccccgagctgcacgcaaaggctctccggctggaccccaccggggcacgcatcctgtttgcaccggtacaggcgctgcccatggccagcagcgacatccgcacccgtctgactgcaggcgaaggatgtgaagctgagctgccggaggcggtgcgggcggtcatccgccgggagaaactctacaaaaaggaagtatcagccaatgaacctcaaacaggcaaaggagcttgtgcgcggccgcttgagcgataagcgctatgagcataccttgaatgtaaaaaaaatggccgtcaagctggcaaagatctacggtgaggatgaggagcgcgccgcgctggcagccctgctgcacgactcggccaaggagatcagcaaggatgagatgcgcgagatcctgcgcgcttacccccagtatgccgagggcggcgaagagcgcccggccccggtgtggcacggcgtgtgcgccgccattctggcccgcacccagtggggtgtgaccgacgaagcggtgcttagcgctattgcctgccacacggcgggcaaacccggcatgacccggcttgacaaaattttgtatctggccgatatgaccagcgcggagcgggattggcccggcgtggaaaagctgcgcaagctggaaaaaaagaatctggatgccgctatgctggccgcgctgaagcagaccaacgattttgtgctctcgcagggcaagccccttgacccgatgtccaaggctgcctatgaggatatccttgcccgcagcgggaagaatgaacggtgagagcacagcggctctgaaacaagcggaaacagaaaacggattgcagatttcgtcggataatgctatacttaagagcatgacaggtctgcaggaacattttttgcaggaccgcgaaaatctggaggatacaaaaaagcatgagccagacgccacgccatatcaatacttcgcgttctctgaaccggccggatccggcagcagccgcaccgcgccacgctgcgtccagcacggatgcaaagcagagcgcaggcggtgcacacaatgagccgccgcgccgcccggcacagggagcagggcagaagccgccgcgccgccgcaaaaagaaaaagaaaatgcccctctggctgccttttgcagtggtcatggccatcatcgcggtgatctccggtgtggtggtatacggagtcagccttgtaaacaaggtggaggacagcatccgtccggacgacagcacccccaccattgaggaagaggtcaagacagccgaggaatacaagggcgatgtggtgaacattctggtctgcggcatcgactatgaagagggccgcaattattccaacgaccccacctctaacgacggcatgaccgatatgatcctgtacgtgcagttcgacatcaagaacggtgcactgcggatgctgcagatcccccgcaacagccttgtcaccaccaagaacaaaaagatcaccctttccaatggcaagacctacgccgccacgaattatcagatcaactcggtggcaatctccaatggcggcagcatcgccgctctggccgatgtcatctacgatcagttccgactgcccatcgattactatgtgacggtggatatgcaggcactggtggatatggtggataactttggcggcattgaggtgtatatccctcacgatatgtcctacggcggcagcaagctgctcaagggctaccgcaatctgaacggtgcatcggcagagttctttgtgcgctgccgccacggcgacggctacgccaattccgatatcgaccgcctgaacatgcagcgctatttctatgccggcctgttcaagcgtgcccgcgccatgggcgttaccgatatcctgaaccagctgccgctggtgttcaagaactatatcaagacggatatggacatttccaccattgcaaagctggtggtgtccttcctcaaactcgacagctccaacatcattctggcgcagacgccggtgttcatgggtgtgcccaacgtgggcaagaccgacacctttgccggttactcctgcgtggtgccggatgcgggttccattgcaaacctgctcaaccagtatttctgcacctacaccggccccattgatgtgagcgaaatgaaccttgtcaccgacgagtggccccacggcagtgcatccaccgatgccaacgtgcagtatatgggccgcatcgataaggagtcggacgatgctatcctgaacggcgatacagaccttgatggcgctgttaccaccgacggtcaggccgcaggctccgcaaactgaaactgacagaaaggaaaaacatatggagaacttcaacgacagcaaggcgcttgccattgagatcgcaaagatcctggataagaaaaaggcccacgatgtgcgcgtgctcaaggtggaaagcctgaccgtgctcaccgattattttgtcattgcctccggcacttccaccacgcaggtggcatctctggccgatgaggtggaatttgagctttctcagaaggggctggaaccctacagcaccgagggctacgattccaagaactgggtgctgctggattattccaacgtcatcgtgcacgtattcgtgcccaacacccgcacctactacgatctggaacacctgtgggcagacggtgagcccattgatatctccgagtacctcacccccgacagcacccttgaatgattcaggcaaacaggtctgcttctggcaaaaccctctccgtcatcgctgcgcgatgccacctctccccaaagggagaggttttggcgcaatagggaaagttggcaaaaaagctcccctctcgggggagctggcagggcgaatgccctgactgagagggtctataccggaagcaccttgaaagcatacgcccccaagcaacggtattttggataaagtctggagctgattaacaacatgaagtacgattacaaggcagttgaagccaagtggcagaaggtgtgggaggacgaaaagaccttccatgtcgagatcgaccacaaaaaacccaagttctatgcactggtcgagttcccgtatccgtcgggtgccggcctgcatgtaggccatccccgcagctacaccgcgctggacgtggtcagccgcaagcgccgtcagaacggctacaatgtgctgtaccccatgggctgggacgcttttggcctgcccactgagaactttgccatgaagaaccacatccacccggccattgtcaccaagaacaatgtggaccacttccgcagccagctgaaggctctgggcttctcctttgactgggaccgcgagatcaataccaccgaccccgagtactacaagtggacccagtggatcttcctgcagctgtataagcatggtctggcttacaagaaggaaatgaacgtcaactggtgcaccggctgcaagtgcgtgctggccaacgaggaagttgtcaacggcgtgtgcgagcgctgcggcagcgaggtcgttcaccgcgtcaagagccagtggatgctcaagatcaccgcttatgccgataagctgatcgatggtctggacggtctggattacattgagcgcgttgccacccagcagaagaactggatcggccgcagccacggcgcagaagtcaacttcggcaccaccgcaggcgataccctgaccgtgtacaccacccgctgtgacaccctgtttggtgccacctacatggtcgtctccccggagcatgccatggtcaaggagtggctggacaagggcatcctcaagaatgccgatgccgtcaaggcctatcaggccgaggcggcccgcaaaagcgactttgagcgcagcgagctgaacaaggaaaagaccggtgtcaagctggaaggcgtcatgggcatcaacccggtcaacgataccgagatccccattttcatctccgactacgttctgtccacctacggcaccggtgctatcatggctgtgcccgcccacgatacccgcgactgggagtttgccaagaagttcggcctgcccatcatcgaggtggtcaagggcaataccccgtccaatctggacgaagccgccttcaccgatgtggccaccggcacgctggtcaactccggcttcctgaacggcctgtctgtcaccgatgcaaagaaaaagatgatcgactggctggaggcaaacggcaagggctgcgataaggtcaactacaagctgcgcgactgggtgttcagccgtcagcgctactggggcgaacccatccccatggtcaagtgtgaaaagtgcggctggcagcccctgcccgagagcagcctgcccctgaccctgccggacatcaccgattttgagccgggtccggacggagaatctccgctggcccgccacaaggactgggtcaagactacttgcccctgctgcggcggccccgctacccgcgagactgacaccatgccccagtgggccggttcttcctggtacttcctgcgctacatggacccccactgcaaggatgccattgcttccaaggaagctctggaatactggtctccggtagactggtacaacggcggcatggagcacaccaccctgcatctgctgtacagccgtttctggcataagttcctgtatgatatcggcgctgtgccttctccggaaccctaccagaagcgcaccgctcacggcatgatcctgggcctgaacccccacagctttgtcaacctgcccgctgaggagcaggaaaagctgctgaaggagtacggcagccagaaggccgctgaaaaggctctggaagaaaagtacggcgaaatgtcacgccaccccatcgtgaagatgtccaagtctctgggcaacgtcatcaacccggacgaggtggtggaccagtacggtgctgacaccatacgtctgtacgagatgttcatgggcgactttgaacaggctgcaccgtggcagacctctgccattgcaggctgcaaccgcttcctggaccgcgtgtggacgctgagcgacaagctggtggagggcgagggctatcgcccgcaggtcgagaccctgatgcaccagaccatcaagaaggtgggcgctgacatcgagaccctgaagatgaacaccgccattgcccagctcatgacgctggtgaacgccctgtacgacaacggcggcgcgaccaaggccgagctggagaccgttgtccagctgctgaacccgtttgctccccacatgaccgaagagctgtgggagaagctgggccacagccacgacgagcagctggcttactacccctggcccaagtacgaagaggccaagtgcgtggaaagcacagtggagatcgctgtgcaggtgaacggcaaggtgaaggcccgcctgaaggtggctgccgacattgacgctgctgccgccattgctgccgccaaggctgaccccgctgttgctgccgctctggaaggcaagcagctggtcaaggagatctacgtcaagggccgtctggtcaatctggctgtcaagggctaaaccaaccgataccctgccgaaaggctggatatacaactacccgcagaggcggactggcgcataaaacacccgggaacgtttattcaaaatcttttcaaagattttgcgcaaaaaactttcaaaaaaaggttgacgaaccggagaaaatgcgctatactgtctactgttagttaccatgtaacaacgaaattcctgcctcacggtccaagggagggaataagatgtcggaaattcgtgttaaagagggcgagtcgctggaaagcgcactgcgtcgcttcaagcgcagcaccgctcgcagcggtgtgctcgcagaggtccgtaagcgcgaggcttacgagaagccgtctgtcaagcgcaagaagaagtccgaagcagcccgcaagcgcaagttcaagtaattgatcacttgaagtcgctgttgctttagatttcatacgcgttgctaacgccgatgtaggggagcctgtattgcaggctcccctattttcattgcagggagaaatactatgctcatcacccccgaatacgttttcaaggatgtcacccacatcacgccggaatggctggcggcaaaaggcatcactgcgctggtgctggatatcgataacaccctcaccgccgaccgcagtcaggagctgccggaagatgtggccgtgtggttggacactatgcgcagggcgggtgtcaggctcaccatcgtgtccaacggtgcggaaaagcgggtgcggccctttgcccagaagctgggccttgcgtacctgtaccgctccgcaaagccgctgccctttgctctgatggtagcgcagcaccgcatgggcgtgaagcaccgtcagatggcgatggtgggcgaccagctctatgccgaccgcatggcggcagcgctgtacggcattccgggcttgatggtggtgccccgcggcccggacctcggtgcgcaggtcatcctcaagcgtaagtgggagaaaaaacactggcagaaatactatgaccggggaggcaagaccctgtgagcgattggaagatccggttcggcaccgcaggcaccagcgacagctttgccgcccaaggctacaaaagcagcttggatgtgccggagtacaccgcaaagatgggactgaacgccttcgagtaccagtgcgggcgcggcgtgcgtctggggctggacaaggctgcaaaaatggccgcactggccgggccaaaggatatcctgttcagcgtgcatgcaccgtattatatcagcatgtccagtctggaagaggaaaagcggctcaacagcatccagtatctgctgcaaagtgcggcggtgtgcaaagcgctgggcggcagacgcatcatcttccactccggcagctgcggcaagcagagccgggaagcggcccttgaaaaagcattggataccatgcgccgtgccgtggaagcgctggacgaagcaggctttgccgatatgactctctgcccggaaaccatgggcaagatcggccagctgggcacactggacgaggtgctggcgctgtgcagcgtggataagcgcattatgccctgcatcgacttcggccacctgaatgcccgcactctgggcggcatccgctcgaaagaggactacgctgccatccttgaccgcatggcagaaaagctgggggaccaacgggcagaacggttccatgtgcatttttcccgcatcgagtattcggcgggcggcgaaaagcgccactggacctttgccgagacccagttcggcccggagccgcagccgctgatggaactgctggctgagcggaagctgcagccggttatcatctgtgagagcgcaggcacgcaggctgaggatgccggggctatgcagcagatgtaccatgcagcgtgcaaaacgtaaaaaattttgtgtttttatcgtcttttttgccgaaaccccttgccaaatgcaaacggattgggtaaaataaatagagatatgcgttaagcatttgagattaaactaatggaggaattcctatgatttctgcaggcgagtttcgcaatggcgtgacctttgagcaggacggccaggttcttcaggtcgttgagttccagcacgtgaagcccggcaagggcgctgcctttgtccgtaccaagaccaagaacgtgattaccggctctgtggttgagaccagctacaacccgaccgcaaagttcccgcaggctttcatcgagcgcaaggacgtgacctatagctacgaggatggcgatctgtaccacttcatggacaacgagacctacgatgacatccccgtcaacgcagccgatgtgcccgataacttcaagttctgcaaggagaacgagctgtgcaagctgctgagctacaagggcaaggtgttcagcgtcgagatccccaacttcatcgagctggaagttacccagaccgagccgggtgtcaagggcaacactgccaccaacaccctgaagcccgctaccgtcgagaccggtgctgagattcgtgtgcctctgttcatcaacgagggtgaccacatccgcatcgatacccgcaccggcgagtatatggagcgcgtctgatccctttaacgccaaaccgggctgcgggcaaccgtctgcccggttttttaaaactccgattttttcattttaaggagggcattcgtatggaactgaacaaaaaggcagcttatctgcagggtctggtcgatggtctgggcattgatgataccaccaaggagggcaagatcatcaaggccatgagcgcactgctgggtgaaatggctgaggtcatcgagagcgtggacgaagatctttcccgcgcctacgaccagatcaacgacctgagcgatgagctggaagatctggaagcagatctgtacgaggatgaggacgaagacggcgaaagcgaggacgctgaggatgaggactccgacggcgacgacgatgacgatgccaaggatgatgacatcgccagcgagccgttctatgaagtggcctgccccaactgcggcgagaccgtttacgtcagcgaggatgatctggatgcaggcgaagccaactgcgcgcactgcggcgtgacctttgaggtcgctctggaaggggacggcgaagaggatgccgaggatggccccgtgcagtacgaagtgacctgcccggactgcggcaccaccgccgtgtttgaggaagacgaactgctggacggcgcacctaagtgcccgaactgcggcaagcccctcgactttgaagtgaccgaagaataagcaaaaaagaccgctgcactccggtgcagcggtctttttttgtttactgtgcgtttgccttctgcagccagatgctgccgatgtccaaagcgttgtacaggccgatcttggtggtctgacgcatcacgcgttcctgcggagccttggtggtgtcggtagagagcagcatcaggtggaccttgtctgcaacctgctggtcgcccacaggcttggtggtcgtgatctgcagatagagcacatatgggtcggtcatattgccgtagtacagctcattgtccttgcggacgaggggcttgcctttataagtcagttttggagtaaatgccatcgtgaaagcctccctatcaatagtagttcagttcagtataacacatctatggtacaggatgcaagcttttgacccgatagaaggcgggctttttgcacacaatggcatgcctgcgtgcaaaagaatctgcaattttaggcactctggcagaaaacgggtcttgccggaatgcacagatatggtatactaagaacgagaaagcccgcagcatagcccgggcagaaaagtgagggagacagcatggcagactatcaggaataccggcggcgcgtgttgcgcaaacgctggcgcaggcggttcatggcgacagctttgctgctgctgcttttgctggtgggagccatcgggatgttgtggaagagcctgcaccgggaacagcggccctccggcgttgggcagaacaccatcctgcaggaggtaacacaggataatacttggaacacggcctcctacgcggtggcgcggcagctcacggtgcagacgcttgcagacagcgcggccactgcgctggatttccgtatggcggcgctgccaaagagcagcacggctgtgggcaaggaatggttcaatgacgtgagctttgtgggcgacagcctgacgcagggcatgcagctgtacgaagaaggaatgcagaacgccatgttctgtgcgtacaagggtgttgggccgaacgtgatcgtcaatggcaccacctgcaagcgtgccgacggcgtgactgaggtgccgctggaagcgttgaccgcccagcagcccagagctatttatgttctgttgggcaccaacgtgctgggccgcgataccgattatagcagctttctgacctattaccggctgatgctggacatgctgagccagacactgccaaatgcaaagatctatgtgcagtccatcacgccggtgcggccggaagtatgccagaagtccggccatgagggcttgaaccgcgaccgcctgtgccagatcaacaatgagctggcagccattgcgctggaaaagaactgctattttctcaacctgtgggaagtgctggcagatgaaaacggcgacctgatcgaaagctacgcccagccggacggctaccatctgagacccgccgggtatgccgcatggacggattatctgtgcagccacacagaaggataaaaaataagaggttcgttcactgagcgaacctcttattttttacttgaaacttagaacaggccggtgatcttgccgtcggcatccacatcgatgcccacagcggcgggcttcttgggcaggcccggcatggtcatgatattaccgcagatgaccaccacaaagcctgcaccggcagcaaggcgcacctcgcgcacctccatggtaaagccggtgggggcaccgatgagcttggcgttgtcgctgaagctgtactgggtcttggcgatgcagacaggcagattcccgtagcccatgtcggtgagctcagccaatgtcttgctggcggcggcgctgtagttcacaccgtcggcccggtaaattttggtggcgatggcgttgatcttgtccttcaggggcatttccagcgggtaggtgtactggatgggacgatcctccagcacctccagcaccttctcggccagcgccttgccgccctcgccgcccttggcgaatacctcgctcagcacgcagggaacaccctgctcggcgcacacctgctccacgtaggcctgctcttcggcggtatcggtggggaaggcattgatggcgaccaccaccggcaggccgaagccatttttcaggttgtcgatgtggcggatgaggttggatgcaccggccttgacggcttcgaggttgggctggctcaggtcggcctttgccacgccaccgtggctcttgagggcacgcacagtggccaccagcacgcaggcagagggagcgataccggcgtagcggcacttgatatccaaaaacttctctgcgcccagatcagcaccaaagcctgcttcagtgatggtatagtcggccagagaaaggctcagcttggtagccagcacgctgttgcagccgtgggcgatgttggcaaagggaccgccgtggatgatggcggggttgttttccagcgtctgtacaaggttcgggtccagcgcgtccttcagcagggcggtcatggcaccggcagcaccgatctcaccggcagtgacgggcttgccgtcgtaggtgtaggcgcatacgatcttggaaagacgctccttcagatcggaaatgctggtggcaaggcagaaaattgccatcacctcgctggcaacggtgatatcaaagccgtcctcgcggggggtgccgttcaccttgccgcccagaccgtccacgatgaaccgcagctggcggtcgttcatgtccatgcagcgcttccatgtgatgcggcgggggtcgatgttcagcgggttgccctgctggatgctgttgtcgatcatggcggccagcaggttgttggccgtgccgatggcgtgcaggtcgccggtgaagtgcaggttgatatcctccatgggcactacctgtgcgtatccgccgccggctgcgccgcccttgacaccgaacacggggccgagggacggctcacgcaggcagagcatggtctttttgcccagagcgttcatggcatcggccagacccacgctggtggtggtcttgccctcgcccgccggggtggggctgatggcagtgacaagaatcagcttgccctgctttttggcatcgtggatcaggcggtgatcgatcttggccttgtagcggccatagggaatcacgtgctcatcggaaaggcccagctgggcggcgatctcggtgatgggtctcattttggcttcctgtgcgatctcgatatcggttttcatcagacatcctcctttggaagtcgtttttacaagcattgcacgccgcctgaacggcctttttgctcgcatcctgcgttgctttctcttgcaatccgtcaggattgctgcgaaaaatcgccttgtctgcgggcaaaaaatcccgccattcaacgcaccctgcttataaaaacaacttccgacaacaaaaaaggcagctttgcgcagcaattgcgcaaggctgcccagacggtcggcattgactctcccgccatccctgcactgtggtgctccacaaggttccgtcagcagagatacggtctctatgcagtaaagatagcacaatgccggggtgtttgtcaaggaaaaacatatacgaacttgtcggggcgaggcccctccatcttgctgcgcaagactgttctgtcgcttaaaagccccactggggctttcattgctgcgctgcgctcgcaaacgcgaatattttgcgttctacagctttctgtgctataattaaactggattattatgaaaacagaaagcaggaatcccttttatgctgcaaaaccctgaattgcattatctggataacgccgctaccaccatggtggctcccgaggtggcggatgtcatcgacaaggccatgcgggaacactgggcaaacccgtccagcctgtacggccccggtgcccgcagcgaggaagcgctgaacgccgcccgtgccgctgtggcccgtacactgggctgcaagccaaaggagctgtattttacctcctgcggcagcgagagcaacaatctggccctgctgggcgcggtgcgcacccgcactttcggcaagggcatcgtggtgtccggctttgagcaccccagcgtccagcgcccgctggaagagctggcgaagcagggctacaacgtcacggtggtcaagccccgcccggacggcacattggatatcaacgaaatgctggagcatgtggacaaaaacactatccttgtggcctgcatgatggtgaacaacgaggtaggcacccgcaacgatgtggaacgccttgccgccgaggtcaagcgccgcaacagccgcaccatcgtccatgtggatgcggtgcaggcgtggatgcgtgtgcccatcaagctggacaacattgacaccctgtcggtgagcggccacaagatccacgctcccaagggcattggcgcgctgtatctttctgaccgtctggtacaggcgttccggccgccgtacctcggcggtgagcaggagcgcggcctgcgccccggcaccgaaaacctaccctacgccatgggtcttgccgcagccgccacccgtcttgccaagaccatgaagagccgtgacaccgctatgaaggccctgaaccagcgtctgcgggacggcctgaaggcctttccggaggtggagctcaacagcccggaaaacgcggtgcccgaggtgctgaacttcagtgagatgtgcatcaagagcgagaccatgctggcatggctggccgaagcacaggtgtatgtttcctcggcaagtgcctgcggccgcggccagcccagccacacgctggcagccatgggcaaagacccgcttgccatcgacacggccatccgcgtgtccttctgcggcgacaacacccccgaggatgtggatgcttttctcaaccgctttgaggacggcatgaagcatctgcagaagatccggaagtgagactccttcagtcacggctacgccgtgc

SEQ ID NO: 1140 - DNA, 13143 bp, Unknown
  gut microbiota DNA sequence
gaagcgtttcaagacctgcaagaaaaagaccgtccgtaaagagtggctggaagatttggtcgtagctgaaaccatgaagctgattcaggatgatgccgtgattgatgccatcgttgcggaagtgatggagttgcaggatcaggaaaacaccacgctcccattgctggaaaagcagatgcgtgaggtagagaacggcattgaaaatatgctgaacgccatccaagcgggtgtgctgaccaattccaccaagtcgcgtttggaaaagctggaagcccagcagaaagaacttgagattcggattgccgaagaaaaaatcgctcggccacggttgagcgaaaatcaggttcggttctggctgacccggttccgcaagctcgacccgaacgtgaaaagccacagggagacgcttatcaacacgttcgtgaacgcggtttatctctatgatgaaaaagttttgattatattcaactacaaagacggcacaaaaaccatcactttcgatgaaattgccgccaaagatgccccagagtgcaatggttcggatttgggttgcttcgctccaccaaaaaacctcaacgtatgaaagtacgttggggtttttgtattactgcaaagccagacttattgggcgggtggattcgaacagcatcggcccgccgaatagtccggagggcaaaaaagcccctgcggggcttttttagatgcgcggctcgcgacatccacccgcgcccacccaaaaaacctcagtgtatgtaagtacgctggggtttttgtattgctgcaaagccagacttattgggcgggtggattcgaacagctgcggcgatgtcgttgaagacggcgcaaaaacagccccgatggaccgtcaggttcaccggggctgctgctataccataattttgttgacgttaacattttcgtgatgccgcgaaaacatcacatgtaggatatctgtttgtgccgccgttactcttccgctgcagctttggattcgttcacaaaggcggcgatcttatccacctgaatttcggcaacggcacggccggtctcgtagacgcggcgcagctggaccggatcgcgctccatggagccgatctccagcgggatgggcgggcggatgacgaacgccttgccggtctgctccagcatggcaatgtgatccagcgtttcgttgtagcgctcgtgacggtcggcaacggcttccacgaaagcggggtagcgcaggtagcgtgcccggatggcgggcagcatcttgttcttctttttcacaaagcccttgggctgggtcagcacaatgaggttgcgtttgtagccgatggactcgaagaaccgcacggggatggaatcggcaatgccgccgtccagcagctgataatggccgatctttacgatcttggccgccagcggcatggaagcggatgcctgcatccactggatatcctcggcatcgccggtgcggcacttgtgatagatggggtcgccggtacgcacatcggtgcacaccacaaaaaagtccatggggttctctgcaaatgcctttgtgtcgaacacgtccagcttttccggcacggtgtggtagcagaactgctcactgtacaggttgccggtgcgcagcaggttgccgaagcttgcgtagcgcttatcgttgcaatactgggtgttgtagcggatcacacggccgatctgatgggacttgtagttgcagccgaacaccgcaccggccgaaacgccaatggcaccatccagcacgatgccatgctccatcaatacatccagaacaccggcggtaaacatgccgcgcatggcaccgccttccagcacaagacccgttttcatatatgctctcccctcctgtgtgccggtgcacagatgccggacacaccttatattaactacagtatactcgaatctgtaaaaagtacaagagcggaaaacctataaatttatcaagaaaacctcttgccaaaggaaagagcatccggtatactaggtgaaataaaaagagaaatatgcgctgcaaacgcatgggcatggaaaaaatcaggttggaggaattgctgcattatgaagatgctggaagatcgtattcgcaaagatggtatcgtacgcgagggcaatgtgctcaaggtggatagctttatcaaccaccagatggacattccgctgttccgggagatggcaaaggagtggaagcgcctgtttgcaggcaagcccatcaacaaggtgctcaccatcgaggccagcggcattggcattgcagccatcgtggccagcgagttcaacgtgccggtggtatttgccaaaaagtccatgagcatcaatctggactacaacaactacgagaccaagatccagtccttcacccacaaaaagatctacaatgtgatcgtctccaaaaagttcctcaccccggaagaccatgtgctgatcattgacgatttccttgccaacggctgtgccctgatgggcctgctggatctggcccaggaggccggtgccacagtggagggcatcggcattgctgtggaaaagggcttccagcagggcggcgagctgatccgcagcaagggcatccagctggagagccttgccattgtggagtccatgaacagcgagaccggcgagatcgtcttccgcgagcagccgcagcagaattaaacaaaaaaacattgcagccccgggaaagtcggaagacctttccggggccgttttttgcttacgccccgtcaaagctgtcaccgtcggcgggcaggtcggcagcggtctgggcgggatcggtatcggtttccggttccacggcgcggggcacgcccttgtacaccagcgtctgttccagaacctcggcgcacaccggggctgaaaggctgccgccggcagtcgtccagctgtggggttcgtccaagcacaccagacacaaaaactgcgggtcgtcgatgggagccacggccacaaagctggcaatacgggctttttcgtcggcgctgtccagcttctggctggtgccgctcttgccgcccacccggtagccttggatgcgggcattgcgcccgccgccgtagagcaccacggcttccatcatctcacgcatggtttcagaagtttccggtttgatcacctgccgcctgcacaccggctctgtgtgctgcagaatgctgccgtccgggtttaggatatcgctgacaagataaggctgcatcagcctgccgccgttcatcacagcgcacacggctgtggccatttccatataggagatcttgctgctctggccgaaggcgcaggaggccagctccaccggccccatgcggtcggcggtgtagtacagactctttttgggttcggcgggcagatcgaccccggttggctcccgcaggccgaaagcggcaaagtaatcgcagaaggcttccttgcccagccgcgcgccgatctggataaagctctggttgcaggaattttccagcgcctgggtcacggtctggctgccgtggcgcttgtggttggcgcagtggaaccgtgtgcccgccaccgagatggactcgccgcagtaaaaggtggagtttttgctcacagccccggcatccagcgcggcggcgcaggtgatgagcttgaacacgctgcccggctcgtacaggtcgctgacggccttgttgcgccactgggtctgctgggccagttgcagggcggcagcgcgctcgctgccggtaagggcatccacggccttgcgggcggctgcatcgtagatcacgcgcggctggttcgggtcgtaggcgggcgtggtggacatggccagcacggccccggtgttcacgttcatcacgatgcccacggcgcgcgccgccacatgatgctccttgaccgcataatccagcgcgttttcaaggtaatgctggatgttggcatcgacagtcagccgcaggccgctgccttccaagggcactttttcggtctcgtagctctgctccagtgtgtagccccaagcgttgacggcggtgagcaccacaccattctgcccggtgagcacatcgttatatttcagctccagcccgctcacaccggcgttgtctacattggtaaagcccagcacgctggccagaaattccccctccgggtaccagcgcttggagtcctgattgatgcggatgccggtgatgctgttctcttcacaaaaatcccgcacgcggtcggcggtgtcgcgctccacgcggtagcgcaaaaggcagtcgttggaggtgcggtcactgaatttttccagcagcttcgcttcgtccagctccaatatttccgcaaggccctgcgcggcaaggctgagcttttcctccggcatctcgcgcggggaggcccgcaatgtccagcagctgctgttggcggcaagcagtacaccgtcggcgctgtagatacggccccggtcggcaggcaccacagtatcgcgcaattgctggccgagggcacggctcgtataccagtcgcctgaaaacagctgcagatacgccagccgcgcggcaagccccgcaaagcagacggagcacatcaacgcggccaccagccgtgcccgggcatggaatgcccgttccggcagggtgcgcaaggggcgcggctccggttttggcatggcaggcacctccttctctgggcaagtgtatgcgccggtgtgccggggatatgactaaccggcaccgccgccgcgtacaataaaggaacggaggtgatacggatgcacaaagctgctgcccatgcaaagcgcggcctgccgctgcggcatcttccggccatggacctgccgtttctggtgctggtgctcacgctggtgggctttggccttgtaatgctgggcagtgccagcagtgcagtggcgctgtaccggcggggcgatgcttttgcctacctgcggccgcagctgctgtatgctgcgctgggcatcggggccatgtgggtggcaagccgggtggactaccatgtttaccacaagctggcatggccgctgctggcgctttcaatggtactgctgacggcggtgctgttcatgccggagtacaacggctgcaagcgctggctggtgctgccgggcctgggtacactgcagcccagcgagatcgccaaatttgcggtggtgctggtgtttgcgcatatcattgcacttaaccacgaccgcatgggcagctttgcggtgggggtgctgccctttgcactggtgctgggagcggtggcggtgctcatgctgctggaaccgcacctttccggcaccgtgctcattttgggcatcggcgcggtgctcatgttcgtgggcggcaccggcctcaagtggttcgtgctggccggggcgggcggtgcagcggccattggagctgccattatcattatgccggaccttgtgccctacgcggccagccgtctcagctcatggctggacccctttgccgatccgctgggcgacggccaccagaccatccagagcctgtatgccatcggctccgggggcgcggcgggccttggccttggcagcagccgccagaagcacctgttcgtgcccgaaccgcagaacgacttcatcttttccatcctgtgcgaggagcttggctttgtgggggcctgcgcggtgatcctgctgtttgcgctgctgctgtggcggggcatcacgctggcggcgcatgcaccggatcggttcggtgcgctgctggtagtgggctttgtggtgcaggtggccctgcaggcagtgctgaatatggcggtagtcaccaacaccatccccaataccggcatcagcctgccgtttttttcctccggcggcaccagtctgatgatgctgctgggcgaaatgggcatcgtgctgtcggtgtcccgcggggagacataaaaccgggcgttccctgccataaaacgacagcatcctctgccggtgcagccacaaatgaccggacaaacaaatggcacaactgcagacaaaataaacaaaaagccttcgcgccgcatagcatgaggtatcttttgcggaacgggggctttttgcatgggcggagatcttatcatcacaggcggcatgccgctgaacggcacagtacacatcccggcagccaaaaacagcgtgctgccgctgctggcagcggcccttttgtgcaatggcacggtgcgttttctgcaggtgccgcatcttgcggatgtggacaccagcgtggagcttttgcagggtgcgggctgcacggcccgctggcagggcagcgacatcacggtgcagggcgtgccttccacctgccgccttgcgccggaagccgccgcgcggatgcgggcatccattttgttctgcgcaccgcttctggcacggcttggccgggtggaaacggtgctgcccggcgggtgccgcattggtgcaaggccggtggacctgcacctttccggccttgcgcagatgggcgtgcactgccgggaggagggggcaaggctgatcctgacagcgcctgccggactgcacggtgcggacatcacacttgggtttcccagcgtgggtgctaccgagacactgcttctggcagcagctgcggcgcagggcgagacggtcctgcgcggggccgcacgagaaccggagatcggcgatctggcagcattcctgaaccgctgcggcggctgtgtacagggcgcgggcaccagcaccatccgggtgcagggcagacgaatgctgtatagctgcagctttgcacccatggccgaccgcatcgtggcatccacccttgcctgtgcctgcgcggcggcaggaggccgggtggaactgaccggctgcagaccggagacctatgcaccgctgctggaaattctggcacaaatgggctgcagggtagaaacagggccggaaaatgcggtcattacccggctgggcgcgctgcacggcgcgggcagagtgtttaccggggtatacccggcactggcaacagacgcagcgccgctgcttgctgctgccatgcttgccgccgacagcgccagcagcatcgaggatgtggtgtttgagcggagattcggctgtgcagagggttttgcggcttttggagccgctgtgcaggtgcagggacgcacactggacatccggccggtgcggcagctgcagggcgcgtgtgcacgggctgcggacctgcgcggaggcgcggcactggtggtggccgcgctggcggcaaggggacggagccgcattaccgacaccggttacatcgaccgcggatatgccggttttgcacggatgctggcggaacttggtgcccaaattgagcgggaaatgccgcgggaaagcgccagcgagaaaaaaacaccttcaaaaaagcaaaattgacttgcattcagggcaaaaagatgatacgatacagttatataagtgtaagcagataatttctgtgcgctatgcgcagttttacgataaaatccgatggaggacaaagttatggcactcatgctcgatgaagaaatggacgaaaacgttacgacgatcaaggtgatcggcgtgggcggcggcggcggcaacgctgtcaaccgcatggtcagcgacggcctgcagggcgtcgaatttatcgcaatgaacaccgaccagcaggctctggccaagaaccacgctgccaccaaggtgcagctgggttccaagctgaccaagggccgcggtgccggtgcagaccccgagatcggccagcgcgccgctgaagagagcaaggacgagatcgcaaatgcgctcaagggttcccagatggtgtttatcactgccggtatgggcggcggaaccggcaccggtgcagcacccgttgtggccgaggtggcacatgatctgggcatcctgaccgttggcatcgtcaccaagcccttctcctttgagggcaagcgcaagatgggtctggcagagcagggcattgcaaacctgctcatgcatgtggacagtctgatcgtcattcccaatgagcgcctgaagatgatcagccaggaaaagatcaccctgatgaatgccttccaggcagctgataacgtgctgcgtcagggcgttgagtccatttccgctctgatcaatgtgcctgccttcatcaacctggacttcgccgacgtgcgctccatcatgaaggatgccggctacgcacacatgggcgtgggcagcgccaagggcgcaggcaaggccgagaacgccgcaaaggctgctatttcttctccgctgctggagaccagcattgccggtgcacacggcgtgatcatcaacatcacttccagcccggacatcggtctggaggatgtggagaccgcagcaggtctcattacccagagcgcacatcccgatgcaaacatcatctggggtactgcgttcgacgagaacctctcggacgagatgcgtgtgaccgtggttgctaccggttttgacaacaagagcgcaagcgacctgcgcagcagcatcagcaatgcaatgggcggcgcacagtccactccgtctgctgtgttcagcagcgagactgcaagcccggcagcttctgccgcaggcggcgctgcaccggcacccactgctgaaaagcccgtggaagaggacaacagcgataatggctattacgaccagctgatggccatgctgaacaagcgcagataaaaggctggccgtcataagcggatcaggcgtatcggatggatcggagggacaccatggcgcagggcaggcagcagaacaatggttcgcggcagcgctgtgcccagtctgccgcggcaaaggctccggcagagccgcccaaggcggtgtgtgcccagctggagcagatgaaccgaaagctggcagcggccagtgcggaaattttgcgctatcagacccgtctgtttgcctgtgaacggcagatggccgcgctgcggcaggaaaatgcccagctggaagcggcctgtgagcaggcgcggcaggaggctgagtgcgcgagcgctcatgcagagcagctgcgtcaggagctggcccgccatgccgaagctgtgcggcctgtgccggttgcggcacatacgcccccgcagccggaaccatcggcagcgcagagtcagcggccggagccggaggccgaacagcccccacagcccgggccggaggctccgcagcctgctcagccggactggaagccccagaccagattggagcacctctcggtggagctgatgaactggttcgacgatatgatgggcgcatgacggaaagctagatgacctgcaaaaaaagcagatatgagtgaaatgaaaagctgctgcaaagcgcaaagctgttgcagcagctttttttgtggtccggtaggaaacggaagaccctgcggccggaagtacaggagcgaggagcggttgagatggaaccaaaacagaaaatactgatcgtggatgactcggagatcaaccgcgccatgctcaaggagattctgggcgagggctacgaatatctggaagccgagaacggcctgcgcgcgatcgaaattctgcgcagacgcaccgatatcgcgctggtgctgctggacctgatcatgccggaaatggacggctttgatgtgctgcgggtgatgcagtgctatgcatggcaggaggaaatcccggtcattgtgatcagcgcggcagaggacacccgaagcgtcgagcgcgcctatgatatgggcgtggccgattacatccgccgcccgttcgagcgggtcatggtgctgcgccgggtgaagaatgcgctcatgctttacgcaaagcagaagcgccttacccgccttgtgaccgatcaggtatacgaaaaagagcacaacggtgtgctgatgatcagcattctgagccatgtggtggagttccgcaacagcgagagcggccagcatgtgctgcacatccgcaccctgaccgacctgctcctgcatcagctggtgcagaagacggaccgttaccagctggacgagagtgatatctcgctgatcagcacagcatcggcgctgcacgatatcggcaaaatcatgatcccggaagagatcctgaacaagcccggccgcctgaccgaggaagagtacgccaccatcaagacccacaccaccgagggtgccaggatcctgaaggggcttgccatcgggcaggacgaaccgctggtaaaggtggcacacgctatctgccgctggcaccacgagcggtgggacggcggcggctacccggacaggctcaagggcgacgagatccccattgcagcacaggtggtggcactggccgatgtgtacgacgcactgaccagcgagcgctgttataagcagtcctacagccacgaaaaggccgttgacatgatcctgcacggcgagtgcggcagcttcaatccgctgctgatggaatgcctgaaagaatcctcggagttgctgcgcacagagctgcagcgctcggagtatgaccgcggtttccgccacgagacccgtcgcctttcggaggagatcctgcaccgcgaagctctgccccgtgaggatcgtgcccagcgcctgctggatctggaacgggagcgcaccgctttttatgccgagcagcgcggcggtattcagttcgattacgatatactcagcggcagcgtgactgtggtgaaccgctacgaggacccggtcaaccgaacccagaagctggactttgataagggcatgggcctgacatttctctccggcaaggaccgccgcaagctgctggatgccattgcagacgcaacgccggaagagccggatgccgcattcttggtgctgatcgcggtggatcaggaataccggctgcaccggctggtgatgcacaccatgtggagccgcgccggtgtgcgccactgcgtaagcgtggtgggccagatcacagatgaccatgcccgcctgcaggagctgatgctgggcgatgtgaacagcgaccagccggaagcactgctggaacgcctgaagggcatttttgacatcgtgcgtctggtggacccggaaagcaccaaggtgctgagtctgggcaaggatggccggctgaccgagatgcccggcacctgccacatggtgtggaacaaatcgggccggtgcgaaaactgcatttccagtaaggcccttgcccgcaaggaatccctgaacaagatcgagttcaaggacgatcaggcttattttgtcatggcaaagtatgtggaagtgggcggacgcggctgcgtgctggaaatggtgtccaagctttcggacggacgctggctggatatgggcggccgccggatgctgctggaccgcggctccaactttgaccgcagcgcctttgtggattcgctgaccggggcatactcccgccagtacttcgagtgcttccttgcggagagcaaacaggtggaaggcgtagtgatgatcgacgtggatcacttcaaggaggtcaacgaccggttcggccatctggtgggcgataaggccctgcagagcgtggcacagtccatcctgagcaacctgcgccagaccgatgtgctggtgcgctatggcggcgatgaattcctgctgctggtgccgcacatccggcccggggaacatgtgatacagcgcgtgcgggaggctgcggccagtgccagagtggaaggctacccggagctggagctttcggccagtgttggcggtgtgtgcggtgtgcatccgctcaccgaggccatccgtcaagcggacgtaaaaatgtaccagaataaggccgagcgcaaaaattaaacaaaacaaagcccggacaggctgcagtatcgcactgctatgcctgtccgggtatttttgttttttcagcgcacagcgctggtgcggtgctccatcagataggtggcttccagatcagcgatgtgcagcttgacggcaaggggatacttgtcgtaggcttccgagatggcaaagcagccgccccgggccgcatcgtcaaagccgcccatgtgccagcggatggcaacggcctcctcgacccgcagcttcatgaaccgctcgatgaggaacacgctcttttcgccgtggccgtaggggaacagatcctccacgctgtagctgggcaccttttcccactggccggtggcttcgtttttcacgttgcgggtgccgggcttgtagtagttggccttgcacagatcgtgcagcagtgcacagatggcaaaggtctcctcgctgtcgccctcggcaaaaaaggtatcgtgcagtgcatggtagacgttcaggctgtgcatacacagcccgccctcacacgcaccgtggaaccgggtggaggccggtgccgtaaagaaatccgtcttatggtccagccagtccagcagcttttcgctgccggggcgggtgatgtgctgctgccagatctgcaaaaactcttcgcggccgcccatgcttacagctccaaatcgtccagaaggcccttgaggatggccatttcgtcgtggctcagggaaatgcccttgcccatgcgggtgccgtccggggaccagtcgcggatgtcgtacttgggttcgccgtcgttccagctgatgaggttcagctgacgctcccagccgcggggacgctccgagagaactgcaatgcgctgaacaacttcatatttgatctctgccatgatgcaaaacctgcctttatctttgtttgctaccataataagggaagcggacgcagatttcaacaggtagagcaaaaataatttgaaaaatttttgttagccgtaaggtgcatcctcacgccagtccacaaggctcagcacctgagaagcatcctcgtccggggccggatggcaggaatgggtgtgctggtctgtgctgaacagtccgggtgcatagtgggccatcacgctggtctgcacatccccggccaaaaattcccgggcgttcttctggtaacaggcggccggggtgccgttggtcatgggcacaccctgcggggcgctgtttgtgtccgggtgcggggtctggcccggtgtttcgatctgcggcggcacctgtgtgccgggggcagcggggtcgcctggcagcaagatatccggctccctgcctagcggcgggctgcagcgggtgcagctgttttccggtgcggcggcaatgccgggctggtgttccagctcgtggcggataaagggcgtcaagctcattggaaaatcacctccgcccataggatgccccgaaaagacgcaacttataaaggggccgggaagcaggacggcggggagtttccccag

SEQ ID NO: 1141 - DNA, 324 bp, Unknown
  gut microbiota DNA sequence
atcttccgccgccgcaatatcggttttatctttcaggcattcaacctcatcccggaactgaccgtagaacagaacatcctgttcccggtgctgctggactaccaaaagccggacagggcatatctggaagaactgctgaccgtgctgaatctgaaagaccgtcggaagcatctgccaagccagctttccggtgggcagcagcaacgggtagccatcggccgcgccctgatgacccgcccttccctgattttggcggatgagccgaccggcaatctggacacccagaacaccagcgaggtcattgccctgctaaaagaaacatcc

SEQ ID NO: 1142 - DNA, 28915 bp, Unknown
  gut microbiota DNA sequence
ttgtctttcatcttcagttctccttttctcaagttcgtatccagcatatatatccacacaggaaagacctgtggagaatcaaaggtggagcaagaaagcttacttccccatccgaatccgtttcagatggatcgtaaggaacaccagttcctcgtccgaaagctccttgtgccaggtgttgcggacatactccgcaatgcagcaggcgcatttgtagtgttcgctgcaattgcgggcaatcagggcgcggaacacttcgtcgtgggtatcgttttcctgctcctgttttccttgaaatacgcgttgcgcaaaaaagcgcaaatgcactgtaaagcggctgaaatccagtgcatcccggtcaaaatggcagttgtaaaagtattccactacctgcacgcagccatccacaaagcgagtgacatcgttcaccacgctcatggttgtgttgagctctgcgttgacgatgtgcagcgcaatgaagccgccctcgtcgtccgaaaggtctgcatggcagcgctggcggatggtggcaaggcactccataccaaggcgatactcttccgggtagaattcccgaatgggagccatcagcgggttggaaaagcgaatcccctgctcgctgcgctggatggcaaaactgatgtggtcggccagcgtgatgagcaggctttcgttcagcgggtagttcacccggctgcggatcattgccaccagctcatcggtgagcagcagatgctcatacgggatctgttccagaagttccaccaacttctgctgcacggcagggctggtcatgcggtagctgcgctccacggtttcagcctcaattttatagcccggcttaacgccaaagcccaaaccgcgcccggtgacgatcagctcacagcccgtggggtccaccacgcgcagaatgttgttgttgatcggttttttgacggtatattgcattgtttctcctcctcaagttgaaaaaggcaataaaaaaagaccatcctcgacacagcaaacataccgaaggctgaaacacgctttcggcttgtgctatgcagagttggtctagcccgccaaacggtaacaatccaacgacgctgctcacgtacaattttcttttttgtaaggcacgaacaaattaagcacttgaatggaaatttattctatgcttgattacaataccatattctttgcggagtgtcaagatgggaacgagtttctttttcactttatcaattttgcccaaactcaggtgattttctacagcaaatcgacaagtaagaatattccttttttgctttatatgtgcagttgttttcaatcgagatcattgcggagaaagctgtgctccatctcgtaactcatcaccttcacaaaaagcggtcaagaattgctgccctatatacaaaaaagccgccgaggacatcttcccaaaatgggaagagtcctcggcggtattcgtttatcaggtgtgctgcggtctgagaacgtccttctgtacagctctctatccgcatcaacgatattttcggatgggcggtacaaaaatattcagattgatcagctttgcgataaagggatgctattttgcaacagccccaaaatcagctttttcttaattacagctggcccatagcatgctttgcggccagcatgccgaaggtgtagcagcggcccagggacaggccggtctggtggaacggatagtccgcgccgccgtagaacacgccgcccacgttgccgacgcagtacaggccgtcgatgacgttgccgtcagcatccagagcctgaccgttggcgttggtgttcacgccgctgtcgatggaggacacgcggatgtgcttgcggatgccccagaagggagccttctcgatcttgtgcatgtaggcgctcttcttgccgaagtccgcatcggtcccctgatcgcacagctcgttgtagcgatcgatggtcttctgcagctcgtctgcaggcacgcccagcagaccggccagctcttcgatggtgtcggccttgtaggtatcgatgaggttggtgaacacgccctgcgggttctccacggcaccggggatgtacttggtcatcacctgctcggggatggggccgttggcgtagctcatgtagtcgttatcgtagatctggcagtaccagcccaaagaaccgtccggatggtttgcatccacgttgttgccgttgaacttgggcacatacttggtgatgttgcccatgtagacaaagccggtgtcctcgttgcagaagcgcttgccctccatgttgacgtacaggaacggttcttcgtacatcaggccggagtcgaagtcgtgcatcatcttggtgtggcccagattttccatctttgcacctgcatcgatggccatgatgtggccgtcgccggtcttctggtactgcttcttgtcgaagccgtccacatcggggcaccagcgcttgaccatggcctcgttgttcatgtagtcgccggtggccaggataacgcccttggaggcgttgaactggatgtacttgccgctctcatccttggcgatgacgccggtcaccttgccgtcggcgtgcaccagcttgacggcgggggtgttgaagaaggtctccagattggagttcttggcctgcacattctccagcacggtggccagcacgtcgcccacgttcttgggcttggggccgatccacggtgcaaagaagtagcagtgctcatcgccgaagtcgtaggtgtccatgcggtccttccacacgccggtcagatcctggctggtgcacatgtaggcaaagatctccttctcgtcgttgtgcagcaggtcggaggggttcttgttgctgtccacgaggctgccgtcgccgtactcggtctggtcggtcaggccggcgcggttcaggtaccacatcagggcctcttcggagttctcgacgtaggcgttcagcaggctggtatcagcgcgccagtcgcacaggccgttggtcatgtgcacccacatcttcttgcccgcgtcggtggacttggacttgatgatggcggaaccgcagttgccctggctgaccacgatgctctgcttctgcagcagagccacatggccacccagttcagctgcccagccggcagcaggcacaccggcagcaccggcacccacaacgaccacgtcaaagtccttcgtctcgtcaggggtgatgtcgcccagctcacagacagaggactccacttcctcggtggtcagtccttcgggcacaacggtctcagctttgttggcctcggtgggggcaacggccacgcccttggcctgattgatgcagctctcggcagcctttttgatggcgtcggaggtgatggtggcaccggaatggccgtccacctcgctggactgtgcgtccaggatcttcttcaccatctcgtcggcgatgtcggcaccgtagcccttggtctcgtttgccacgtcgatctgcacgtcggtgatggcatcggcgctgaaggtcatggtcacagtgacaggcgttgtggtgttgataccggtagcagtggcgctgtaggtgcctgcggtataggtaccggcagcagtgctggcagcggtgctgccagaagctgcgctgttgccgcagccggccagcaggcctgcggcagctgcacccaaggtagcagtgcgcaggaagttgcgacgggaaatcttttcgctcataatcgttctccttgccttttcttcgtgtgatccgtgtttggcagcaaagtccgcagactttgttactggataaacaaagcttacacgttagagcagcgcgaaggtcaagggctgttttgacaaaaatatcacaagaatttgtctgatctaacaaattctcgtgatattgcaattttatgtatatatttttgtccgcgtcagatggtaattcacgatgctcccatcgggctgctcccggctagcagcgatgctgctgaaggtctcgcccaccgcacggaacccgcgctgcacgatctccgcatgcaggtcgtccagcgagtcccacccaaaggacccgcgataatcctttttccaaatggtagtcagatagtctccgccgcacaccacctccacatgctttgtgcgcttcagccccagcctgcgggcggcatcggcctcaatcataaggccgtagtcgtactcgttgcgtcccacccgaaactgctccatcacccgccggggcaggcggctcacccagcgggtcgcaggcatacattccagccattcagccttttcctgctgcaattctttatcccggtctgctgcttcttcctgtgagaaggtcagtcgccacatttccgggaaattctgcacccagatgcgcccggcattctgttccagtgtacggtactgctcccgcttgtgttccaaaaaacggatggccagttcgtccagcacctgcctgcgccgcagctgggcgatctgatggttgaacatggcgtcgctctgctccaccgtgggtgcgccgatcagctcccggcattcttccagcgagagctctgccgcccgcagttccctgcacaggttgaaccgccgggtatcagtgactgtatagtaacgatagccggtatcctcgttgacctcggggtggatcaggcccattttttcatagtagcgcaaagtatgggttgtgacaccaagcagagatgccatctcactgatggtatagcgcataacagtaagctcctttccgggcagcagaaccttagagctgctcgaatgttattttctatccatccttattatatcgtatccgcgcaccgtttcaagtaaaaaaactttgccgttctctgccggaaaataccgggcagcaaaaacagggcgttggcttggatgccgtgaccggcagagagtaggactgagttttaacagaataaatccaacatcttaaacctgctgcataaacaaaaatccgcctattataagtatgacttattcggcgcaaaaatcagttctcgaacgttccaaattggcacattttggactattgtacgattatttttccagtttggttattttgctccccgtggccggagcaggccctgcgggccaacatccactgccagatctcgctggcactcaaccgcatctacaccgagtggtaccccagcaagggctacaccttcaacattaccaactccaccagctacgaccagtattacgttcacggacgcaccgtgttcgatgtgatggtgcgcatcaccgacgacatcttcaacacctatatccgcaagaccggcaccgtaaacccctactactctgaatactgcgacggtaaatcggtcacctgcccgggtctcaagcagtggggcaccgtgacgctggccaatcagggccgtaacgccttgcagatcctgaagtattactacggcaacgacatcgagatcatccgcacctcgaacatccagtccatcccccagagctaccccggttcgcccatccggcagggcgacagcggcacagcggtgttcaccctgcagcgccagctgaaccgcatcaccaaggactatcccttcctcggcctgctgactgtggacggcgtgttcggggccaagatggccgccacggtcagggcgttccagaggcagttcaacctgaccgccgacggcgtagtcggacgacagacatggtacaagatcagctatatctatgtgtcggtcaaggatcttgcggagctgaccagcgagggcgaggtgtccagcggcactctctcggacggcacatggggcggcaccgtactgcgcaccggctccaccggcagcgccgtggaacagctgcagttctggctgaatacgctggcacagtatgagccttccatcccatcgttaacagtggacggcgtttacggcactggaacggccaacacggtgcgggccttccagcgcaaatacggcctgaccgtggacggcgtggtgggccgtgacacatggaccgcactgtacgaccagttccgcagcatccagtccgacaacggcacccccaatgcctaccccggcaccgccctgcgggagggtgcaagcggacagaatgtgcggctggtgcagttctggctcaagatcgcgcgcacggtgtactcgaacctgaccaacatcacggtggacggcaagttcggcagtgccaccacagcggcagtcaagcggttccagacctactttggcctgaccagcgacggtgtggtgggccgcacgacatggaacaagctatacgaggtgtacaacgacatcgccaacaagctgctgtcgtccagcctgcgccccggcgagtacccgggcgtgctgcgcaaaggctcttccggcacagcggtgcgggagctgcagttctacctctacctcatgagcgcctacgagagcagcatcccggccattggcatcgacggacagttcggtgcttccaccgaagctgccgtgcgggcctaccagcgctttgcgaggctgattgtagatggcatcgtgggacgtaccacatggaacagcctgtacgacaaggcgtccactctgcggacatccgggccggtggtcaccctgaaacgcctgccctaccccggtaccccgctcacagtggggtcttccggcagtgcagtgctctactacagcctgcttttgcagcgcattgcctactactttaccagcgtggaggccccgcccctctccgaccagtacaccgacgagactgccgtcgccacccgcagcgcacaggagctgctgggcctgcccgagaccggcattgcggatgccgacacatggacagctgtggaagcgctgagcctgcagctcgccgccgaaatgcccaaccccgaccgcagcatcgggcatggcccggtctacccgggccgggccatcggcgcgggcagcgtggggccggacgtggcgcaggtggagacatggctgaacggacgttcctgcctgtactgcaccgagggctatgtgaccgagaaccgctgcttcggcccggaagagactgccgccgtccggctggcacagcagcgggccgggctgctggtgaccggcaccgtggaccgcggaacatgggctgcgctgcaggcccagagctgcccacactgcagcaaggaggaatgagcgatggcacgacttctgatctacgatgcctacgagaacaaggtatacacctatgcaaacctaaacgagaacgaccccatgccctacagcaccggcaccaccctgcgggtgcgggaattccgtggcaaatccgccagccccaccctgtggaccaccattgcggccatggaagcgtggaacctgacccgccgcaagtacggcaagggcatcccggtggggtatgccttccgccgcatctgggagggcggccacggcacccgcagccagcactacgcgggcgtatcctttgacgtgggccaaagcctgacccagaccgcccgcacggccatctacaacgcagcccggggcaccggggcatggggctatgtggagccgctgagccagacccccacatgggtgcacatggaccgccgctacggcacgcccgcctgcagcggcaccacagcaggctaccccaccctgcggcgcggaagccgcggctgctatgtgatgattctgcaggacgcgctttccacgctgggctaccagaccgggagccgcatcgacggcatctttggtgcccggacggaggaagcgctgaaaggcttccagcggcgcacgagcctgcgtgtggacggtgtgtgcggctgcagcagctggaaaaagatcagcaccgccgtcatcggcgtgggacggacaaaaacgacgatcgattgataaaccctctcagtctcgcttcgctcgccagctcccccgaaagggggagctcttttgcatctgatggtttgcactcataaagctcgcccttcgggagagctggcacggcgtcagccgtgactgagagggttttcttcccgtgaaacatccttcgcttcccatcaccgaaagttgaaactttctcccgcatctgcccttttcgttgcgcggtttggaaaaacgtgctaaaatagctctattattaaaatggttcatgttgaaaacaagaggatttgaggggtattgtatcatggaattttccaaacgactggacttgttcggcgacgagatcttcgccgcactgaacgaacgcaaggtagctctggaagcacagggccgcaccatttataatctgagcgtcggcacgccggactttgcgcccgccgagcacatccgcaaggccatgatggatgccgctgccgacccgcagaattggaagtacagcctgcgcgacctgcctgagctgctggatgccgtgtgcggctactacaaacgccgcttcggcgtagagatcacgccggatcaggtggccagctgtgcgggcagtcaggagggcgtgggccacatcggcatggtgctgtgcgacgagggcgacaccgtgctgctgcccactccctgctacccggtgttcatcgcgggcagtctgctgggcggcgcaaagccgtggtattacccgctgaccaaggagcacggcttcctgccttatgtgaaggacatcccggaggatgtggcccgcaaggcaaagtatatgatcgtctccctgcccgcaaacccggtgggcagcgtcggctccccggagctgtacgccgaactggtggcctttgccaaaaagtatgacattctcatcatccacgacaacgcctacagcgacattatctttgacggggccgtgggcaacagcttcttcaatacgccgggtgccatggatgtgggcgtggagttcttcagcctttccaaaagcttcaacgtcaccggtgcccgcatcagctttcttgtgggccggagggacgtggtagccgcctttaaaaagctgcgcggccagatcgatttcggcatgttcctgccggtgcagaaagccgccatcgccgccctgaccggcccgctggacatggtaaaaacgcagtgcggcctgtaccagcagcgccgcgacgctctgtgcggcggcctgcgttccattggctggaatgtgccggacagtcacggcagcatgttcgtgtgggcacccatcccggcaaagtacgcaaagagcatggacttctgtcttgaccttgtggaaaagagcggtgtgctgtgcacgccgggttccagctttggccccttgggcgaaggctacgtgcgctttgccctcaccctgccgccggagcgcattgccgaggcggtgcagtccatcaaggcaagcggtatcctgaactaaaaaaacgggaacgtccatgcggcgttcccgtttttttatgcgttcacaatattctctcccgcgccatccagccatgtgcgcaggttgttggcagtaatatccatcagccgctgcagggcttcgttggtggcccacgcgatgtgcggtgtcagcaggacattcggcaggccgcgcaaagggcttgcctgcggcagcggttcagtgtcaaaggcatcggcaccgtaaaagccaagcttcccgtttttcagcgcatcggccacggcctgctcgtccaccagcgcaccgcgggcggtgttcagcaagatcatgccgggctttgccttggcaagggtggccgcgttgatcagcccccgtgttgcaggtgttgccgggcagtgcaggctgagcacatcgctgcgggcaagcagggtgtcaagatccacgaactccacaccgtcggcttcgtactccggccgaacggtgcgggtgcacaccaacaccttcatgccaaaggccttggcaatgcgggcggtctgccggccaatgctgccgtagccatagatgccaaaggtcttgcccagcagttccacctgcggcagcagaccgtaggccgcaggctcctcggtgcgccaatggccgtcctgcacaaggcgatggtaacggtcggcgcactggcagatggccagcagcaggctgaaggtcatctgtgccacactgtaagtagaatagcccggcacgttggctaccggcacgccatggcggcggcaggccttcagatcaaggttatccgtgccggtggcaatgatgcccacccacctgagcttcgggcactgggccagaacggcttcgtcgatgcggcacttattcaggaacacgatctccgcatccccgatgcgcggcaccacctcttcctgcgcggtgcgcccatagcgggtgatgtccggcacaagcgccttcacacccgaccagtccagatctccctgctgtatggcataatcttccagaaccactgctttcatttcaacttcctcactttcacatcatatgggatacagtgccagcacggtgccctgcgggctttcgcggctttccagcgcggcatagcctcgagccagcaggatggcaatgtgcacccggtcggccagcgggagccataccggcggcacattctgcgcaaggcacccggcctgcagcagaaaacacggtgccagactgtccagcggacggatagcccgcaaagcaaacccctgacgcagatacagcgggatcagctcttctgccgcacattccaccacggcccaccgtgcccgctgccgggcaagaaactcctgccgggcagcagccgcagccagcagcggcgcaagggtctcggcggcatggccgtccggcccggctgccggggtcaaaaaatatccacctgacgtgcggttccagcccagaaatcggcgcagcgcagccgccgctgccacatcggcatccatgggcagcaggatgcacccggctcccggcacaccgcgtgtactgtacacgccccacacctcgcctaccgtcagcatccgcagcacctcgctgcgcggacggtacacactgctcacttcgctctgcgccagccggcagaattcctccgccgaaagccgccttacctgccgcgtgcgcggcgggtcacaaacctggatcatttggtttcccccattctttttcagtatgcatccagcataccggaccgggggcgagaatcggcgcgaaacagggccgctctttttgttttacagatccagcgttacatcctcgctcagcacctgaccaatgggctttgcaatgcacaggtcggcttccgcatctgccccggtgggctgcatgttgatgaccaccagatggtcgccccggaagtaccggatcagtcctgccgccgggtacaccacaaggcttgtgccgccgatgatcagggtatccgcatggcggatggcgttcaccgcgccggacagcacctcctcgtccagcccttcttcatacagcaccacatccggcttgacgatgccgccgcactcggtgcagcggggcacaccggtgctgttggcaatgaaatccacattgtagaacttaccgcagcgggtgcagtagttgcgcagggtgctgccgtgcagctcgtacaccgtgcggctgcccgccgcctgatgcaggccgtcgatgttctgggtgacgaccgctttcagcctgccctcccgttccagctttgccagccgcaggtgggccgcgttgggctttgcccccttcacgatgagcttatcgcggtaaaaacggtaaaactcctccgggttctcctcccagaaagtgtgactcaggatggtttccggcgggtaggcgtacttctgatgataaagtccgtccacactgcggaagtccgggataccgctctcggtggaaacgcccgccccgccaaagaacacgacgctgctgcttttggcaatgatttcttccaatgcctgtaccataacaaaaaacgcccctttcgccggatgtacatttgtgttaagataacttcagtataacacaaactcacaggaaaggaagcgcaacttttgaacgtctggtatgtgaacagcattctgggaaccttccggctggaagaggaaaacgatgccatctgcgggctgaccctctgcccggacggcgtaccggaactggaaccgctgccccgcaaggtgtgcgagacaccgcttttacaggaagccgaggagcagctgaacgaatattttgccggggcgcgcagggaattcgatctgccgctggcccccaagggcacccccttccagaaggccgtctgggccgagatgtgccgcatcccctacggtgagacccgcacctacggccagctggccgccgctgttggcaaacccaaggccagccgtgccgtgggcggtgcctgccactgcaaccccatcgccatccttcagccctgccaccgggtggtgggcagcaccggcaggctcaccggctacgcctatggcgtggagatgaagcaatatttgctggagttggaacagcaggagtaattttatgatcggaatgccctccgcgttcgctctgggcattttcagcggaaaatttatttttatatttgtgtttcagaaaagcctgcgggcttttctgaaacactttttcaccgtagggtcgctgtgggaaactgcatcatacacaaaagagccattgcacacccgttttgtgcaatggctctttatttttcactccgttttactgtgcgctgtacacgctgcccatcgtccaggaattatccgcgcggtacttggcgtggtttcgcaggtaggtgacccatgcgccgtagccgttgcctgcagagagatgcacgccatccggcgctgcaagcatctccttcaggttgccctcgccgtcggcaagggtctcccacaggtcaaggtaaacgcatcccttgctggcggccagctgagccagctgctcgttcacaccgcgcagcacatccgatgcaaggccgggcttttcagcagctgccgagggtcgtaccggcgggatagactgcacgtagatcacgcagtcctcgcccaaagcctcgcgcagcatatccagcatctggccatagtaggcaaggaagcgatccgaagcgcccaacgtggtgagggtgttagtgcccagcaggatatacagcttcttgggccgggcagcggccagcacatccagcgctacctcctgcccgcgggtggggcttttgactgcgctgcggttcacaatggcatccgggccaacgccggtatagccgcagatgagtgccccgtccagattgatctggtaatccgagaagcccaccgtcagactgtcgcccagaaaggctgcgtccgcaaagtagctcaggtccacctgcccgcagctgggctggcggatgacgctggcatcataggctttgacggtgtaggccccagcgctctgctttgcagggccaaagttctccagtgtgacggcctgcccaccggtgctgccatcctgtgcagcactgctgctatccgcttcgccctgcatgggcagcggtgccagaatgttctcggcaatgccgctggcgttggtggacggggtatcgtccgcgccctctgcgcccttttccagaatggccgtgatggcgtaggataccagcaaaatggcgaccactgcgcccagaaagcgcagcttgccgctgactgtaccgcgccgtgcccggcgcggcgcagaatgatactcgtgtgaaatgcccatggtttttccagctttctccatttttcccgcacagaagggggttttatccgcccggggctgtgcgttttttattttatcataatttttttgcctgtgcaaccaattaggtcttgcatacaacaggcaaaacaggtacaataaggatgtggtaattttgcacattttacaaaaagggtgtgcacatgccgcaaacttttttgtatcacttgcagcatccggtttgtttgccgcacggtctgcgggcagtgcagggcctttagaccaaaccccactctggcggcgcggaagccggaacctgcagcgatgtacaaatgataagaatgaaatttgcaaaaggaggtactcatggccaagaatgtgatcattggtcagagcggcggtcctaccgccgtgatcaactccagtctggcaggcgtgtacaaagccgcctgcagcctgggtgcagacaaggtgtacggtatgaaatacggcatcgaaggtctgctcaaggaagaaatgctggagctgaacgtcctgctggacgaccgcatgagcattgaactgctcaagcgcacgccttccagctaccttggcagctgtcgttacaagctgccggacccggatgtggactccacacccttcatcaaactgttcaccctgtttgacaagtacgacatctgcgcggtgttctacattggcggtaacgactccatggacaccatcgcaaagctttcccgctacggtgagcgcgtgggcagcagcgtgcggttcatcggtgtgcccaagaccatcgacaacgacctgtgcctaaccgaccacacccccggctacggctctgccgccaagtacattgccactattttaaaggaagtcatccgggattcctccgtgtatgacatccgcagcgtgaccgtggccgagatcatgggccgacatgcgggctggcttgccggtgcggcctgccttgcgggcggcgacgactgcgaaggcccggatctgatcctgctgccggaggtgcccttcgatcaggacaagttccttgccaaggtggacgagctgcagcgccgcaagtccaatgtgatcattgcggccagcgagggcgtaaagaccgccgacggcacctatctgtgcgatctggtgtccaccgcaggccagctggatgcctttggccacaaggccgtgctcagcggcaccagccgttatctctccgacctcatccacgacaagctgaactgcaagagccgtgccatcgagttttccaccctgcagcgctgcgccagccatctggccagccgcacggatgtgaacgaagcctacgctgtgggcggtgccgcagccgccgcagcctttgcgggcgagaccggccgcatgatcgcgctcaagcgcatttccgcttatccctaccagtgcatcaccgagtcggtggatgtgcagcaggtggcaaaccttgaaaagaaggtgccgctggactggatcagccccgacgggatgcaggtgactgctgcctttgaggagtacgcccgcccgctgatcctggacgaggtgacccccgtttacgtcaacggcaccccgcgccacatccgtctgtaaccccttttcccgcgtctgttttcgtgcatcctgcacgtaatattatattgccgaaacagaaaaacaaaaaaggagaaatcatcatgggtaaaaatgcaatcgttggtcagtctggcggtcctacttccgtcatcaatgcaagccttgcgggcgtctttgagagctgcaagagccgcggcgcagagatcgtttacggtatgtgcaatggcgttgccggtttgctggaggagcgggtggtggatctttccaccgtgctgacagacgatctggacatcgagctgctcaagcgcaccccgtccagcttcctcggcagctgccgctacaagctgccggactggcatgaggacgagaccgtctacaaaaagctgttcgccattctggaaaagctgaacatcggctacttcttctacatcggcggcaacgactccatggacaccatcggcaagctggctgagtacggcgaacgcatccagagcgacatccgctttatgggcgtgcccaagaccatcgacaacgacctgatggtcaccgaccacacccccggctacggctctgctgccaagtacatcggcgtggtgatgaaggagatcatccgcgatgccaccgtgtacggcaccaagtacgtcaccgtggtggagatcatgggccgcaacgccggctggctgaccgctgccgccgctctggcaaagagtgacgactgcgagggtgtggacatgatctgcctgcccgaagtgcccttcaatgtggaacacttcattgagaaggtgcgcgtgatgcaggagaagaagcccagcatcgtgatcgccgtttccgaaggcgtgaagctggaagatggccgctacgtctgtgagctggccgacgatgtgcacgcagtggacgctttcggccataaggccctgaccggcaccgcacggtatctggcaaatgtggtggcccgcaatctggacacaaagacccgctgcatcgagctttccaccctgcagcgctgcgcaggccatctgaccagccgcaccgacatcaccgaagcctatcaggtgggcggtgctgccgccaaggcggcctttgagggcgttaccggccagatggtggccctgaagcgcatctccaacagcccgtaccagtgcaccaccgagctgcaccccatcagcgaagttgcaaatctcgaaaagaaggtgccgctgagctggatgaacgccaaccacacccagatgaccgatgagttcctggcttatgcccgcccgctgatccaggccgagctgaccccgctgtacattgccggtctgccccaccacatctacatgaagaatcagaagtgatctctcctgcattgatttttctcaaggcatgatgaaagcccgtccgagttttaggcccggacgggctttttgcatttcggtattttccgctttagaacatcagaccgctgcgccgactttgggtgcgccgcctgcgatctcctctgccgtcagaggctttgcctccaccggggcattcaggcgctccttggccactgccagcatcagcttgatgcggttctcctgattgaccttggtggcgctggggtcgtaatcgatgggggtaatgttggcactggggtacagggcgcggatcttgttcaccatgcccttgcccacgatgtggttgggcaggcagccgaagggctgggcgcacacgatgttgccgtagccgccctgcaccagctcgatcatctcggcagtcagcagccagccctcgcccatcttggcacccagcgaaatgatgcccttgggcttttccaccagctccttgaaggggccgggggcgtagaagcctgcgtcggcctcagccttgagcatggcgcgctcgatgccgtccagccagttcaggaactggtcaatgccgatcttcacagccagcttgccgccgtaaagcacatggtcctcgcccatgttgaaggcacagtactgcacaaagcccatcaggcccgggaagttcacctcgcagtcctgactttcgaggaacttctgcaggtcgttgttgcccagcgggctgtacttgacgtaaatttcgccaaccacgcccaccttgaccttgggcactcgggtaacggggatggcagcaaagtcctttgcgatgagggggaaggtgtgcttcatctccttggaggtgtagcccttgcctgccagcagcacgcggcccaagcgttccacccacaggtctaccatcttatcggcagcccccttctcgttctcgtaaggtgccacctgattgcgcaaagcgcacagcatatcgccgtagaagatgcaggccagcgcacggcgggccagcggcagggtcatctgaaagccactgtccttttccagacccgagaagttcaggctggccaccgggatctgcggatagcccgccttcaccagtgccttgcgcagcaggtggatgtagttggaggcacggcagccaccgccggtctgggtgatgagcaacgcggtgtgatccagatcgtacttaccgctgttcagcgcatccagaaactggccaatgaccagcagagccgggtagcaggtgtcgttgtggacgtatttcaggcccagctgtgccacggcactgccgcagttgcccagaatttcgcacttgtagccgtcgtaacgcagagcgtactccagcaggcggaactgggtaatggccatgttggggatgaggatggtgtgggtcttcttcatctccggagtaaatttgggataattgtattccataggttcctcctatgttgcttttttaaaaagccttttgcgctctctctattttattctgccttttctgcggctacctcgtcccgctcatccagagcggcaaacaggctgcgcagacggatgttcacggcacccagattggtgatctcgtcgatcttgagctgggtgtagagcttgccgccctcctgcagaatttcgcgggtctcgtcggtagtgatggcatccacgccgcagccaaaggacaccagctgcaccagatccatatccttctgggtggtgcagtacttggcggcggcatacaggcggctgtggtaggtccactggttcagtacactggtggggaacttctgcacccggttggagatgctgtcctcggtaacaacggcagcaccatggcgggtgatgaggcggtcgatgccgtggttcacctcggggtccacatggtaggggcggcctgccagcacgatgatgcgcttgccctgacggcgggcttcatcgatgatctcgctgcccttcacgcggatctttgccatgtgggactcgtattccgcataggcggcatccgctgcggcctgcacctctttttcagagatgccgccaaagtacttgggcaggatgttctttgccatcttgtgcacaaagtccttagggcggtggatgcccacatagtcatagatgaacttggtgccctccagctccgggcagttgcctgccagaacctcggggtagtaggccaccaccgggcagttatagtggttgtcgcccagtccctcgtccacattgtaggtcaggcaggggtagaaaatagcgtccagctgcatctggctcagggccttgatgtggccgtggctcagctttgccgggaagcaggcggtatcgctggggatggtagcctgaccggcgaggtacaggccgcggctggacaccgggctggtgtgcacggcaaagccaagctttgtccagaaggcccaccagaagggcagcagctcgtagaagcccagacacagcgggatgccgatggagccgcgcttgccggccaccggcttgtactcggccagaagctgctgcttgtaggcgtagaggttcaggctgtcgtcggcgctcttgccggtcacgggcttatcgcagcggttgccggagatgtacttgcggccatccgcaaaggtgttgacggtaagctggcagtggttgccgcagccgccgcacttgacgctgaccaccttctgtgcaaaggcttccagctcctgctcgttcatcatggcagaagcagtcttgtgggccttctggctctggcgcaggccgaacagagccgcaccgtaagcgcccatcaagccggcaatgtccgggcggatgacctccacgcccatctccttttcaaaggcgcgcagcacggcttcattataaaaggtaccgccctgcaccacgatcttgcggcccagctcttccgggctggaagcgcggatgaccttgtacagtgcgttcttgaccacgctgatggacaggcctgccgagatgttctcgatgcttgcgccgtccttctgggcctgcttgaccgagctgttcatgaacacggtgcagcggctgcccaaatccaccgggcggtctgcaaacaggccaaggctggcaaatttcttcacatcgtagcccagtgcctgtgcaaaggtctgcaaaaagctgccacagccggaggagcaggcttcattcaggaagatgttgctgatggctccatcctcgatcttgaagcacttcatgtcctgcccgccgatgtcgatgatgaaatcaacatccggcataaagtattttgcagcggtaaagtgcgccaccgtttccaccagaccgtaatcgcagcggaatgcgttcttcaccagctcttcgccgtagccggtggtggtcacgctggccacctgcaggcccgggtgctccttgtaaattttcagcagctgttcccggatgaggggcagcgggttgccgaggttcggttgatagttggtgtaaaggatctggctcttctcgtccaccaccaccagcttgacggtggtggagccggagtcgatgccgatatgcaccgggccgcactgggcgctgaacggcacacgcggcacactgtgggacatgtggcgggcgtggaacgcctcatactcctccttgctggcgaacagcggcggctcgctggcgtaggtggcagtggcagcatactggtccagcgcatcggccacctcagacagaacgaaagccttgtcggcatagagggcagcgcccagtgccacatacaacaggctgttctccgggcaggtgccggtcacgttcagcgcttcgtcaaagcttttgcgcagcacgctgctgaaggtgagcgggccgcccagatacaggatattgcccttgatgggacggccctgtgcaaggcctgcaatggtctggttgaccacggccttataaatgctggcagcaatgtcctcggtgcgggcaccctgattgatcaggggctgcacgtcgctcttggcaaacacgccgcagcgggacgcaatggtgtaggtgcgctgtgcgttctctgctgccttgttcatctcgtcggcacccattttcagcagggtggccatctggtcgataaaggcaccggtgccgccggcacagctgccgttcatgcgcacctcggtaccgttggtcagaaacaggatcttggcatcctcaccgcccagttcgatcacgcagtcggtggcaggcacaaagcgcttgaccgccacgcgggtggagaatacctcctgcacaaagggcacgccgcagctgtcggccagacccatgcccgccgaaccggaaatgctcagcagcgccttctgaccgtgcaactgctcagcatcgatgcggcgcagcagctcctgcgccttttccagaatatggctgtaatgccgttcgtatgtagaatacagcagcgcatcatgttcatccagcaccacacacttgatggtggtactgccgatgtcaagacctactctcacgttgtttttcctcctaaggacaaatgccggaggcaaagcccccggtggacggcaaaatcaatttctttgccaaaaattagtttgctaacgaatcattttgtcaattcgcatacaaatgtattataatccaattttgcggcacaatcaatcagcgtcctttattttacacagaaaaaatagtattttccgctcaaaaagttaaacattttgtgaacttgtcgctttttatgcggctgcgccggtgtctcggcaaagttttttaacctttgccaacaaaaaaggactgccgcacaggagcatctccccccgcagcagtccttattcattattataatgcaatcatgcagcatgcatcacagctcgtccgggtcgccgcgctccggcatggtacgcagctcccgcaccagcatattgcgcaactggtactgatgctgctgtgcctgtgccgtatcgccgcccgtatgcagctctaccgtcggctccgttatacggtcggtgcacagcggaatggtcaccactgcctgtgtgcccttttccggtgcgcgctccacccgcaggccccagcccatacggcggcagcactcgcggcagagcagcaggcccagctttgcgccgcccagaaagcagcgccggttctccagccatgcatcctcgcctgcttccggcaggccgcagccattatccatcaccgtcagctgccagaagctttcgctgcggcgcagcatcagccgcactttgccgcccgcactgcaggcccgcaaggcattcgagagcagatgcaggcacagcagttctgcatcattgcggtccgccatgacccggcaggctgtccagccgccatagtccagcgtcagttccaccccaagctgcgcctgcaccatatcggcctgtgcggcgacctgctgcagcagctggcacaggtccagcggatagagccgcgggtcttcctcggtgcgcagaaaatccagcagcgacattacttcgttcacagtgcggtccagccttgccgacgcagcgctgatatcgttcaccgcctgccgggtctgctggtcggcacccacatgcgcaaggtgctggtccagatattcgcaattgcgtccgatcaggcccagtgcatggaagcatgcctgttccacatccttctgcgggatcgcctgcgcggtcagtgcacccgcctcgttctgccgcatctgctccatacccttgcgcctcctgtgttttatgctcagtcgtccttctgacgctgaagataattcttgacagtgtagatcagtttaccagtggtaggtttctcgtccgcaaatccgctttcgtccttgaagcgcagccacttggccgagggctttgcttccagctggtcgatcatacgccggatgccgctgtccacagcagagaccgacacatcgtactgctcgctcaccgcctgcaggatttccttgcggatggccagcttctggctggtgccgtacaccacgcccaccgcacaggaaagatagttgcagttcacgtccggcagctggatgccccagccctcgtacagttcctgacacttgcgttccatgcgctggctctgccgtcccggcaggcggtacagctcccacagcaggttcttcagttcggcatggcccacatagcagaatccatcgcccgattccagacaaatggcactcgtattctgccgcctgccctcatcaaacagaacaacattcggtttgggatccatgctgcggatattcattaaaaactccagcccgctcatatcttccagctggctgcagaggatcacaacatcaaactgacggccctgacgcagctgttccagcagacggccgccgttctggaagcaggtgcactccaacgcagggctttgctcctgcaggtagttcttttccacccgcagctccttgcggtcgtagcttccaagggcgatctgcagcgtttttgctgtgtgctcactctccacgcaacgcgccgcctttctgcctgagctgttctgtatcggtcagttcttctaccacatcctgccagatctccggctggacgccattctcacacagatagcgcaggatccggtagcagaactctggtgcagctgcaatgtagcagctttgcatgtactgccggttcccggtacggcaaagcgtcaggcagcaaccgttttcgttgcctgtatccattgagtataccagcgtatatgctttctgcaacccgtcgattgccgaaaactgacggatcataggtgaaaatgtacgttccataatttttcctcccttgctacaaggtcctgcgacgttttcaaggcattccttgtttttcttatcttattttaaagagcagagagggctggttcaatcctgaaaaagcgtctaaaaatgtcaaaatcacattcgttgcgtttttttgtcgtgtttttctgttctgcgacgcattttattttgtgcttacggttcatcgcagattttttgcgtcgtattggcagtgtaattctgctttcgcgatgcttttctgttttatcaggatcttccgctattaaaatagcacgacggcgacgcaaattcaacctccacgtcaatttttcctttattttcctgtttttctgcctcaaaagccaaaaataccggtccggtcaaaatttacgttgaaatatacacagttttttcatattatttcggtaaaatagaagtgtataacgccttgctgcgggtcctgtatccgggcagtttattataatgtacagcggcagcgttcctgcgaggatgcgccggaaaggctcacacatgctccaactcaaccacatcaagaaagaatacaaaaccggcgatctggtgcagaaagcactggatgatgtcagcctgaacctgcgggacaacgaattcgtcgccattctcggccccagcggttccggtaagaccaccctgctgaacgtcattggcggtctggaccgctacgacagcggtgatctgatcatcaacggcatctccaccaaaaaatataccgaccgcgactgggactcttaccgcaaccacaccattggctttgtgttccagagctataacctcatcccgcaccagacagtgctttccaatgtggagctggcgctgaccatctccggcatttccggtgccgagcgccgcagccgggccaccaaggcgctggagcaggtaggtctgggcgaccagctgcacaagcaccccagcgaaatgtccggcggccagatgcagcgtgtggccattgcccgcgcactggtcaacaaccccgacatcctgctggccgacgagccgaccggcgcactggacagcgacaccagcattcaggtgatggagctgctgaaggaggtggccaaagaccgccttgtggtcatggtcacccataacccggagcttgcagagcagtatgctacccgcatcgtccgcctgcgggacggcgtgatccaatcggacaccgcaccgtttgcgccggatgattccgctcaggtgccgccggtgcacaaaaatctgggccgttcttccatgtcgccgctcaccgctctcgcgctgagcttcaacaatctgctcaccaaaaagacccgcaccctgctcaccgcatttgcgggttccatcggcatcatcggcattgcgctcatcctttcgctctcggccggtgtgagcaattatatccaggagatggaacgctccaccctttcggaatatccgctgcagatctcgaccaccggcgtagaccttgccgccctgctggacccgggaagctacaccagcgccgttgccaacaacaccaatgtgggcgccaccagcacttcttccaccccggagggcatggtcacagtgcgcgaactgctgagccagctgaccgaggataattcctccgtcaatgaccttgcctccctgaaaaaatatctggacagcgacgagtgcaccatctcggaggatgctgcttccatcgagtattcctacggcatcgcaccgctgatctaccgccagaacaaggacggcaccgtgcgccagatcttcccggacagcagcctttctgcgctgaacaacaccacctctgccgccggcatcgtctcttccatgaccaatcagagcgtgtttaccgagatggccgaagagccttcgctgtacgaagatcagtacgatgtcaaggcaggccgctggccggaaagctacaacgaggccgttcttgtgctgaattcggatggcagcatcagcgattacgctctttatattctgggcattgaggacgacagcgtgatgatgcgttttctgcaggagtacgcaaaaaacaagaacacacaggctcccaccggctacggcacctacccctacgatacctttgtgggcctgaaatataagatcgttaccagctcggactattacgtttatgacgaagaacgccagatctggcgcaaccgctccgacgatgaagcgtatgtggagcagcttgtggaaaacagtccggatctgaccatcgtgggcgtggtgcagcctcgcgcagatgccagctccaccattctgcccataggcgttgcctatacccatgcactcacctactacgccatcgaccatgcagccgaaagtgaagtggtaaagcagcagcttgccgacccggaagtgaacgtgctgaccggcgagcgctttgatgccgaccagcgcgaaaccgatcttgacatttcttccctgttctcggtggataccgatatgctgaaggatgccttccagttcgatgcaagcaagctgcagttcgacctgagcggtgcatttgatctgcaggatggcagctttgacttttcctccatccttgatccgtccgcattccagctggatctgagcgatctggacctgagcgacatcgacatgagcgatgtggagctgccggacatggacgcgctggatctgagccagttgtttgccgatatggacctgtccgtctcggaggatgcgctgcagagcctgatgaagaagatcatgaatggctataagcgctatatcatcggcaacggcatcttgaatctggataagattggtttctcttcctatatggagagcgaccagttcaaacagcttctgtccgaatccatgggcgacctgctggacaccaccggcctgcaggagcagttcaccgcttcgctgcagcagaacctgcagggcatcatgacgagctatctgcaaagctactcggaacagctgagccagaagctgggcgaagctctgcagaccaaactcaccgctgccattcagacccagatgagcaccgtgatgcagcagctgatgacccagctgaccactcagttcagccagcagatccagtccgccatccagaacaacatcgctcagctcagcagtcaggtggaagatgccctgaagattgaccccaccgtgttccagagtgccgtgcaggtgaacatgagcaccgacgaccttgtggatctggtcaagatgaacctgcagtccagcaccacctcctacagcagtgttcttggtgcactgggctattcggattatgccaagcccggcagcatctggatctaccccaagagctttgaggctaagaaccgcatcgtggacagcctgaacgcctacaacgccgccatgcgtgcgcagggcgaagaggacaaggtgattgtattctcggatacggtcggcaccctgatgagcgccgtgaccaagatcgtggatatggtcagcaatgtgctggtggcctttgttgccatctcgctggcggtttcttccatcatgattggtgtcatcacctatatcagcgtgctggaacgccgcaaggagatcggtattctgcgtgccatcggtgcatccaagcacaatgtctccgaggtgttcaatgccgagaccttcattatcggaatgtgctccggcgtgatcggcgtgggcctgtgcctgctgctgctgatccctggcaacatgctcatccactccattgcaggaaccaccagcgtcaccgctgtgctgccgcccaaggctgcactggtcctgatcgttctggctaccctgctcacgatccttggcggtctgattcccgcccgcagcgcagccaagtgcaaccccgtcaccgccctgcgttctgagtaattttctttctcgacaagcaaaaggagtcgctgcatcacgcagcggctccttttttgatgtccggtgctttatctcaatttctcgtgtaattcctcatgcagttcctcgcgctcttccttcagttcctgcttgagagtccggtcgatctcccgtgtctcctgccggatctcagccagatccttttcgatcgcagggttttcttcgatttcttcccggatgaacatgagcgcaaagcttaccagcagcagcccgcaggagatccagatggtctttcctgccagccgcgctgcgcccatgcttccaataccggcacccaccgcgaacaacagaatgatgccaaaataacgcatcatccggtccttaactttcggttcatgggtcttgctccagatgcagaatgcttccacaccgctgcgcaggtcaccaatgcacatggtgctggcaaatgcatagccgttcaccttgcggaacgcctgcacctgcattgcacaggagaaggaaacgatggcgtttgccagcaggttttgctcctgcggtaaaaaacctacaatgaacagcagaagcacttcgcccagcaccaccagctgccgccagtgaagccgctgcatgttgcaaaagctctcccgcatcttttctgccaccagtacgcccagcgcaaaagcacacagaggaaccagatagtgcagcacccgatcccactgaccatccatgatgttggaactcagcagcacgatgttgccggtctgtgcatttgcaaacaccttaccgcggaacagatacgtataggcatcctgcagcccgcccgaaagcgaaaggaacaccgccgtcaggaaggactctgacatctgcccatgatgttttgttttcatattaccttttcccctcttttcgtaccctattataatatatttttacagcttggtccatatcagttttacatatccggcatgtgtatcccggcgctctgccagcgccgaaaatacggcccgtgcccggcccgcactttgcattccctcacaggttgtgttagaataagaaaaaagcttttccaaaggagaacttccttatgccgaatattgtcgagatcacagacctttcctcaccggagctggatgtctatgcccgcctgacgcaggcgcagctgcgcaatcgtctggaaccggaaaaaggcatctttattgccgaaagccccaaggtgatcgcccgcgcgctggatgccggatacacaccgctctccctgctcatggagcgcaaacagatcaccggcccggctgccgatctcctgacccgttgcggtgatgccccggtgtacacagccgaccgcgagacccttgccagcctgaccggcttcgagctgacccgcggcgtgctgtgcgccttccgccgcccgctgccgcgcagcgtggaagaggtctgccgcaatgcccgccgggtggccgttctggagggcattgtggactccaccaatgtgggagcgatcttccgcagcgccgctgcactgaacatggatgccgtgctcgttactccttcctgctgcgacccgctgtgccgccgtgccgtgcgtgtgagcatgggcaccgtgtttcaggtgccctgggcgcagatcggcacctgccctgccgactggccggaaaacggcattgctcagctgcacagtcttggcttcaagactgctgccatggctctgagcgaccgctccgtaagcattgacgacagcgctctttccgccgagccgaagctcgccatcgtgctgggcacagagggtgacggccttgcccacagcaccattgccgcctgtgactacaccgtaaaaatccctatgtcccacggtgtggattccctgaacgttgccgctgccagcgctgttgctttctggcagctaggcaaccgctgagcgatgctttttggccctgcccaaaatacttgacaaatttcctgaacagagttacacttacagggtcatcacatgggcctatagctcagttgggagagcgttcggttcgcatccgagaggtcaagggttcgaatccctctaggtccacttttagcagcagcgtaattttaacgctgctgcttttcttttgtat

SEQ ID NO: 1143 - DNA, 13809 bp, Unknown
  gut microbiota DNA sequence
cgcctaaaaaattcagccacagcgcaaagttttccttgccctattgtatcccagcggatataataataggtggaaaagttttgaaccacaggatttttccgcttttgtaccacagcacgggatttttcccgttggccacgtgcagctgtctgtatgacagcggacagcctgccgcaaaatagagaatgtgaagttgtagttggaggtagtaaaagtatatgagaaaaacaaagatcatctgcactctgggcccgtccaccgatcaggaaggcgttctgcgcgagctggtcgccaacggcatgaatgttgcccgttttaatttttcccacggctctcacgaggagcatctgggccgctttgaaaagctgaaggccatccgtgaagagctgggcaagccggtcgctgccctgctggacaccaagggccccgagatccgcctgaaggacttcaagaacggcactgaaatgctggaagccggccagaccttcaccctgaccacccgcgaggtggaaggcaccaaggagatctgctccatcacctataaggacctgccgcaggatgtgcagcccggcggcaccatcatgctggacgacggcctgatcaagctgcagatcgtcaccgtgaacgacaccgacatcgtgtgcaaggtgctgaacaacggcaagatcaagaacaagaagggtgtcaatgtgcccggcgtgcatctgtccatgccgtatatgagccagcgcgaccgcgacgatatcatctttggcgcacagcagggctttgacttcatcgctgcttccttcgtgcgcaccgcacaggatgtgtacgatatccgcaacctgctcaacgagtatgattccgatatccgcatcatcgccaagatcgagaaccgtgagggcgtgaacaacatcgacagcattctggctgcagccgatgctgtcatggtggcccgcggcgatctgggcgttgagattgactttaccgagctgcccggcattcagaagaatatcatcgagcgctccttctcctttggcaagcccatcgtcaccgctacccagatgctggacagcatgatcgtgaacccccgccccacccgtgccgagatctccgacgtggcaaatgccatctacgacggcacctctgccatcatgctctccggcgagactgctgccggtgcttaccccgtggaggccctcaagaccatgtctgccattgctgagcgcaccgagcaggagaaccacgcccgctttgcgcccctcgccgagaacaccggcaagatcagcgtgagcgatgcaactgcacacgctgcctgcctgaccgccaaggacgtgaacgctgccgccatcgtcaccgtgtccgagtccggcaacaccgcccgtctgctgagcaagtaccgcccggaacagcccatcatcgcctgcgtgatgaaggagcaggtgcagcgtcagctggccctgagctggggcatcaccccgctgatgatgcctctggcacacagcaccgatgagctgatcgagatgtccacctctctggccaaggagaacggctacctgcacaacggcgagctggccgttgtgaccgcaggcgtgcctgtgggcgtgtccggcaccaccaacatgatcaagatccacatggtgggcaactgtctggctaccggtgtgggcgttggccgcgagaatgccgacgtgaccagcgccaccggcaaggcctgcgtctgccgcacgctggaagaggtgcgtgcaaagttcaagcccggcatggttctggtggtgccctccaccagcaacgaaatgctgagttacgtgcgtgatgccgccgctctggtggtggaagagccgggcctgaacagccatgccgccattgccggcaaggccctgctcaagcctaccgttgtgggtgccgccggtgctaccagccacatccgtgacggcctgatgatcgctgtggactgcgcgcacggcagcgtgcagcgcctgcaggcataagccaaaggagaaaaactcatggaacgcattgcaagcttctgtgttgaccataccaaactggaccgcggcatgtatctgagccgtcaggacggcgatgttctcacatgggacatccgcatgaaaaggcccaatcacggcgattacctgtccaccggtgccgcccatacgctggagcatctgtttgccacctatgcacgtaacagcgcctttcaggacagcgtgatctacgttggccccatgggctgccgcaccggcttctatctgctcacccgcggcctgactcccgccgaggcactggagctgacggtggaatccttccgcttcatggctggctttgagggcgctgtgcccggtgccagcgaagtggagtgcggcaactaccgcgatatggatctgcccgccgccaaggccgaggccgctgccatgctgccggtgctggaagcactgaccggcgacgagctgcattactaagctatcttcacccttcaaattcatcatcataaaaaagcgctctcccaacggaaacccggtgggagagcgctttcgttttagttgttcttgatcgcatccagtgcctgccgtgcagcacggatgttttcttcacccgtctgccatacctcaaactctgaaaagcccggcagccccatgggcacaccctcgcggcggaaggtcatgcggctttgcagcacctgcttgccagaaaggtggaacgcatgtgccccggtctgtgcggccagtgccgggatgttttgtgccgtgacaccggcacctaccagaatttccacgctgtcccctgcccgctccaccagtcggccgagaagctccgctccctctggggcactcgccgcctgcccgctggtgaggatggtacaaaggcccatgctccggaccgtttccagtgccgcaaaggggtcggcgctgacatcaaaggcacggtgcagggtacacgccaccggacggcctgccttttccgctgccctgcgcgcagccgcataaatgggccgcatggcctccgcatccagctgcccttccggggtcagcacaccggtcacgataccatccgccccggcctccaccagctctgcggccagctgttccatctgggcaagctcgtagctgtcgtaacagaaatctccgaaccggggccgcagcagagcacgcaccggcaggccggtctccgccttgacctgacgcaccagcgcaaggctgggcgttgtaccgcccacgatcagatcggcacacagttccagcctgctggcaccgccgcgctttgctgccagtgcactggcagtgctgtccacacatacttccagaacggaacgcatttcaattcctccctttttgccgggctttgaacccggcattctggtttattctaccacgtttttccgttttataaaaccctgtggcagcaaaaagctgcggcccgggtcttatccctgccgcagcctttgttgttttttcagatcagacccagcgccttgaactcctttgcaatgccgtcctcgtataccgagggagcaatgcggtcgcaccgctttttcaggttttcggagccattggccatacacacactgatgcccgccacatcggtcatctgcaggtcattatcgctgtcaccaaagccgatggtatccgccagcgtgcagcccagatgatcacagatggccttgattccggtgcccttatcaaatttgcggttgatgagctcaccattcacaaagccatcggtcaggctgtccagcttgctctcgcagaacacaaactggtcggcatagagctgctttgcctcggcaaggtcgctctcgtggtcagcaatgaacacgatcttatacagcggttcccctttgtaatcggaaagcggcaggatggacatgccctcttccatggctttgcgccagcgttctgcttcgctgtttagcggtgcatcgttctttttgtggataaatttccacctctcagccatcttgcttccgccaaaggtggcatcccgggcttccagcgtgcactccacgccatgacgttccagcgccgcgcgcacgccttcggcctgctgcggctccatggggatatccaccagagtcttgccatcgcacagcacatagccgccggcgctgcacactgcgcccgcaaagcagtcgtgccgcagcagcggttcggtcatgcggtggttgcggccggtgcacaaaaacagcttgtgtccgtttgctctggcgcgatccagtgcagccagagtgctttccgggatgagcatatcacccggcggcagcagcgtgccgtcaatatccagaaaaatcagcttacgacccatacttttatcctttatcatcaaagggagcctcgctccacgatctgatagcccagcgtcacctgacgcacaggcccgctgctcccattttcttccagcatctgcagcaggatccgggcagcctcctgccccacctgcttctggtaaaagcgcactgtggccagccccggttccatcatgctgccagcccagctgtcgccaacgcctgcaagacccacatcctgccccacatgccgtcctgcttcccgcagggcacgcatggcaccaaaggccaccgtgtcagtcacgcagaccacaccgtccagatccgggcagcgcaccagcagttcctgcatacagcgctggccttcctccatggtaaaggcgttgcagcagatgcggggcatctgttcgccgttcagtccggcagcgttcagcgcatcctgcacgccctcacggcgctgcacgccggtggcatcgtcccgctctgtaccgccaatataaacgatccttctgcggccatggtccagcatccgctgggcaagttcccgggctgcagtgcggtcgtcgttgtacacgcaggccacatcctgaaaacgctggcctgttaccaccaccggcacacggcagtttttcagcgcctgcgccagttgaggagtataatagctgcccagcaggatgatgcccgccacgtggttgcgctgcatggcagtcagatagcccaattcccgctgggcgtccagctcggtgtttcccagcagcatcagatagctctttgcatccagctcactggcaatgcctgccgtgatctgccccaccgactgggaaccgatgctgggagcgatcacccccacctgattcacttttccggtgcgcagagtctgggcggcggtatccgggcggtagccggtcttttccactacctcgtggatgacagccctcttctgttcgctcagggggcctccgttcaggtagcggctgaccgccgcactggatacacccgccatttttgcaatatcactgatggtcatttgcagtacttctctcttttgggatgcattgttatgtgtaaacgttttcatgcttattataaaccgctttcacccatcccgcaagatgcgcttttcccggtttattccgaacgcatttttgtttttctggcaactgtgtacaaaagacggctttttttctgagaagcagggcattacaggcggtcaggctgcgcccatgctccatgcacgcacggcaagccccagcagcaggaccaccagcagaacgatgaacacggttttattgccagttcttctctgtttctttttgcggcctgccgtgctgcggcttttggccgagctgctgcgcgctgtggtgcttctgctgccggaggaacggcagccggccgttttgcggctctgggtgctgcggttctggcccggctttgtgctctggcgggctggctcgtgcgcagccgttttttcttccggcgtacggctggatacgatcggctcctttgcgccgcagcgtgccagataattttctgcatcgcggtaatagcgggcaagttcattctcgcggaaagccgtgcccacatagccgtcttccaagctctccactgcctcgttgaacaggatcgccgcctgagcggcatcggtgtgatcggtggcgtgggcggcttcgttgcgggcggtgcgcacagcattgcaggcgcggcgggccgcacccggattgctggtattgcccagcaggtccagcggtttggcggcatccttttccgggtccagcagaacccgcatacaaatggtggtatccagctgctgccagctgtttttgccggaaagatccggcatacggtcgtagtagtccgggctttcctgctggcgctgtgcaacgtgatccagcaatgcacccaagctgtgcgcaccgggtttgtgctcccagtgccagcgcagcaggcggcggctgatctcatcgcaggcagtcttgatctcaaaggcagcctgtaaggcttcttccggcataatggttctcccttcttctggcatacaaaaaagcggagaaggcataccgccctctccgctgctgtttgtgttacagcacgaactggtaatacacgaagccgcacaatgccactgctgcacagacaatggcagtgatgggcggcacccagcggatcagcgcttcggccacgctgtcgcgctcgtcctcgtattcttcctcgtcgtcataggcaggctccggctgctgagatatcggctgtgcacggcgggctgcagcaggcatcacacgggtgccttcgtccgcagctgcatgagatgccctgcccgggaactgtgcccgcattccggcatccatcacacgggtctgctctgcagcaggttcttccggctgtggttctgcttcacggcacggtgcacccatgatccgggtcggctcctcctgcacgggcgctgcgcccataatgcgggtaggctcttcggcctgcggggcaagaggcgtttccagttccggctcggtctgggcaggctgttccggctgcagcagggtgttcagcgcgttctgcagcaggatgcggtcgcagccgcactccgagcagtacacggtatcctcctccttcgggtggaaggcaccgcaggcgcagtaccagccattttcaaacacctgcggctgatacttcagctccgggcggttcatgcgggtctccagcgccttttccagctcagcagacaggcgcttgggggcaggcaggcgcacgcgcttgatgccgtccagatgcaccacccgcttgccgttgtacacgttgcacagcgaaacatccacgctggtgatggcctttgcggtaacgaacaccgcatcgtccatgccaaacagttcgccgggctttacttccaagtcacggtactcgaaccggtcctcgcacaggatcacgccgtccacgcccttgcacttgaagtggatctccagcgcggtcagggtcaccttggaaatattcttgaaggtcaggcagaccgcgtgctccccgctgacatcacccttgagcagctccacgcagacgaactgcaccgggctgccgggggtgtaatagtttgcgcgggtccgtgcaaccgggttaaaattttcctccacgacactcgctcctttccatttggatcaaatcagttctgcgggtcctgtgcatccggggcttccggtgcaggagaagccggcatctgctctgccgtttcagcctgctccgcaggctcagcggtctctgcaggttcagcagtttcggcctgctgagcagtctctgcaggggcagcctgcacggtctgagcaggctgttccggcttcggctcatcgccttcacgcgggggcagtgtgccgcccgccataatggtgttgaactcctgctcgttgagcttctcgcgttccatcagggcctgtgccagcgcgtgcagctgatcgatatgctcggtcagggtgcggcggcaggtctcgtaggcttcatcgatgatatcccgcatctcgccgtcgatctcggcagcggtggtctcgctgtagcccttgccctgacccagatcgcggcccaggaaggtctcctcctgcgaggtaccgtacaccacagggccaagccgctccgagaagccgtacttggtgatcatctggcgggcaatgttggtggcctgctgcagatcattggaagcaccagtggagatatcctccaggatcagctgttcggccacgcggccgcccagactggaaacgatatcctcgaacatttcgccctttgtcacgtagctgcggtctttctcgggcaggtacatggtgtagccgccagcctgaccacgcgggataatggtgatttcgtgcacacggggatgatgcttgcagtagaagcccgccacagcgtggcctgcctcgtggtaagcagtcagcttcttttcctccggggtcacaacgcggctcttcttctccgggccagccatcaccttcatggaagcttcctcgatatcctccattgtaatggccttgcggttgcggcgtgcagccagcagagccgcttcgttgacaaggttctcaaggtctgcgcccgcaaagcctgcggtgcgctgtgcaatgaccctgagagagacatccggggccagcggcttctttttggtgtggaccttgaggatctcctcacggcccttgacatccggcaggcccacatagacctgacgatcaaagcggcccggccgcagcagggccttatccagaatgtcggcacggttggtggccgccatgacgatgatgccgtcgttggcctcaaagccgtccatttccaccagcagctggttcagggtctgctcgcgttcatcgtggccgccgcccagaccggcaccgcgctgacggcccacagcatcgatctcatcaatgaagatgatgcagggcatggacttctttgccttatcgaacaggtcacgcacgcgggatgcacccacgccgacgtacatttccacaaagtcagagccggaaatggaatagaagggcacaccggcctcgcctgcgcaggcgcgggccagcagggtcttgccggtgcccggagggcctaccagcagcacgccgtgggggatgcgggcgcccagagtgttgaacttctccgggcttttcaggaactccacgacctctttcagctcttccttttcctcgtcctcaccggcaacatcggcaaaggtggctgtcttttggttctcgtgctcgtccttcaccttggctttgccaacgttcatgatcccgccgccgccagcgccgccgcgcatcatggagaacagcaggaagccggtgcagcccagcattgccagatagaacaggatctccatccatgggatgttttccttgacaggggtataatcgtacaccatgggagcatccgggtttgcttcgtcataggcggcaatgtagtcgcccacatacttgacgaacatggatgcatagggcagcttgtagcgcacagtcacagtgccgtcgctgttcttctgcgcagcagtatcctcatccgaggaggacagcataccgctcagcagtccgccggtggcctgcgtggtgctctgggacgtggtatcgggcaagggcaggttgttcttgccgccttccttgaggttcatggtgatgacaccggtgttcaggtccagcgagaactgcgtgacctgcaggctttcaaaataatgcaccaccgtggaatattccatggaagagctgttggcagagccggtgccgcccagcaccgaccagaccatcagcaccgccgccagcgccagagcaaggatcagcggattgaaacggggtcttttggattgcaaaaaaatcaactccagttcttggatgaattatagtgtgagaaatcacttctcgtagacttcaggcttgagcacacccacataaggcaggttgcggtatttttcatcgtagtccagaccgtagcccaccacgaactcgtccggcacctggaagccctcgtagtcaggctggatatcggccttgcggcggctgggcttgtccagaatggtgcagatctttaccgagttggggttgcgcatcttgagcatgggcacaaggttcgagagggtgacgccggtatccagaatatcctccacgatcagcacatccttgccggacagatcaccgtccagatccttgatgatctttacaaggccgctggtaacagtgttgctaccaccgtagctggacaccaccataaaatcgatgctgcagggaatgctcaccgcacgcatcaggtcggccataaacaccaccgagcccttgaggatggacaccagaacaaggttcttgccctcgtaatccttgctgatctgggcacccagctcagcaacctttgcctttaactcttcttcactaaccagaacagtcttgatatcatcatgcatactcatgttatttcctccctatgttccatttccatctgcagcacctgcgcagtgtctgcatccggggcaaggccctcggcaaagcccgcaccgcagacccacagtacttcgctgcccgccgccagcagcggcagctgatcgcgctggctggccgggatgcccgtttcgttcatccacttgcgcagccggttgtgtacacttcgccccgccgggcggtagacatctcccggctggcgggtgcgcaggacaagaccagcatacaacgtagttattctagcataatccgcctgattttttaagtcttttttatgaacgacttgtattttttcttcaaaatcagccgtaaaaagccctgcagtcaccttccagccgcccgcaaggcagtattctgcctgtttttccggctgaaagggctggctttccggccgtttgtcttcctgctgccggggccgttccggcacaatctcctgccagaagcatccgtctccggcacaaaagcgcacccggtcagtcagctgtaccgcaccgctgccgcgccgcacaaggccgcacagcagctgcacatatttttcctctgcgccacgcacgggagccgtcagcgaatgcatggctgcttccaaaataagcgcatccgcagcggaaagcgggcccagccgccacaccgtgcaggcttccgggcttttgatggcagcctgtgccgcatccagacgtgcagcagaaagcagctcttcggccttccgggcaaaataggcatccgcgcgggctgccttctcgcagaagcgggcaaggttttccaccgctgcgccgttggtgctctgcagtgcaggcagtgccgcacggcgcacccggttgcgggcataggcatcggtcgcgttcgtctcatctgtgacccatgcctgcccggctgcacggcagaagctttcggtatcctgccgggtaagggccagcaatggccgcaggtagcacccgcgctttggccggatgcctgccgcaccgtgcagccccgtgccccgggccagccgcagcagcagggtctcagcctgatcatttgcagtatgggccgttgcaacgacatctatcccctccccgcacaaacgcgcaaagcaggcatagcgcaggcggcgcgcccagtcctccccggcatgttccgacggcaggcccacttcgtcggccatctctgcagcatggaacacccgcagcggcacacccagccgggcgcattccgcccgcacaaaggcttcgtcccggtcggcggtcttgccgcgcaggccgtggttcacatggcaggccgaaagcgcaaacccgaactccggctgcagggccagcaggatgcgcagcagtgccatgctgtctgccccgccggacactgccgcggccaagcgcagcggctcgcccggacaaagcagcttttctcgcagaacaaacatgcgcacatgcgccagaattttttcattgttcatcagcgtttaaagtccacatccataaagcgggtgtgggcaccatcccagcccagcggcaccgtgctggtctcgccgtgacggttcttcgccacgatgcactctgccgtatcggcatccacctcagcgccgtccgggttctggctggcatagtaggaatcgcggtacaggaacagaacgcagtcggcatcctgctcgatagaaccagaatcgcgcaggtcggaaagctggggccggtggctggaattgttgccctgcttttccaccgcacgggacagctgagaaagtgcgatgatgggcacattcatttcctttgccatgatcttaaggtttcgggtgatggagctgatctcctgcacgcggttctcgctgcgctggccggtggtcatcagctgcagatagtcgatgacgatgaggcccacattcgggcgggtggggtcctgattcacccggcggatcttcgccttcatctcggtgatggtgatgccggaggtatcgtccatatagatgggtgcatcgtgcagcttttcggtggcaagggccagatattcccagtcctcggcgcgcagggcaccggtgcggaatgcctgactgtcgatgccggcctcagcagaaaggatgcggttcgtgagctgttccttggtcatttccaagctgaaaatggccaccggcaccttctgctgcatggccacgcgggtggcgatgttcagcgcaaagctggtcttgcccataccggggcgggccgcaaggatgatgaggtcgccgcggccaaggccggtgagaaccgtatccagcaggcggaagcctgtggggatgcccttgtatttgtctgcatccgggccgctgatcttctgcaggttggtcagggtctccaccatgctggaggaaagcggtgtcagtgcgctggaatcgcggccggagcggatttcataaatgcgctgctccgcgttttccagcagcaggtcggcatccggctcatctccggcatcctgcaggatgtcctttgcaacgcccatcagctggcgcaccagatacttttcctgcacgatctgggcgtaggccttcacattggagatgctgggcaccgtctcggcaaggccggtcaggtagacctttgcttcgtcggcactggggaacacgccgtccgagataacagcgtccagcaacgtcacaaagtcgatggtctggtcggcggtgaacaggcgcagcatttcggagtagatctgcgcgttctgccgggtgtagaacatctccggccggatgatctccaccaagtcggtgagcgtttccggtttgagcagcaccgcacccagcacgctctgctctgcctgcatgttgtagggcaggttgatgcccacgctttccagattcagttcattggaataatgtcgttcgttcggcatggtagtttatccttttgcatcatttcgctgaaaagccaaaaagcgccccctgctgtgagggggcgcagatggcagaaaaatcaggcctgttccacttccaccatgatcttgaaagaagcgaccacaccaacgtgcagacggactttgccgttgaacacaccggcatccttgatgtccttggtctccagctcgatcttcttcttatcgatgggtgcgcctgccagctgagccaaagcatcggcaacttccttgccggtgactttgccgtgcagacggccggatgcaccgcccttggccttgatggtcacggtcttgccctcgatctttgcggccagatccttggcagcagctacggtctcagcctcgtggaaatcggcagcagcttccttgctgcgggcaacgttcacagcgctggcatctgccacagcggccagcttgcgcgggaacagatagttgcgggcgtagccgtcggagacctcgtggatctcgtccttcttgccaatgcccttgatatcctgcttgagaatcactttcatgatgttatccctcacttctcaccggaaaaccggtgcagttgttgtgtttatagtatagcgcatttgtcgcttttgggcaagaggaagcgcctgaccatttaaaatggccgccgctccgctctggccatattcagcgggaattttatttttaatttgtaaatcagaaaaatctgcggatttttctgatttactttttcacgggaggggtcgtaacggcaaacggcatatgctttgcaaaccggtctgcggcttaaaa

SEQ ID NO: 1144 - DNA, 6851 bp, Unknown
  gut microbiota DNA sequence
cagtcagatcggtcggtgtcgatgacggtgaggttccacctgttcccattccgaacacagaagttaagctcacttgtgccgaagatagttcgctggaaacggcgcgtgaaaataggtagtcgccgacttgaacaaaaaaacgcttcagaagaaattctgaggcgtttttcttttgtcttgaaactgttttaggagaaaacagaaaggcaggtatgctttgaaaatgatgtgagcattgaagatgaaacagactggaagagaagggcacaatttcatgcagagtgaagcgaaaaattttatgatgtgtttgtgccttatctattgaacaaacaaaaaccttaaataaatcatggcggctcggctgtgctgaccttttggcacgaccgggccgctttattgtaataaaaccttgactcttcagtcgttgtagggtttactatctataacggaaaggagctgcccggtctggcagtgtaagctctgtacattcggcagagaagagggaagccgggcagaaaacattatggaaaaaaatctgaccagcggcagtgtgttgaaaagcattttgtttttttcactgccctatctgctttcgtactttttgcagacgctgtacggcatggcggatctgttcatcatcgggcagtttgaaggtgtggccagcacaacggcggtgtccattggcagtcaggtgatgcatatgatcactgtgatgatcgtgggccttgccatgggagcaacggtcactattggccgggccgtgggcgcagagaacaaacctcgtgcggcgcggctcattggcaacacagtcacgttgtttatggcaggatctgtggtactggcagctgtgctggtagggcttgtggacccgatcgtacgcattgtctccacaccggagcaggccgtggcgggcactcgtacctacctgatcatctgctttatcggcgttccatgcatcacggcgtataatatcatggcatcaatcttccgcgggctgggcgattccagaagcccgatgtactttattgcggtggcctgtgcaagcaacattgcgctggattatctgttcatgggcgcgctgcatcttggccctgccggtgcagcgctgggtaccactctttctcagctggtcagcgtgatcatctcgctggtcgtgatcctgcgccgtaagagcggcatccacctttcgggtgcggacttcaagccggaacgcagtgcacttggcgagatcctttccattggcataccggtgatgatgcaggacggctttattcaggtatcttttatgatcatcaccatcattgccaaccaccgaggcctgaccgatgccgccgccgtgggcatcgtggaaaagatcatcagctttttgttcctggtgcccagctccatgctgtccactgtatcggcactgggcgcgcagaacatcggcgccggcaagcacgaccgtgtggatgccattctgcgctacgccatcggcattggcctgacctttggactgatcgtggcagtaacagtgcagttcattgcaccgtcggtggtgcggcccttcacctcggacgaggctgtggtgctggccggtgtatcttacatccggggttatatttttgactgcctgtttgcaggtgtgcagttcagcttcagcggctatttctgcgcctatggcaagtccgggctgtccttcctgcataacacgctgtccattctgctggtgcgcgtgccgggtgcctacctcgcatccaagttcttcccgcagacgctgctgcccatgggtcttgcttcggcctgcggttcgctgttctccattctggtgtgcgtgatcgcttaccactggctcaagcggcagcagaaagcggtgccgcatggctgagcgggaaccgttccaaatcggtgagatggcatagatgtactgcctgagtatgggtgcgctgcgccactatgagctgctgtcaagcgtacagcagcttttttgttgcacaaaaaccggccctgcggtacaatagacctgttatttattatgcaggaaagaagagagaacagatgcgagaccactatatcgacctgtgcggccagatcgattttacccgtaccgaggcaatgcccctgctggcgcgggatgcacatttcagctttgcgtgcaatggctgcggcgactgctgccgtggcagagaggacattgtactttcaggctttgacctgtggcgcattgcagcccggctgcgcctgccgccgcagatcgtggcgcggggatattgccgggccagcattggcactgtgagccatttgccggtgctgcgtctggccccggtgaaggagaaccggaacaactgccccttccttacgggagaccactgcgccatccacgatgccgaaccgctggtgtgtgctctgtacccgctggcgcaggagatcagcaggaaaggacaggtgagctattttctgcagccaaccggctgcggcgggcaggtgatcgaggcaagggtggaggactatcttgctcgttacgatgtcccggcccgggaacagaccgatgtgcgctgggcgcagacctgcatgacactggaagacacggtggaacagctgggtgcgcagctcagcccggtgctggtgcgccggatgcaggacaagctctggcaggcgctgtattttggctacgactatgccgcaccgtttttgccgcagctggagaaaaacctgcactggctggatgctgaatttgcaaaactgacagaatatcagcaaaaacggaataacacatcaaaataatcgatcgatatatttgatacaatcgataataaaggccgttttagggcaaaagtgagttgttttaccgtgaaatgtgtgatatacttcacgagtgtaaagcgagactgtacgagccttgcatacaaaacatagctttccggtgcggtacctgtagaccgcacacgcaaagagatagaggagataagcattatgcgtaaaatcactcgtcgttcgtttctggctgctgccgctgcctgcggcgcagctgctgccctgactgcctgcggcggttcttctgcatcttctgcagctgcttcttccgctgcgtctgcatcctccgttgctgcttctgctgcagccgatggccagaagttcacgatcggcatctgccagttggtgcagcatgccgctctggatgccgctacgcagggctttgaggatgttctgactgcttccttcggcgagaacgtcaccttcgatttccagaatgcacagggcgattccgctacctgcgctaccatcaccaacggcttcgtttcctctggtgtggatctgatcatggccaatgctacgcccgctctgcaggctgcacaatctgctaccgacagcattccggtgctgggcacctctgttaccgagtacggtgtggctctgggcctgaccgatttcgacggcaccgtgggcggcaacatttccggcacctctgatttggccccgctggatcagcaggctgagatgatcgtggagtggatgccggaggccaagaaggttggcctgctgtactgctctgctgaggcaaacagccagtatcaggtggatgaggtccagaagtatctggaggaaaagggtgtcaccgctacccagtacgctttctctgattccaacgacctgtcttctgtctgccagaaggctgccgacgagaacgacgcactgtatgtgcccaccgataacactgttgctgcaaacaccggcattgtggacggcatctgccgcccggccaagaagcccgtgttcgctggcgaagagggcatctgcgccggctgcggcgtggctaccctttccatcagctactacgatctgggctacaccactggtgagatggcagtgaagatcctgaacggcgaggctgatatctccaccatgcccatcgagtacaccgatgtgaccaagaagtacaacaagactatctgcgacgatttgggcctgaccgttcccgacggctacgaagagatcgagggctaaaatactccgggaaaccaaacagaaaatcagcggagaagggtaaaaagtgctcttctccgctttcccgtatcaaacgggaagtaaaaaagtgtaacgtttaggaggaattgttttggaaatcattgcaagactggcaaacctgccgggcgctttgccgggtgcctgtgcacagggccttatctggggtatcatggccattggcgtgtacctgacctaccgtattctggatgtggccgatctgaccgtggacggctcctttggcaccggcggtgcagtgtgcgtcatgtgcctgctgtccggccagaacgtctgggtttccctgctcatggcgctgctggcaggcctgctgtccggcttcgtcaccggtgtcctgcacacatttatgggcattccggccatccttgccggcatcctgacccagctttcgctgtattccattaacctcaaaatcatgggcaaggccaatcaggccatcaacgtggacaagtacaacctgttgatctccctgcgctgggtcaaggagttcgctctccacaaccctatcgttatgatcatcattgtcacagcggtgctgatcggcattctgtactggttcttcggcaccgagctgggctgtgccatccgtgccaccggctctaaccccgccatgtcccgtgcgcagggcatcaacaccaacttcaatatcgtgctgggtctggctgtgtccaacggtctggtggcgctgtctggcgctctgctgagccagtatcagggctttgcagatgtcggcatgggccgtggcgcgatcgtcattggtctggctgctgtcatcattggcgaggctctgttcagccgcatcttccacaactttgcactcaagatggtttctgtctctctgggtgccatcatctactacattgtcattcagctggtgctgactctgggtttcgatgccaacctgctcaagctgctgagcgcttctgtggtggctgttttccttgccgtgccgtactggaagggcaagtacttctcgaagccggtgaagaaggcaaaggaggatgcaaaaaatgcttgagatccagaatgtttccaagacctttaacgctggcacggtcaaccagaaaactgccctgaacggcctgaacctgaagctgaacgagggcgatttcgttaccgtgatcggcggcaacggtgcaggcaaatccaccatgctgaacgcagttgccggtgtgtggccggtggacgaaggcaagatcattattgacggtgtggatgtgacccgcctgagcgagcatcagcgtgccgcttacatcggccgcgtgtttcaggaccccatgaccggcactgctgccaccatgcagatcgaagagaaccttgccctggctgcacgccgcggcaagccccgcaccctgcgcattggcattaccaaggcagagcgcgagcagtaccgtgaactgctcaagacgctggatctgggtctggaagaccgcctgacggcccgtgtgggcctgctttccggcggtcagcgtcaggcactgaccctgctgatggctaccatgaacaagcccaagctcctgctgctggacgagcacaccgctgcgctggaccccaagaccgcgctcaaggtgctgaccctctcggccaaaatcgtggaggaaaaccatctcaccaccatgatgatcacccacaacatgaaggatgccattaagtatggcaaccgcctgatcatgatgtacgaaggccatatcatttatgatgtttccggtgaggaaaagaagaacctgcacgtctccgacctgctggcaaagttccagatcgccagcggcggcgagtttgcaaatgaccgcatgattctgtcctgataaattacaaggttaaaatgcaaagcgcctgtcccggaaaaaaccgggacgggcgctttttatgtatgtttaccaattcaagagcaaggcggttaactggagtttttgggagatgattttctttacatcttttgaagaatgcggggcaccgtcctgaattgcaaagaggaacagcgagtaaagttcattatattttggaatagccattttttcaaacctcacaccttggaaaagctcagcacacattcggtatgactttcattgtccaaacacagatcaatatcgctttcaacgataggcagtcggaatttgatggatttgagccactgaccgttgggctgacgctccgggtagatctgaatttcagaaatcagatgttccatcagctttttgcgttcaaggggattcatcacattgtagagcttttcaaagcagatgagaactttgtaaatgttgtcgcccgtgattttatccgcttcgatagcctgcttctttgcccgggcatccatcaggttgttttcggcttcctcgattttatcgtacatcctgtaaagccgctcgtcaaggtcagatttgcggatgatatagtggcgctcatccgggtcaagggtgtcgatctcctccataattttggacttgatggaataatactgccgcaactgcttttcagcggccgcaatttcctgttcaatggcagtggtgtctactttgctgttgatcttctcctgcatcatggcggcaaactttggattgctgactagtttgatgataacctccaccacggcgttgtccagaacttcttcctgaatttgcttgttgaaatcgcatttttgcccacgttgcatcttgcggtgcttgcaactgtaataagagaaagatttatagggtgtgccatctttctttcttttggtgcatttgttgctgtacattccagcaccgcaaatggggcacttgacaagggcggataataaatgcgcctgttccgttttgctgcggttgactggctcgtatcgtttggattgcacc

SEQ ID NO: 1145 - DNA, 2688 bp, Unknown
  gut microbiota DNA sequence
gggcggtccgcagaccgcccggcattgctctattataaataattcttccactgaatatgcgcagagcagcgcggagcgcattccaatcgtttttctcagaacagcaccacagccgccagacgcaccagcaaagcgcacagccatgccacggcgcactggttcaccaccatgatgaccgcccacttgttgcccagctcccgcttgaccgaggccactgccgcgatgcagggggtgtacagcaggcagaacaccagcaggggcgccgcctgcgccggggtaagggccgccgacagcgcagcttcggagccaaagaggatgagcagcgaggacaccacgctctcctttgccatgaagccggtgatgagggcggtggagatgcgccagtctgcaaagcccaaaggcccgaacagcggggcgatgtcgcccgcaatgcgggcaaggatgctggcctgcgggtcggcggtcagccgcagctgcaggtcaaagttctgcaaaaaccagatgacgatggtggccgcaaagatcacagtgaaggccttctgcaaaaagtcccgggccttttcccacagcagctgtgccacgtttttcaggccgggcaggcggtagttgggcagctccatgacaaagggcaccgcctcgcccttgaacaccgtgctcttgagcagcagtgccgccagcacgcccaccgcgatgccggtaaagtacagcagcaccatcacaaggcccgcatactgcgggaagaacgccgccgcaaacaggctgtagatgggcagctttgccgagcagctcatgaacggggtgagcaggatggtcattttgcggtcgcgctccgagggcagggtacggcttgccatgacaccgggcacggtgcagccaaagccgatgagcatgggcacgatgctgcggcccgaaaggccgatgcggcgcagcagcttatccatcacaaaggccacgcgggccatgtaaccggtatcctccagcatggagaggaagaagaacagcaccacgatgatgggcagaaagctcagcacgctgcccacgccggtaaagatgccgtcgatgagcaaggagtgcaccgccgcgttgacgttccagttggtaagcgccgtgtccacgatgccggtcaacgcgtcgatgcccgtttccatcaggttctggaagaacaggccgatgacgttgaaggtgaggaagaacaccagacccatgatggcgataaaggccgggatggcggtgtacttgccggtgaggaatttgtcgatgcggttggagcgcagctgctctttgctttcgtggggcttgaccaccgtcttggctaccagctcctgaataaaggagaaccgcatatccgcaatggcggcggcgcggtccagcccgcgctcccgctccatctgcacgatgatatgttcgatcatctctttttcgttctgatccagctgcagggcttcctcgatgcgccggtcgccctccaccagcttggtggcggcaaaccgcaccggaatgcccgccgccctggcgtggtcctcgatcagatggatgatgccgtggatgcagcggtgcaccgcgccgccgtggtcgtcctcactgcagaaatccatgcggccgggccgctcctgatactttgccacatgaagtgcgtggtctaccagctcatccacgccctcattcttggcggcggagatggggatgaccgggatgccaagcatggcctccatcttgttgatgcgcaccgtgccgccgttgccgcgcacctcgtccatcatgttcagcgccagcaccatgggggtgtccagctccatgagctgcatggtcaggtagaggttgcgctcgatgttggtagcatccacgatgttgatgatgccggtgggcttttcgccgatgatgaattggcgggtgacgatctcctcgctggaatagggggacatggagtagatgcccggcaggtcggtgacctcagtctccgggtggcccttgatggcaccgctcttgcggtccaccgtcacgcccgggaaattgcccacatgctggttggaaccggtgagctggttgaacagggtggtcttaccgcagttctggttgccagccagcgcaaaggtgagggtcctgtcctcgggcaggggattctccccctttttaatgtggtattttccgccctcgccaaggccggggtgatccaccattttatcatctgccggagccgccgacattgccggggccttttcggtgggggtgatgccgatctgcgcggcatcgtccagccggagggtcagctcatatccatggatgcgcagctccatggggtcgcccatgggtgccagcttgaccagcgtgacctccgcccccgggatcaggcccatatccagaaaatgctggcgcagtgcgccgctgccgccgacggtatccacaacagcgctttttccgatctgcaattcttttaatgtcataagatcgaccttctcattttatccactgtcaacgtgtgttagtttgtgttaacaatagtaatataggctaactttgcgcggttgtcaatagataaaatggtgaaggtttaactcccccagtctgctgcgcagacagccccctctgggatggggcctttggcatagcgggaaagtttgcagctaaaacgcaaagcttgcaggtacgccaaaggctccctccccgagagagctggcaaaaccgtcaggt

SEQ ID NO: 1146 - DNA, 17609 bp, Unknown
  gut microbiota DNA sequence
ttggaggtttatgcgtttacttcacggtgtggtagccatcggggttgttcttctgccagttccagctgtcggcacacatttcctcaatgccgtattctgccacccagccaagctcgttctttgccttggtggggtctgcatagcactcggcaatgtcgccggggcggcgcgggtcgattacataggggatctccttaccgcaggccttggagaaagcgtggatcacatccagcacgctgtagcccttgccagtgcccagattgcagatgaacaggccgcagttcgtttccagcttcttgatggcgcacacatggccgcgggccagatccaccacgtggatgtagtcgcgcacgccggtgccgtccggggtgggatagtcgttgccaaagacatgcaccttttccagcttgcccacggccaccttggcgatatagggcatgaggttattggggatgccgttggggtcctcgccgatgaggccggacttgtgcgcaccaatggggttgaagtagcgcagcagggccacgttcaggctggggtctgccttgcacacatcctgcaggatgcgctcggtgaacaccttggtcgtgccgtaggggttggtggtggcaccggtggggaagtcctcggtgatgggcacgctggcggggtcgccatagacggttgcggaagagctgaacacgaagttgtggcagttgtgatggcgcatcacgtccagaatgaccagcgtgcagttgaggttgttgtaatagtattcaatgggcttggaaacactctcgcccactgccttgtaggctgcaaactggatcacagcagtaatgtccgggcactcagagaagatgtgctccacatcctcgtgcttggtcatatctgccttgtaaaagcggaagtccttgccggtgatctgcttgatgcggtccagcaccaccggagatgcattataatagttatctgccacaacaacgtcgtagccagcgttcaacagttcgatgcaggtgtggctgccgatataaccggcgccgccggaaaccaaaattgccatagcctagtacctctctcactcatttacattacagctgatgccggcattccccggccttgcctaaagaataccgcttttaacgcgcagaatcaagggatgcgtcttctatttagatgaatttttgttgcatctttgtttttgaggttttgatttaaaaacattttttggcattttgtcatggataaaaggcacggtttgtgcaaaacatagaaatggggacgggagaaccctctcagtcacggcttacgccgtgactgagagggttgtcgccgtaggcgactgggggagttctcctcctgccacgcaaaaaacgtctgccggagcagacgtttttgtgtggtgcatcattttttacaattttccgcactgcttgccggtgaaaaagcgcagggtggtggtggcgcggaacaccttgcctgcccgcagcaccgtggtggggaactccgggtgggaagggctgcaggggtagtgctgggtctccagcgcaaagccgccgtacttctgcatgggcacgccgcccttgccgggggtggggcagtcctgcaaaaagtttccggtgtacaactggatgcccggctgggtggtgtacagcttcatgctgatgccggtcttttcactggtgacccatgcgcagatgctctggctggagccgcgggcgcggtcgatcacaaagcagtggtcgtagccaccgcccaccatggtggtctgggcaaagccggtatcaatgtcccggccaatgagctttccctcggtaaaatccatgggggtgtttgccaccggcagaatggcaccggtggggcaggtctgattgttgccttccagatagttggaggcatagatgcgcagcttctggcccagaatatcgccctcaccgttcaggttgaagtagctgtggttcgtgaggttcacgatggtatccgcatccgaagagacgcggtaatccatgcggaaggtattgtcctcggtgagggtatagcgcaccgccagcttcaggtttcccgggaaaccgtcctcaccgtccgggctctcggcctccatcagcagggtgtcgccaaaggccttcacccggtacagtttgcgcgaaaagcagccgtgcagatggttggggccgttgtttgcttccagctggtaggtcttgccgcccacgctgaaggtggcattctcgatgcggtttgcatagcggcccacgaacgcgccgcagcaggtgctgccggaggacgtgaagtcatcctcataatctgccatggtgtcgtggcccagcacgacatccaccgggccgttcttggccggaacgatgatgtttttaatgatgcatccgtagtccagaacgctcaccgtcaggccgccggggttggaaaggatgtactctgtaacatttgcgccctgtttggtcacaccgaagggcttggagcggatctgtgccattgggcattcgcctcctcagattttactcggacatacagtcaggcagacttccactgtattctatcttatttatgattatatcacagttttatatctttgtggggaacggattttagaatttgcatccaatttttccagctattttttgttgaaattattcagttggcggggcatgtaaccggaaagaggagcttcccgcgcagagcgttttcgcgtggatcaagtttcatgccttttgtaaaaagcattaccgccgggtacgttctcttttgcgtgccaaaagagaaccagaaaagcacccgctactttcgaggcgcgggaggcacgaactaggggctgctcgcccctagtaaccccaaagcagaaaggctccatacaaaaaatccaagtcgctccgctagaggattttttgtgttgcgccgattttgagtcgctgcgcgacggcggtacgccgacagcagcacatgccgtttgccgttacggcctttcccgtgaaaacgcaatgccgggcggtccgcagaccgcccggcattgctctattataaataattcttccgctgatgatacgcaaagcaaagcggcgcgcattctaaatcgtcatgctgtcgtcaggcttccggctgtgccgtgcccgcagacttctgcgccgcaatgaactcggctgcatcgtccggaatgtcatccagatcatcgtcgctgccaacatccacgttgagcggcggcttcttgaacaggatatcgtacagcaccggaacgatatacagggtcatcaaggtggcgtagctcaggccgcagatgatgacgatggccatgccgctcatcagctggcttgccatatcgccgctgaacaccagctgcagcatggccagcacagtggtcagggtggtcatgaggatggggcgcatacgggtcttgccggtagccaccagcgcagcgcggcgctccatgccgccaatgcgcagctggtttgcatagtccacgaacacgatgccgttgttgacaacagtgcccatcagcacgatgaagcccatcagggagatcatggtaagctgctggccggtgatcagcaggcccagcaggccgccggtaaaggccagcggcaccgtgaacagcacgatgaagggggacagcaggctctggaactgtgccaccatgaccagatatacaaagggcagggccagagccatccactgcaccatttcgttcaccatgtagtcggtgccctcggtctcgccgcccagcgtggtgctgcagccctccggcatctcaccgctggccgcgtactcatccagcttcttctgcagcacgcgggactgcaccatggtgttgtagccatccagcgtatctgccgtaacggtgacaaactcggtctggttctcgctggtaatggcatccggtgcggtgccggtggtccagctggcgatatcgttcagggtgcaggtaccattggtcactgtgccgtctgccgacatttcggtggtctcaaaggtaagctccatcatgttttccttggtgacggggtccagattgtccgtgatctggacatccatggtggtgccgttcaccgtgacgggggtctgggccgtggcggtggtggtgagctttgccgcgatctgctggtacacctgcgcaacggtcaggccgtaggcgcgcaccttgtcgcggtccaccttcaggatgatggtggcatcgccgctgccaaggccgttgtccgcattggcaaagccctcggtatcgttgacgatctccattaccttctcggaaacggtggtcagcgtttccggatccttgccatagaccttgaccgacaggccggtggccagctggctggtcagatcatcggtcatgccgtacagcttgacctcagcggtgcaattctcgatctgggacactgcatcctccatggcctgccgggtcttttccacctcacgggaggaaaggctcttgctcatcataacattgatcttgtatctgccgtaggcattggcggagttcaggatatcggtaatggcggtgggcaggcccagctggctgatatccagaccggccatgctggtgtcggtggtgatgcccacctcttccacgttttctacattcagggccgcctctgccacctgacccgcaatggcataggattcctccttggtcaggccgtcggcggtggacagggtgatctgcgcctcgttgctggtgatgctgggcagcagctccacgcccatgttcagcacctgccagccgctgaacaccagcagcaccaccgccgcgatcaggggcagggcacggtgctgcaggcaccattccagactatgggcatacttttcctgcaccttttcaaaccaggcaaggcgcttgggttcagcttttttcagcacagtagaggatgccgccgggaccaccgtgagcgccacgatgagggaggccatcaggcagtaaccgatgcacagggacatgggcatcatcagactgcgcacaatgctggccgagaacaccaccggcaggaacacgcacaccgaggtaagggtggaggccaccaccgacatgcccacctgttttgtgccctgcacggcagcgcgggccgcaggcacgccgcggctgcgcagacggtagacgttctcaatgacgaccaccgagttatccaccagcataccaatgccgagggaaaggccggccagggtcatcacgttcaggtccagcccggtaaagtacatgagcaccaccgcgaacagaacggacagcgggatgctgatgccgaccacgagggtgggcttgatatccttcaggaagatggccagcacgatgatggccagtgcagcgcccaccaccatgctggtgaggatgctgttgatgacgatggtgatgtagttgccctgattggacagcaccaccatgtgcaggccgtcgtattgtttttccagctctttaaatgcggtcaggcagttgtcggagacctcgcctgcactggaagtcgcattcttatagattttgaggatggatgccttttcgccgttcaggcgggtgtagctgtcggcggagttatcaatgacctccacatccgccacatcagaaaggcgcacgtcgccgtagccctccacatgcagcagcagggcaccgctgatatccttcacactgttgtactcttcgccgactttcagcagccaggactcgccgtccttatcctgcacgtaaccggccggcatggagaagttctgggcatagatgagctgcgccagcgtttcaatgtccagctgctttgtcacatcggcctgtgccagagcgttggtcttggccgtctcgtactctgccttggcagcctccagctgcttttcgtactcgttcagcatttcacgcgcttcggtgaactgcatataggcgttgagctgctgctgggagaagctgcccagtgcgccggagaactcggtcatcagctggggcacattgtccatggccttgatggtgctttccagcgtgttatagaccacattcaggctttcctgcagctgcatctcattggcaagatcctctgcggtgctgccttcggagccggtctcggtgttcacgcgctcctgcagcttctgcagggcggtagtgagcttatcggtaatggtgcgcagctcagccacaatatcgatcagagagtcgatatcccgcataccggtctcgttgaacttgtccatgaccttctgcagaccgtcgcgcacctcgatcagggcctgctggatctcaggctccttgaccacagcgatcaggctgttcacactttccagaagagcctgcgcctgcgcacgcaccgtttccactgcggcgcccacctcggtgctcatctggctcatgaccgagttggacaccgtattgccaaagtttttcagctgcttttcgtattccttgcgtccggcggtgatctgtgcctcggcgctttccagctgggagcgggctgcagccagctgggtatcgatcagttccagcagctttgcgttgatctcgtcgatcttatcctgattgagctgcacctgcaccagcttttccaccagaccgctggacgaaacgctggacacaccgcccttgcgctgcacttccggcacaagggtgttctggataaactcagaaagctcgtactggtcggcaccttcgcggctgacagccaccgtcatgaaagcgttcatgttcaggctgtactcaatgatggagggggtcaggcaggtgctgggcaggtcgcttttggcctgatccagcttgttggacaccttgaccagcgcgctgttcatatccgtatcctcggtaaactccatcagcagcaggctgtagttttctgccgatgttgcggtgatcttggacacgcccggcactgtgagcgagttctgcagcacatccgagacctcgctctccacgcgctccgggcttgcaccaggatacacggtgaccaccatcagatacggtgtgttcacgttgggcagcaagttcgtatccatctttgtgaccgccacaaagcccaggatcaggatcatgaccactgcaaccagcaccgtaaacggctttttgacactgaatttttccattttctcctaccgtttctctgccttgccgcaaagcaggacagctgctttccctgcgggaaaggctacacttcaacatttttattatacacgcaagcccccgccttgcaagagcggggtgggattcttttgcgattctttggatactttcgcaagattttaacatttgccgttccgtttttccattttccggctgcgggtgcgaccaaattcggtcagtcttcctttatggatacgcggcagcagggcagattgttgcacctttttaaaatttttctgccaaagcgccagagccgctttttgttttttgcgtggaaatgtgcatttgaatatgttatactagagtacagaatggattagcaggctctttttcgggccttatcctatagattcgaccgataaaaacgaggaacactatgaaaaaagtcatctccgtccgtttcaaagagaacggcaaaagctattattttgatcccgccggggccgacatcaaaaccggcgaatacgtgatcgtggagaccgcccgcggcattgagtgcggcgaggtggtgcagggcgtgagggagatcgccgatgcggcagtgcccaaggccctcaagcccattacccgcatggccgacagcgtggatatccgccggatgcgccagaaccgtgaggacgaaaagcgcgcctaccgcacctgtcaggagtgcatttcccgccatggcctggaaatgaagcttgtggaggccgagtataccctagaccgctccaagatcatgttctactttaccgccgatggccgcgtggacttccgcgagctggtcaaggatctggccggtatcttccacacccgcatcgagctgcgccagatcggcgtgcgggacgagagcaagatgatcggcggccttggcatctgcggccagcccttctgctgcagccgctttttaaaggacttccagcccgtctccatcaagatggcaaaagagcagggcctttcgctgaaccccaccaagatcagcggtgcctgcggccggctgatgtgctgccttgcctacgaggaaagcgcctacgagtacctgaacagcatcatgcccatggtgggcagcaccgtgcgcacgccggacggtcttggcaccgtgctggaggtgaacccggtttccggctacctgcgggtgcgctgcggcaccgagagcctttcgccccgttactataaggtgggtgtgtgcgaatatatcagcggcggcaagcgtgcgccccgccgcccggacccggacgacgattactccggcgtgcgcaacccggccccggtggtggcttcctccgacgatggcgaaaagcgctgcgcgggcggctgctgcgcccggaagcgcgctgccgaaaaggagtgagggacgcgccggaggttctgaggggttagtctgctaaaactaaccgttcttcgtgatttttgccaaaaaactcctgcaaatttggccataagttagcctgtgcttttgtgcaacccaacaaaaaacagacttttgtgtttttcgggtcacggttagtcttgccttttctcacctgctttgttaaaatgcaggcaaggatatgatttccggagagacatgcacagccgtgccatacatgactcttcatacaatacttcgggcacggagataaaaaggagagtttattatggcacacaaggtttctgacgcatgtgttggctgcggcgcttgcgagggcgcttgcccggttggcgctatcaccgttgatggtgttgcttctgtgaacgcagacgcttgcatcgactgcggcgcttgcgagggtgcttgccccaccggtgctatcactgctgaataattttagcagctgcacaaaaaacgcatcaaaagcagcaggcctgtccaaagcaggtctgctgcttttttgttttgcagtaattcgcacaaattccccgagcaattccacgcatttttttgagagggtacggcacacttatctatggaacattctaccgaagtcttgtataatagaactatggtttattgctcgccggagcatcgttttggctccgacgcgctgctgctggcccgtttctgtgagccaaagcgcgcccagaaggccgcagacctgtgctccggctgcggcatcgtggcgctggaatggcacgaccgcggccaccgcggcccctgcatggggctggagctgcagcccgagggcagcgctctgctttccgctgcggttcaggagcaggacatcgggcacattgagcctgtctgtgccgacctgcgcgctttccggcagggcgagggcagttttgacgtgtgtgcgtgcaatccgccctatttcacggatgggccccaaagccaaaacgcagcccacgcccttgcccggcacgagaacacctgcacactggacgatgtgtgccagtgtgcgttccgccttttgaaggacggcgggcgctttgcgctgtgccaccggccggaacggctggcggaggtgctggcggtgctgcgggccaaccggctggagccgaagcggctggcctttgtaaagaacaaggcggacggcgcgccatggctcttccttgtggaagcgcagaagaaccgcaagaccggcctgcgggtggagccggatgtgttgatcagcgccggtgcggcgttatatgggaggtaaactatggcaggaactctttatatcgtggcaacgcccatcggcaatctggacgatatgccgccgcgcgtagcggccacctttggcgcggcagactttattgccgccgaggacacccgtgtgaccatgaagctgctgaactttctgggcctgaaaaagcccatggtcagctactatgagcacgccctgcagaagggtgagggcatcctgcgccgcattgaagcaggcgagagctgtgccctgtgcagtgatgcgggcatgccctgcgtctccgacccgggcgaggtgatcgtgcgggacgcgctggcccggggcatcaaggtagtgccggtgccggcggcttccgcctgcgtcacagcgctggccgtgtccgggcaggacacctcccgctgggtgttcgagggctttctgcccgtgaaccgcaagcagaaaaaagagcggctggctgagcttttgcaggaaaagcgcaccaccatcttttacgaagcgccccacaagctgcgcaccacgctggacgatctggccaatgcctttggcgcagaccgcagcatcaccctgtgccgggagctgacaaagctgcacgaggatatctggaagactaccctcggcgaggcggtggagcactacaagaccaacgagccgcgcggcgagtatgtgctggtgatggccggtgcgccggagaccgccgacccggagcaggagctgacgctggagcaggcagcgcatcgggcgctggagctgaccgggcagggctttggccccaccgcagcggccaaggcggcggcacagggcacaccttattctaaaagcaaagtgtacaagcagctgctggtattgcaacagggccagcaggctggtgaatgacagcatctcaggtaaatggtaatagaggaggaccccttttgtgacaaagcttctggttttgagcgacagccacggcggacgtgccgccattgagcgcgtgctgatgaaagagagcaaaagcatcgatgccctgatctttctgggcgacggcctgcgggatctggaactggctctgacgctgtaccccaagctgcgggcctactcggtggcgggcaactgcgattacggtgcactggaacccaccgacggccttgccgcctttgacggcgtggtgatcttttacactcacggtcatatgtacggtgtgaaatacgatctggatacgctggcagatgccgcatctgcccggggtgccgaggtggcgctgttcggtcacacccacatcccccatgcagagacccgcagcaaggtgtttttgttcaaccccggctcctgcggccggtgttacaccgggccggacacctacggcatcctgacgctggacgaaggcaaagtgaccgcctatgaacataaagaggtacccaaacaatgagcatcaatgaggtgcgctatctgccggaatgcggcagcaccaacgcttacgtgaaggaacattttgaggagttcggcccggtgggtgcggtgtataccgagaaccagaccgcaggccggggccgtctgggccgcagctgggtgaacgccgagggcaaggccctgtattatacagcagccatccgggaaccgctggcccagcctgccaccctgccgctgctggcaagccttgccgtgcgcacccagctcaagctgcgctacggcgtggactgccagatcaagtggcccaacgaccttctgctcaacggcaaaaagatcgtgggcatcctgtgcgagggcgtgagctacggctaccagcagcagggccggggcattttgtgcggcatcggcatcaatctggcccagccgcagagctactttgatgccgccggtctgcccaatggcacctcgctggcgctgcagggcgcaaaggtggatctttccaccgaccccgcatggctggccgagggcctgaccgactttggctttgaccgcaacatgtatgtgtttgcccgcgatggctttgcacccttccgggaggaatacaaggccgcctgcgtcaatctgggccgccgggtcaccttcgacctgccggacggcgggcagggtgcaggcgaagccgtcgatgtggacgaagagggccgtctggtggtgcgcaccgacagcggcgaagtgcacgtttttaccggcgaagtatcggtgcacggcatctatggggccgtgtaaaagcactctttataatatatgagcgtcccgggaattttcctcggctggttcagtcgaggaaagacccggggcttttttcagctttgtccaaggcccgccgaaagcagggaaaaggaaagcttttccatccttcctctggacaggcgcgcacgctgttaaaaggcattcttttccgcaaagctgttctccatatgcgtacagtttttggatcatatggaattttttcgcacgcttttgcccaaatttcccgcaaaatgcttgaataaacgaattttttgtaaatttcttgtgtacatttccagttgccaattcagtcatactttagtataatagagtatgtgccagcgcgtccttttggatgggatgcgcgtgtttaggaaatcggaaaacggacagcacaagcgccctgcccccaaaagcaaggcgcttgtgctgtcgcaaggagtgcaagcatgaaagatcaagaatccttcaagccgtatattcctgcggaaaagatcaccgcagaaatgacggcgacctctgtgatcatgggcatcatcctgtctgtggtcttcggcgctgcaaatgcctatctgggcctgcgcgtcggcatgactgtttctgcctccatcccggcagcagtcatttctatgggcgtgatccgcgtcctgctcaagaagaactccattctggagagcaacatggtgcagaccattggttccgcaggcgagagcctggccgccggtgccatcttcaccatgcccgcactgttcctgtgggcaaaagagggcctgtgcgacaagcccagcatcctggagatcaccctgatcgccctgtgcggcggcattctgggcgttctgttcatggtgcccctgcgcaacgccctgatcgtcaaggagcacgccaccctgctgtacccggaaggcaccgcctgtgcagacgttctgctggccggtgaagagggcggtgcaaacgcctccaccgtgttctccggcatgggtctggcagccatcttcaagttcatcgtcgatggcctgaagatgatccccgccgacattgccgtggccttcagctccttcaagggtgctctgggcatggaagtgtaccccgctctgctgggcgtgggctacatcgtcggccccaagaccgcttcctacatgttcaccggttctctggtgggctggatggtcattatcccgctgatctgcctgttcggcgcaaacatctccctgtacccggcagcagccggcaccaccattgctgatctgtatgcagcaggcggtgcagacgctatctggtccaactacgtcaagtatatcggcgcaggtgccattgctaccggcggtatcatctcgctgatcaagagcctgcctctgatcgcatccaccttccgtgatgccatgaagagcatgaagggcggcagtgcttccggcacctcccgtaccgagaaggacctgcccatgccctttattctgggcggcatcctgctcatcatcctcatcatctggctggctccggccatccccgtcagcccgctgggtgctctgctgatcgtcatcttcggcttcttcttctccaccgtctctgcacgtatggtcggcatgatcggcagttccaacaacccggtctccggcatgaccattgccaccctgctgatcgctaccatgatcctgaaggccaccggcaacgttggcatcgagggcatgatcggctccatggccatcgcctctgtcatctgcatctgcgctgccattgctgcggatacctctcaggacctgaagaccggctacctgctgggtgcgaccccggtcaagcagcagatcggtgagctgatcggcgttattgccgccggtctggccatcggtggtgtgctgtacctgctggacagcgcatggggctacggcggtgccgaggtccccgcaccgcaggctaccctgatgaagatgatcgtcgagggcatcatgggcggcaacctgccctggaacctggtgttcaccggtgtgttccttgccattgctctggaggtcctgcgcatccccgtgatgccgttcgccatcggcctgtatctgcccatctacctgaacacctccatcatgatcggcggtgttgtgcgctggttcatggacagccgcaagaatgttgacgcgaagctcaaggaagagcagaccacccgcggcaccctgttctgtgccggtatgatcgcaggcgagggccttgtgggcatcctgctggctgtgtttgccgtgttcggcatcagcactgccctgagcattgatctgggcaacattggcggcgtggtcctgatgatcgtgatgatcgcatgcctgctggccttctccatgaagaaaaagaagaactgatgagtaagaaaaagcagtccatcaactatctggacctcattccgcagcgggcggaaaccctgcgctggcacacagacgaagccaccggccttatcacccttgaggtggagaacaccggtgtgttcaacacgatcgcgcaaaaagtgtttcataaaccgcgcaccacacaggtgcatctggacgagaccggcagctatctctggccgctgatcgacggccagaagaccgttgcagaccttgctgaatgcatgaagcagcagtttggcgaaaaggccgaaccgctgtacccgcgcatcatcaagtatttccagatcgtggaatcttaccactttatcaagttcctcaaccaataagcacaaaaaaagcggcgctcagagcctgttgcaaggcactgagcgccgcttttttgctgttctttattgttttttgcagtttgctgtgatattctgtaattgccgcatctgcggtacgaaggcgctgtgtcccaaaacgcagcacgggttgcggctcccagcattcgcatcgtaccttgaacggtactcgcgcctcgctggccgcggccccaacaattcctccctgtttctgccgcaggcagcggtcgtcattgttgcagctcgtcttaccggcacctaggcgcgccgggcaaggcgattttttctttggatctttcgcacccccggttttgcccaagggcaggaaggggggatgcaccatgacgtttgaacaggtcgtgcttctgctcacgcttcttggcggagcgatctacgttacgtttgaaattacatggactgtttctcacagtgatgataaaaagaaaaaatgaccgcctcttgttccccaacacgaccggtcatttttctttttgactagtatggtaaggagctagccgtttgtgggccagcgcctttgtattttcagtatagcttattttccaaaattgtcaagcccatgcactttatctgcggcgctttctccttttaaggttcagcgagctgccgcccgcggcaagagtgaccgccgttaatgcagcgaggatgaacaccagtgcacacagcagaagcactgtggccttcatgtcggtgcggaagtcggagacatactccttgtgggtcacaaggtccaccgtgcccacctcgtagccatccagataaacagtggccgagccgatcacactgccgcttttaacggtggccgcaatgctctccggcaggtcgaaggagtaggtgacgatatcgtctgcgtggccatagccgctgaccggtgcggcagcatacagctccactgccggttcggtgcggcacttggtcaggtctacggtggtcagcacggtctgggtatccaccagcggacggtcggcaaagctggcaaaggcccagtcgaacagatcatcgcactcggcaaaaaggtggtccggcgtatcgcagccaaggatcaccagcccgtaggtgtggccgtccttttccgcaaaggccacgatgcagcggcctgccagcgtggtaaagccgcccttgacccaccggacatactcccggtagttggcgctctcgctgttcatcaggctgttggagctgctgatggtgtgctcggccttgcggaggttcgtggccggcaggacatagctggcggtgcccgccacctgtgcaaaggtctggtttgccgcgcaggcggcagcgatctttgccagatcctgcgcggtggacacgttgccgtagtcaaacaggccgtgggcacaggtaaagttcgtgccggtgcagcccagctcctgggcacgggcattcatctgcttgacgaaatccagcacgctgccgcccacatcgtaggcaatgacgctggcggcgtcgttggcgctgacgatgagcatggcgttcagcaggtcgatgcggcgcaccgtctcgccgatgcgcaggcccatagtggtgccgttggcgttctggatatcccggaactcctgggtcagcgcggtgggcacggtcacttcaccgttcagatccttgccgctttccagcagcagcagggccgtcatgagcttggtcaggctggcaacatactgctgctggtcagcattctggttcaggatggtcttgccggtgtcggcgttgaacaggtacaccgcctcggtctcgctggcggtctggatgggcatgggatataccgcaaggcccggcagtgcagcagcagcggccagtgccagcgtgagcaccagcgccgtcatgcggcggaagatggtgtttttgaacatgagcgtgcccccttgtatctgcttgccgacgcacggcaaaaatttttgttttgaaacagctcctacttgccggaaaggctttggcttgctatactactttaaagaataccataaaccagccaaaagagaaagagagaaaggcggtttttaacaatgtttctgtccttttgtggaaaagttccccgcgacgagggggctgtttttgtagcgcccaacgccaccgtgcagggagatgtgatcctgaaagccggttccacggtgtggtacggggccgtgctgcgcggcgacgacggcactttgaccattggcgaaaactccaacgtgcaggataacgccgtgctgcactgtgatgtgggcggtgctgtaatgctgggcaaaagcgtcaccgtgggccacggtgcccttgtgcacgggtgcacggtaggggacggcagcctcatcggaatgcacgccaccctgctcaaccactgtgtcgtgggcaaaaactgcatcatcggcgcgggtgcgctggtgccggagggcatggtgatcccggataactcggtggccgtgggcgtgcccgcaagggtcatcaagcaggtaagccccgcacaggtcgaggccaacctgcacaacgccgcccactacgtggagcacggcaagcttcacgccgccgagcttgccaagggctgaccctgtgccgattttacagttttttgccacattttttcgtctttccgccaaaaagccgacattttaattgacacctgcggtcttgtctgctatagtgaaattggcagtttatgtcattctggaataccagaatttttgtacaccgcgctgtttggtttttatcattgggggaattttgtaaaaagttcattgcgggatgttttttcacagaaatgtaatgacttttcacttaaaatcgggtatactataccttgcggggagacggggccgcaaccgtctttccgcacatgattcctcctcacaccaaagcaataccccaaacagaaactccctccggtgtaccgcaagcgccggagggagtttctgtttgcatccgcttttgtattttatgatttcctgcaatcaaaggagagatttttatgtctgaactgatcacccgccgtacttttttaaaggccaccggtgctgctgcactggccgttgccgcaagcggtatgctggcaggctgcggggacggagctgacgctcttctgagcgtttcc

SEQ ID NO: 1147 - DNA, 18414 bp, Unknown
  gut microbiota DNA sequence
ctgcttttggatccattcagatgtttgcaaaggaggaaacgccccatgaaagaagtcaaaccttccaaaaagccgctggcgatttactacgccatcgtgctggcggtcctgctgctgctcaaccttgtgctgctgccgtggatgagcgagcgtcaggtggaggaagtggactacggtacctttatgaccatgaccgaggaaaagaacatcggccgtgtggatattgaatccaaccagatcatttttaccgataaagaggaaaagcaggtctacaagaccggcctgatgaacgacccggagcttacccagcgcctgtatgatgccggagcacagttttccagcgagatcgtggagcaggggtcgccgatgctcaatttcctgatctggttcctgctgcccatcctgttgttcagcttcatcggcaaccagatgaacaaaaagctgatggaaaaggccggcggcggcccggggtccatgatgttcggcggcgtgggcaagtccaacgccaaggtctatgtgcagtccacccacggcatccgctttgcggatgtggccggtgaggatgaagcaaaggaaaacctgcaggagatcgtggattacctgcacgaccccggcaagtacgagagcattggcgcatccatgccaaagggcatcctgctggtgggccctccgggcaccggcaagaccatgctggctaaggccgtggcaggcgaatccaatgtgccgttcttctccatttccggttctgaattcgtggagatgttcgtgggcatgggcgcatccaaggtgcgcgacctgttccgacaggccaaggaaaaggccccctgcatcgtgttcatcgatgagatcgatgccatcggtcagaagcgcaacagcggcaaccttggcggcaacgacgagcgtgagcagactttgaaccagctgctcaccgagatggacggctttgagggcaacaccggcgtcatcattctggcggctaccaaccgcccggattcgctggacccggcgctgacccgtcccggacgctttgaccgccgcgtgccggtggaactgcccgacctcaagggccgcgaagagattttgaaagtgcacgccaaaaaggtggcgctggccccgggcatcgacttcaacaccgtggcccgcatggcttccggtgcatccggtgcggaacttgccaacatcgtcaacgaagcagctctgcgcgccgtgcgtgcaggccgcaagagcgtgacgcaggccgatctggaggagagcatcgaggtggtcattgcaggctaccagaagaagaattctatcctcaccgacaaggaaaagtgcatcgtggcctaccacgagatcggccatgcactggtggcggccaagcaatccaactctgcccctgtgcagaagatcaccattatcccccgaacctccggcgcactgggctacaccatgcaggtggacgagggcaaccactacctgatgagcaaggaagagctggaaaacaagatcgccaccctcaccggcggacgcgccgccgaggaagtggtgttccgatccatcaccaccggtgcctccaacgatatcgagcaggccaccaagcttgcccgcgccatgcttgcccgctacggcatgagcaaggactttgacatggtggcgctggagaccgtgaacaaccagtatctgggcggtgacacctcgctggcctgctcggcccagacccagcgcgagatcgaccagaaggtggtggagctggtcaaggctcagcacgaaaaggctgtccgcatcctgaccgacaaccgcgccaagctggacgagctggcacagtatctgtaccagaaggagaccatcaccggcgaggagttcatggagatcctgaaccgggaaccggcacaggcccagtgaccccggcggcagagctgccaaaaattttttttagcctgctgcaataatcccgccgccgcatccgtttataagacagatgcggcggttttgtattacaccgcatggcagaccatggttttccacaaaacaaaaatgtgcggtgcaaaaccgccgtcaacggaggtattccaaatgaaactgaaccataaatttgtccgtaccgtcaccaccaccgcagcagtgctgggtgctgccgccatgctgagcgtgggcgcatttgccgcagaggcagacatcaacgaccctgctgccgcaggctatctgcccccgcaggagcagatggtgcagggggatatcgccctgcacagcgccgatgtggcgatcggcgaaaaggaccccacctacggcggctacggcgcaccggagggaaaccccattcagggcaacattatgctgatctccggcgatgagctggccgccccgtccgcagatgcagcggcgaaaaagagcgaggcccgctacaccgtcaagggcctgttcggcagagaagtgctgtacactgcccgccagaaggacagtgtgctgacgctggatgtgcccgctggttctgctaccttccgcaccaccgtgcaggacatgcagaccctgctgaacgagggcgtgagcacgctggtggtccagactgagaagggctccaccaccctgaacctgtctctgctggtggagggccagaagggcaccgaccgcgtggtgctgcgccgactgggcgaaaacaccttcctcaccgtgggcctgcgctgccgccgcgatttgatcgtggggcgctgaccgctgagatcaaatgatgaaaggggctgctgcacgcagagatgtgcagcagccctttttgcgcttttctgttaagtttttgaaaatttgcgcagatgtctttgcaaagtctgccgggagatgttatagttaaattgaaacagtatgcattcccgatagaaaggaaaaaacgccatggagcattttgtggagtttgaggacgtttgcaaatactatcagaccggcagtgtgaagatcgccgccgcagaccacctgaatttctatgtggataagggggagttctgcatcatcgtggggccttccggcgcaggcaagaccaccctgctgaacatcctcggcggcatggacagctgcgacgagggcaacgtctggctggacggccagaatgtgagccattttaccgccagagagctgacgacctaccgccggtacgatgtgggctttgtgttccagttctacaaccttgtgcagaacctgaccgcactggagaatgtggagctggccagcgagatctgccgcgacccgctggaccccaaagagaccctgcgcagtgtgggtctgggagagcggctgaacaacttcccggctcagctttccggcggcgagcagcagcgggtgtccattgcccgcgcactggccaaaaaccccaagctgctgctctgcgacgagcccaccggtgcactggattacaagaccggcaagcaggtgctggcccttttgcaggatacctgccgccgcaccggccgcacggtgatcgttattacccacaacaccgccctgacggcgatggcagaccgcatcattcaggtgcgcagcggcaagatcgtctccaatcaggtcaacgagcaccctgtgccggtgcaggagattgagtggtgagagctgtgctgaaaagttatcgtaaaaacatcctgcgggaaatgaaggacaatctgagccgcatggtctcgctgttcggcatcgtagcgctgggcgtgatgatgctgaccggcctgatgagttttgcgcccagcatgcgcatcgccgggcagaaatactacgtgcagcagaacgtgttcgacctgcgggtgctgtccatgctgggcctttcggaggaggacattgccgccattgccgccgtggacggcgtggaggctgtgcagccggtgaaatatcaggacgtggaggcccagtggcagggccagagcgagacggcggtggtgcgcctgcagcagctgcccgccgaccccggggccgacacggcagaaaatatgaaccgtctggtgctgctctcgggccggatgcccgaggccccggacgagtgcgtggtgcatgtgatgggctacggtgacccggtggaaccgggtactgtgctcaccctgccggaggacaccgaacatgtgagccggaagcagttcacggtagtgggcaccgtgcaggacccgcagcatttttccacggacaaggagagcagcaccgccggtgacggccagctggatgatattgtgttcctgccggagggcagcctgaccacggattattatacggcgtgctatctcaaagtaaaaaatgccggcctgtatgataattactcggacgcgtatcaggcagcagtggatgacacagccgcaagggtaaaggccatcagcggcgcacagtgcacggcccggcgggcggagctgatcgaggacgccagtgcagagctggccgacgcccgggccgagtacaacgacaaaaaagccgaagcagaccgtcagtttgcggaggcagagcagcagctggccgatgcacaggcacagctggacagcgccaaagcccagctggacgcgggcgaagcggagcttgccgccaacaaaaaggccctgccggataccatgcagggcggtgcggacgagctggtgagcggcgaggaacaactgctggaatttgaggatcagctgcagcagatcgagatgctggtgaacctgaaaaaggtggccgacccgctgctgggctatgccgaaacggctctgcacaacgcgcagaaggcgctggacgaggccgaacccgccgacgaggaatacaccgacctgcgggatgccctgcagaaggcgcaggatgcttacgacaacatcagcggccagctgaacggctatcaggcccagctggacgagggcaagcgccagatgtatgcacaggggctgatctcttcgcccagcctttccaacgagcagctggtgactgaggcaaaggcagcactgcgccagatgaaggtaaagcttctgcaggggcagctgcagctcaccaccggcacggccacagcctacacccagtttgatgcggcacgcacccggctggacgaaggctggcagcagtacaacgacggcgtgcagcagctggccgattcccgcgcggagtacgagagtcggaaggccgatgccgaacagcagctggccgacggccttgcccagctgaacgatgccgaggagcaggtgagccagatcaagagcggcgagtggtatgtgctggaccgcggctccaccatgagctttgtcacctttgagcagtatgccgaccgcatggatgccattgcacgggtgttcccggtgttcttcttcctggtggcggcgctggtggccactactactatgacccgcatggtggacgagaaccgcctgcagctgggtactctgaaagctctgggttactccaacgcaaagatcgcaggcaagtatctgttctatgccctcagcgccagcgtgctgggcagcatcgtgggcatggtcatcggttttgtggtgttcccgctcatcatctggtatgcttaccagatgatcttcagcatgtccacctttacgctgcacttttaccccggcatggcggcagccagcgtagccatcagcgcggccgtcatcggttttgctacatggaacgcctgccgtgccagcctgaaggaaaagactgcagctttgctgctgccccgggccccggtggcaggcaagcgcatctttttggagtacatcaccccgctgtggcagcacatgagcttctcccaaaagaccacagcccgcaacctgttccgctacaaaaagcgcttcttcatgacagtgctgggcgtggcaggctgcacggcgctgctgctgatcggttttggcattcaggattccatcctgcccatcgtggacaagcagtccgggcagctgacccacaacgatctcaccatctcgctcagcgatgaaaaggcgctgaccacggagcagggccttgccgacacgctggacagcagcagtgcggtccacagctggggcgcgttctacacaaagtccaccaccctttataatgaagagggcgggagcgccgatgtcagcatcgtaggcgcggaggacgatgcccggatgaccgaatacttcaccttccgcacccgggtgggccacgaccccattccctttgaagaggacagcgtgatcctgaccgaaaaaacggccctgaatctggggctgagcgtgggcgatacgttctatgtggaggctgcagacggaagccgcgtgccgctggtgctgaccggcattaccgagaactacatgttcacccggctgtatctctccaatgcgcagctgcaggccctgctgggcagcacgccggagtggaacaccgtctacggcctgaccggctgtaccaccgaggcggagtacaacgccctgcgcacaaagctgctggactgcaactatgtgagcagcgtcagcttcaccgaggacaccacctccatgttcggcagcctgatcggcagcctgaactacgtggtggtgctgatcatcgtgtgcgcggcggcgctggcggcggtggtgctgtacaacctgatcagcgtcaaccttgccgagcgcaaaaaggagcttgccactatcaaggttctgggcttctatgacaaagaagtgtaccgctacatcttccgcgagatcgagcttttgtccctcatcggctccggcgtgggcctgctgctgggcgtgccgctgcaccggttcatcgtcctgaccgtggaaatggatcagctgatgtttattcgcaccattgcaccccacagttatctgctggcagtggcattgacgatgctgttcacctttgtggtgtgctttgccatgcggcggcatgtgcggcatatcagcatggtggaaagcatgaaagcgccggagtgagtttacaaaatcttcataaaaagaacatggtttcgcagaaattctttggtatgataatgctaccgacaggcggggccgcaaccgcctgaacgggtaacatgattcctcctttaccaaatcaaataccgcaaaacaaaacaccgcgccttgtctgatccgcagcagacagggcgcggtgttttgtttaaaccgttaagttttcagcatctgcggcaatggcatcggcctgctgcttggtgagcacgcggcatttgaccatccgcttgagcaccacctgcatccgcttgaaggcaagctccgggctgctggcgtaggtggaaggcgcgttgggcatacccgccagatagatcgcttcggcatcggtcagctgggccggttccttgccaaagtagccctcggcagcttctgcaatgccataatacccgctgccaaaatagatggtgttggcgtacatctcaaagatctgctgcttggagtaggtcttttcaagatcaaaagcagcaagcatctcggcagccttgcgggccagatgcttgtcctgcgtgaacagctcgttcttggcaagctgctgggtcaaggtgctgccgccctcggccagcgagtgggtgcgcaggtcggccagcagggcgcgtgcaatggcccccgggtcgatgcccttgtgggtcataaaatgctcgtcctcggtgcagatgactgcgttaatatagatctgcggcagcgcatcgtaggaagtatagctcccgcgggcacagatggtgtcgtacatggaagccactgggtaactgctggcggcactgcggtacagctgtctgccctgataaaagaaccagccgcctgccagtagcccgccaagcagcaggatgcaaagaacaacgagcaggctctgctttaaaaaatgaaagaaacgatgcagcatcgaaaaaactcctttgatgataaaaaagaacgctaccataataaacgatttgcagggcgtttgcaaggaacagctttagtataacaataaaattttaaggttttatcaatagaaaaataaaatttttgaagaagcagaagtgttactcctgttggaactgcacaacgggatgctgcaaatgcgggctgcgcatcgtgcagaaaactcaatttgaaaaaaactggaattaacctattgacaaactgggtaagagggaatataatgcaaacaacaaatccacaaacctagtgggaaaaagaaagcaagggttttgcttcccggtacagagcagatagaggtgccggtttgtagatgagtgggaaagagttttacgggaaaggagggcacggatatgaagctgatttggaacgacctgctgcatgcaaacttccgctgtgggcgaatgtgcggtgaccgggcagaacatctggctgtgaactgtacgatgccctcttgctgtgcacgaatgtgtacccgaatgtgacgttgacagaatcgctttgaattgcgtttgcccggtgcgcttttgtatcacgcatcggtttttttgtatcagaaaattatactataagtataaatagagaggtaaaatgctatgtctaactataaatttgagaccctgcagcttcacgttggccaggagcaggccgatcccgcaaccgattcccgtgcagtgcccatttaccagaccacttcctatgtgttccgcaacagccagcacgcagcagaccgctttggtctggcagatgccggcaacatctacggccgcctgaccaactccacgcaggacgtgttcgagaagcgcatcgctgcgctggagggcggcgtggctgctctggcaaccgcctccggtgccgctgccatcacctacaccatcgaagcactggcacaggctggtgaccacatcgtggctcagaagaccatctacggcggcagctacaacctgctggagcacaccctgacccagttcggtgtcaccactacctttgtcaatgcacacgatctggctgaggtggagaatgccatccagcccaacaccaaggccgtctatctggaaactctgggcaaccccaacagcgatatccccgatatcgatgccattgcagccatcgcgcacaagcacggcctgccgctggtcatcgataacaccttcggcaccccgtacctgatccgtcccattgagcacggcgcagatatcgttgttcattccgccacgaagttcatcggcggccacggcaccacgctgggcggcatcattgtggacagcggcaagttcgactggaaggcaagcggtaagttcggcaacattgctgaccccaaccccagctaccacggcgtttcctttgccgatgcagcaggccccgcagcttttgtcacctacatccgtgcgatcctgctgcgtgataccggtgccaccatttctccgttcaacgccttcctgctgctgcagggcaccgagaccctgagcctgcgcatcgagcgccatgtggagaacaccaagaaggtagtcgagtttctggcaaaccacccgcaggtggagaaggtcaaccacccctccctgccggatcacccggatcacgccctgtacgagaagtacttccccaatggcggtgcatccatcttcaccttcaacatcaaaggcggccgtaaggaggcattcaagtttatcgataacctgaagatcttctctctgctggcaaacgttgctgatgtgaagagtctggtcatccacccggcttccaccacccacagccagctgaatgacgaagagctggccgagcagcagatctatcagaacaccatccgcctgtccatcggcactgagcacatcgacgatatcattgctgatctggaagcaggtttcgcagccgtccgcggcgagtaaatcttatccccttaaaacctccgacagaatgtgtatgccttgttttttctcctgatctcttccaaaaattccttatatcctaaacacagcaaaagggtcccggaattttctccgggaccctcttgttgtttgcggcaaaatgccgtcagcctttcacgccgcccaaagcaacaccgcggacgatgaacttggaaagcagcaggtacacgatgatgacgggcagaatggcgatagccaccatcatgtaaaccttgcccatatcaaacttgaggaagtctgcactgcgcagctgtgcaatcaggatgggcagggtctttttgtcggcgctgtccagcaccagagcgggaatgaagtagttgttccagctggccacgaaggagaaaatggcctgcactgccagagcgggcttcataatgggcagcacgatcttgttgaaggtgtagaactcgcctgcaccgtcgatgcgggcagcctctacaatctccatgggaagggaagcgtccagatactgcttcatgaagaagaacacggtgggcgctgcaatgctgggcaggatcagcgggataaagctgttcttcaggcccatcttggtgatgagctgcaaaaagcccagagcggacacctgcgtgggcatggtcatgatcagcaggataatggcgaacgcagcctttttgaatttgaagttataggcgtagatgccgtaggccgtcaaggccgagaaatacacgctgaacgccgccgagcaggcggagacgatcaggctgttgcggatgccggtgatgacagggatgttagcatcggccagcacgttctggaagttggtgatgagcgatttgcccggcagcatcgagaagcctttctggatctcgaagtgggtgcgggtggagttgatcaccagcacatagaagaagaacaggcacaaaaagctgatgagtaccagcaccagataacaccatgcgcggcgtgcagccagtgttgctttttccgattgatttctaggagtgtgtgccataatcatttccctccttttgctgcctttttggcggcgttcagttctttgcgctgggcgcgggtcaggccgtcatcctccttggtaagggagaagtagaccacaacgcacagcactgcgcacacgaggaacagcaccacggatacagcaccggccatgccgtagttcttgctgaacaggtggttgttcaggtacatgatcatggtggtggaggtgcggtccgggccgcccttgccgttggtcaaaatctgcggcacatcgaacatctgcaggccgccgatcatggaggtgatcatgacgtaaacgaggatgggacggatcagcggaatggtgatcttccagaacatctggttcggggtgcagccgtccagctctgccgcctcgtacagggtgggatccacgcccatgatggccgccatcagcatgatggtggtgttgccgaaccacatcaggaagttcatcaggccgatcagcccgcggttgccccacacggtgttcaaaaagctgatgggtgcatcgatccagcccatgctctgcagcacggcgttcaccgggccgttgtccgagaacagcgcgaagaacagcattgcaaaggcggaggccatgatcaggttgggcatgtagatgaccgtcttgaagaaggtctggcccttcagcttcaggcgcagatctgtgaaccatgctgccagcaacagggaaatggcgatctgcgggataaagccgatgatccacaggatcagcgtgttgccaaagtacttgggcagatcggttgcgaacagggtaatgtagtttttcaggcccacaaagttcgggccaatgatcttcaggccgctgcggtaatattcaaaaaagctgtagtaaatggtggatgccagagggatcagctggaataccgcgaagatgatgaagaacggcgcaatgaagatgtagccccatttcgcgtagctgatcgaccctttctttttcttttctcccataggatcgcctcctgataaatttgcggaaagaacaggggcgggcgggaacagcgtccggcccgcccctgcgtattcacttttccgttttagggtcggctgctattatgcgggccacaccacgtcggtcagctcaggatacttctccttgatagcggtctcgaagtttgcctttgcggtatcttcgtccacgttgccggtaaagtaatccttgaatgcattctggaagctctcattcaggccctgatcgtacggaccggcgttggacatatcgatcttggctgcagcctctgcaaacagagcgatgtggttctggccgcccaggaaagcggagctgtaatcgctgtttgcgatctcgttcatagccttctcgttgttggtgtagtcctgcgtatccatggtgatctgcttcatgatagcttcatcgcaggtcagcttctgcataacatccttaatggtctcgatgttgtcgctgccggctgcgccgcagatccaggtgccgccccagtagtagggctgagggccttcgcacacagcgtaatcgccgtagataccgttgccaacttcttccttgccgccctcagcgacaggagtctccagcgagttgcccagcagggtgaagttgatgccccaggtggagtagaagaagccgaacaccttaccggtgggaccctgatcggctgcccactggctgtcccacaggctggacttgttgttatagcccttatcggtgtactccttggtctgatcgacccacttcataatgttctcatcaacggtaacggtagtgccggtgacccacggagctgccacgttgttggagaaggtgcggtatgcatcatcaaagccggacagcatcttgtagcccttggcggctgcctgtgcagctacatcattgaacttatcccagtcggacaggtaggtctgcacttcggcgggatcatcggtgcccagaacatccttggcaatgctgcggcggtatgcaaacagaccgggagttgcctgccaggtggtgccgcgctggctgccgtccacactaacgatgtccttggtgtactggtactggccagccagatcgtcgtcggtcaggccgatgtctgccttgacatccagaacgtaatcggaatccacatacttcagagcatagtcagcctcgatcaggaagatgtcgatcttgtcgtcatcagcagcgctgtcctgactcagcagggcttcgtccagcttgttctgatagttgttgttctcgttggcattgatggtccacttcacaacggtgccatccttcagggtggtggtggacttgtcggctgcgatctcggaaacttccggatagtagtcgttgaagcggctctggaactcatcattccagcaccagatgttcagcaccttgccctgtgctgcgggagcagcggaagcagcagaggaagccggagcagaagaagcggtgctggtggaagaagaaccaccacaggcagccagagctgcaccaatggtcacggcaccggaagcgagcaggaaattacggcgagagatctttttcataagggtaaacctccttcatggttttccattatttacaaaagtgttcttcataaaaggttccgtagcaagagcctttagagacatattaaagaatgctgaccgacccgccgtccagcaatttgccggaaacgcggatctgttcgggcagggtcactcttggatgctcgatgagctcaatgagcttgtcggcagccgtgcggcccagcgcggcggtgttctgctggtaagtcaccagctgaggcttgaccacccgggaaaggtagatgccgtcgtagcccatcaccgaaacatcctccgggatcgaaaggcccgcttcgctgatggcgttgtagccgcccagcgcggagaaatcgtccgggaagatgatgcaggtaggcggctgcggaagctccagcagcgctttggtctcggcggcacagcggtcagcatcatggtagatgccctcccgcacataagcttccgggattttcaggccaagctcttcgcaggcttgatagaaacctgcaacgcggttctcggtaacggcggtcttttcgccgtggataaaggcgatgcggcggtggccgcaggcccatgcctgccgcaccagtgctttcaggccgaaaacgttatccgagaggatcgccatgcggttattgaacacatgatcgatcgtgaccaccggcacctcgctgttcaccagctccaccacctgcggctcgtagaagttcacgcaggcgatcaccacaccgtccacattgcggtagcggcagtgctcaaggtagctcatgctcttgccgctgatattgtggttgataaaggtgatgtcgtagccgtgtttctcggcttccaccttgaagctgtccagcacggcggaaaagtattcgtgggtcaggccgctctgccgttcatccacgaacagaacgcccagattgtaagtacggtttgttttcaaggaacgggcggcagcattgggcaggtagcccatacggtgcgctgcggcccgcacccgttctcgtgtggcaggcgagatatccggctgatcgttcagcgccttgctgaccgttgccaccgatacgccgcattcctttgccagatctttcagggacggcatcgctcgtttgcctccttccgaagaacgttttacgggggatgttctccgtcaagtccttaatcgttttcgcaatttcatgatagcgtattttgtacgaaaaatcaagctcaaaagaataactttcattgcttttggctcaattttggcgttttgttcgtttctgaagaaccgaaattgtgcaccttggatggatttcgttacatttcggttaaaatcaaaagattttcgttgcggtttcgttacgattttcgccgtatataatattacctataaattgtgtttcagcgttttcgcttacaggaagcacaaaaagcgtgcttgaaataaattttctgaaaatcatggaaacatacgtatttatgaaagatactttcagaatttttttagaaaatcctcttgcttttttggcctgcttgggctatgctagaagcaaagagaatgctttgatcgtctgccttaatcgttttcgcaaaagcgatgccgccggggctaccggcagctgataaggaggaagcatttatgaaattcggccattttgatgacgcacgcaaagaatatgtcatcaccaccccgcgcacgcccctgccctggatcaactaccttggcagcgaggatttcttcagtcttgtctccaacacggcgggcggctacagcttttaccgcgacgcccggatgcgccgcctgacccgctaccgctacaacagctccccgctggatatggacggccaccacatttacatcaaggatggcgataccgtctggaaccccggctggcagcccaccaagacagagctggacagctacgcctgccgccacggtctgggctataccattctggagggtgagaagaacggtgtttccgctgcgcaggagctgttcgtgcccaccggcgatgcctgtgagctggaccgcctgactttgaaaaataagacggatgccataaaagagctggatgtgttcagctatgtggagttctgcctgtgggatgccattgacgacagctccaacttccagcgcaacttctccaccggcgaagtggaggtggagccggccatcatctaccataagacggaataccgtgagcgccgcaatcactatgcagtattctggagcaatacgcccgttaccagctttgataccacccgcgatgccttctgcggtgtgtatggcggccctgcagacccgcaggccgtccgcgccgggcactgctccggcagtatcgcccacggctgggcaccggtgggcgcgctgcacatccatgtcacccttgcaccgggtgaggaaaagaagatcctcttcggtctgggctacatcgagaacccacaggaagaaaagttcacggctcccggtgttatcaacaaggagcgtgcccatgccatgatcgcacgctatgccaccgatgcacaggtggacgcggcccgcaaggcgctggccgaccactgggaagctctgctctccacctaccatctggaatccggcgaggaaaagctggaccgtatggtgaacatctggcaccagtatcagtgtatggtcaccttcaatatgagccgctcggccagctactttgaaagcgggaccggccgcggcatgggcttccgcgacagctgtcaggatctgctgggctttgtacacatcattccgtcccgcgcacgggagcgcattctggatatcgccgccacccagtttgaggatggcagcgcctaccaccagtatcagcccctgaccaagaaaggcaaccgcgatatcggcaccggcttcaacgatgacccgctgtggctcattgccggcactgccgcctatctgcgcgagaccggtgactggtctattctggacgagcaggtgccctttgataatgatgccagcaaggcacagagcctgatggagcatctgcgctgcagcttcaactttaccgtcacccaccttggcccccacggcctgccgcttattggccgcgccgactggaacgactgcctgaacctgaactgtttctcggagcacccgggtgagagcttccagatcaccggtcccagcgaaggccctgtggccgaaagcgtgttcattgcgggcatgttcgtcaagtacggccacgagtacgccgaactgtgcgaccacctgaaccttgccgatgaagccgctgcggcccgcaaggccgtggacggcgtggaacaggcggccctgacctctggctgggacggcgcatggttccgccgcgcctacgatgcttttggcaagcctgttggcagcaaggagtgtactgagggccagatcttcattgagccgcagggcatgtgcgtcatggctggcattggcaaggagaccggtcaggccgcgcaggcattgaagagcgtagaggaacggctggataccaagtacggtgtggttctgcaccaacctgcatacaccagttatcagctcaatctgggcgaaatttccagctatcctccgggatacaaggagaacgccggtatcttctgccacaacaatccgtggatcagctgtgccgaagccgttctggggcatggcgaccgggcctttgaggtgtaccgcaagacatgcccggcctacatcgaggatatttccgagatccaccgcaccgaaccctatgtttacagccagatggtggccggtaaggatgcccccacctttggcgaagcaaagaacagctggctgaccggcactgccgcatggaccttcttcaatgtgagccagtatatccttggcatccagcccacgctggacggcctgaaggtagacccctgtatcccacacacgctgggcggcttcaccgttacccgccgctaccggggcgcaacctatcacattgcagtggataataccgctgcagtccagtacggtgtgaagagcgtcgctgtggatggcaagtccattgagggcagcctgctgccgctggcaccagaaggtgctgtggtagaggtgcaggtgaccatgggataacctttactgcattttcataatttctcctttgtgctgttctgaaagaacagcggcctccgcattacgatcctgcttggcatcataatgcgggggctttttgtttggcagtttattttgtcggaaatactgtttctgttgtatctgttttttcacaacctcagcttacaacaaaaaatgagataggtaacccctttcggggaagtctatctcatttttttcgttggagctattttgcaacggccccctactgccgccagaacaccccatacttatttcaaaagcaatcgtttttctgatactccagcatcagcccaagaacgattttcaatcctgtgggcaagctggcaatgtccacccactcctgccgggtatgcgccgatccgccatctatcgtaccaatggtattggccgggatacccagcgacagcgggatgttgctgtccgtggagttgggcgtttcgtccggctcacggcctgtgaaggtgcgaacgatctctttactttttgccgtgaattgaccgagttttttctggtcaacagggccgttgccgggacggatgcccagcagctccacctcaaaatcgccacctctgccattccagtgcgctacagcacgacggaatttttcttccatctcttccagacaatcctgtgcggtggaacggaactcatacagcatggatgcctgctgtgcaatggagttgaccgttgtgccgccctcgatgcgtcccacattataggtggtacgggagcgtaccggcggttggatctggtacagttcattcacgagtccacacagcagttgaatggcactggggtcgccaaaatttgcataggaatgaccaccgggcgttttacaggtgatcttataccgataagaacccacggcactgctgcagcaaagcggcatatagatatcaaaagaatagaacccctgaatacgggtgccgtacttggcaaacaacgccttcgtaccgtccagattgcccagaccttcttcgcaggcattcgccaccaccagcacaccatattccagcgcggtttgtttctggatcagatattttgcagccatcagcaagttgacgaggttggcagtatcatcgccgatgcccggcgcaaatagcttgccgccctcttcccgcaagggaagattttctacatc

SEQ ID NO: 1148 - DNA, 9520 bp, Unknown
  gut microbiota DNA sequence
agggctctccctttgggagagctggacgcgaagcggcctgagagggcgagtcatttattccttctctgccagtgccttcagggctcgcagaccgatatcgctgcgcttgtgcagcttttcaaagctgatcttctctgccgcctcataggcatggctcagcgcattggtcagccgcgggccggtggcggtgacacccagcacacggccgccggccgtgacaagggcgccgtcctcggtgatggcggtgccggagtggtagaccgtcacattctcctcgccgggtagctggccgtccacaaggcctgtgatgggcttgcccttctcgtaagccaccgggtagccgccggaagccagaatgacgcaggcggcagcaccgtccgagaacttgacctcctcgttttccagcgtgccgttggtgcaggcctgcatgatgtgcagcaggtcgccttccagcaggggcagcaccacctgcgtttccgggtcaccaaagcggcagttgtactcgatgaccttcgggccgtccggagtgagcatcaggccgaagtagaggcagcccttgaaggggcagccctcggcgttcatggccttgatggtgggcaggaaaattttctccatgcactcagcggccacttccggggtgtagtaggggttgggagcaatggtgcccatgccgccggtgttcaggccggtgtcgtggtcgttggcacgcttgtggtccatgctggacaccataggcttgaccaccttgccgtccgtaaagctcagcacactgacctcggggccggtgaggaattcctccaccaccacatggttgccggatgcgccgaatttcttatccagcatgatctccttcacgccgtccgcagcctgctgctcgttctcgcagatgagcacgcccttgcccagtgccagaccgtcggccttgatgaccaccgggtacttgccctcggccttgatgtactccatgaccttggcggggtcgtcaaaggtctcgtactttgcggtggggatgccgtatttcttcatcaggtccttggagaacaccttggaggcctcgatgcgggcagcggccttatccgggccaaaggccgggatgcccactgctgccagcgcatccaccatgcccagagccagcggatcgtcctgcgccaccacaacgtaatcgaacttttcttctacggcaaagcccaccatggtgtccacatcggtagacttgatgtttttgcactttgcgtcatagctgatgccgccgttgccgggtgcgcaccagatctcgccgcagtcagggctttttttcagtgccttgatgatggcgtgctcacggccgccgccgcccactaccagaatttttttgctcatttttacaccttctcttagtgatggaacagccgcaggccgcagaaggccattgcaatgccgtacttgttgcaggtgtcaatgacctgctggtcgcggatggagccgccgggctgcacgatggcggtcacgccggagcggcgggcacgctcgatgttgtcgccgaaggggaagaaggcatccgagccaaggcacacaccggttactttgctcagatattccttcttttcctcagcggtcagcggggcgggctgctcggtaaaggtctcggcccacacatcgtcgccaatcacatcctcgggcgtatcgccgatgtaaacatcaatggcgttgtcacggttgggctttgccacatcgtcgcggaagggcaggttgagcaccttatccatgtggcgcagctgccagttgtcagccttctggcctgccagacgggtgcagtggatgcggctctgctggcctgcgcccacgccgatggtctggccgtggtaggtgtagcacacgctgttggactgagtatacttcagggtgatgagtgcaatgaccagatcacgcttctgctcttcggtcacatccttgttctcagtgacccagttgttcagcatggtgtcggcgttgatgagcagctcgttgcggccctgctcaaaggtgatgccgtacacctgcttgtgctcgataggagcgggcttgtaggccgggtcgatggcgaccacattgtagttaccctttttcttgccggacaggatagccagtgcctccggctcgtagcccggggcgatgatgccgtcggacacctcgtgttggatcagctttgcggtgggcacatcgcagatgtccgaaagggcgatccagtcgccaaaggaggacatgcggtccgcaccgcgtgcacgggcataggcatttgccagcggcgacagctccatatccggggcaatgtggtacattttgcgttccacatcggtcaggggcagccccagcgctgcgcctgccggggaaacgtgcttgaaggaagctgctgcgggcagaccacaggcagctttcagctccttgaccagctggatggagttaagcgcgtccagaaaattgatgtagccgggcttgccgttcagcacagtgaccggcaggtcagagccatcttccatataaatgcggctgggcttctggttggggttgcagccgtacttcagtgccagttcgttcattggtgcatcctccttatttctctattgttttagtcctgtttttcctctgcgtcaagctttttgagcagttccagctcttcgggcagcagctccggctcctcggggtcgtccagatcgctgcacacggcatcgtacttgttaaagatcatgtcgccggtctcgccggagtccagatcaatgacccgggcaaacaggctcaccttgttgtccgggttcaggctgctccacagaccctgtgcaaaatcgccgatggtgcgggggcaggcaaagcgcagcggctcaccctcaaagctggggatgggatttccgttgtgcttgtaggtgctgatgaaatggccctcgcctgcaacgggctgcgggtaatcaaagaaatagcgctgcacgctgtcgccattgccgtccgcagacttgagaatgctcatctgatagctgccgtcggcgtacaccacagcggagatgcggggggtgtagttggggccgtccggctcaaaggtgcgggtgcgcagggcatcggcaaagctcttgccctgactcatcaggtcataaatggtatcggtctggtcgccgttggtcacgatatgggtcttgcccagcgtcagcaccggattgtaaataatgaggctggggtcctccagctttgcggggtccgctgcgatggtgcagatgccgccgcgctcgggcacggggtcaaacacacggttgcggctgttctcgctgcggcccatgataaagtagccaatgaacatctggcggccatccggagccattgccacagcaatgccgcggccgggatactcgttggatgccagatactcgttcaggttgatcttttccatgtcaaattctcctatacggaactcccccagtcgcctgcggcgacagccccctcggagagggagccttgcctccctccttgagggaggtggcacgccgtcaggcgtgacggaaggagttttcactcgatctctccgctgcacaccatagccacggccttgggcagcagcttccactcggcctgctccatcacacgcttctgcagcacctcgggggtgtcgccgggcaggatgtccacggccttctgcagcaggatgggcccgccgtcgcattcttcgttcacgaagtggacggtggcaccggtcaccttgcagccccgggccagagccgcctcatgcggacgcaggccgtacatgccgggcccgcagaaagacgggatgagcgccgggtgcacattcaggatgcggcggggatacgcttcaatgacactgggccccagcacggacagaaagcctgccagcaccaccagatcgatgttgtggtctttcaacgttttcagcagagcagcgtcaaaatcctcactactggcgtaatccttgcggcgcaccacgcagccttccacaccggcctttgcggcccgttccagcgcatagacaccgggcttggaggccaccacaagggtgatcctgccgttggggttctcgcctcgggcttcgctgtccagcagagcctgcaggttggtgccgccgccggagactaaaactgcaatgttcagcacagctccacgccctcaccttctgcaataacacccagacggtaagcttccggctcaccgtttgcgtgcaggatgtccagtgccttgtcggcctgctctgcggggacggtgagcaccatgccaacgcccatgttgaaggtgttgaacatatcgtgctcggagatattgccggtcttctgcatcagctggaacagagccggggtgcggacatctgccttgttgatgcgtgcgcagcagccctttttcaggctgcggggaatgttctcgtagaagccgccgccggtgatgtgggaaatgcccttcacatccacctcttccagcaccttgagcacaggcttgacgtagatcttggtgggagccagcaaggcctcgcccagcgtcttgccgcccagctctgcaggggcagtgtgcagcacatcggggtttgcgtcaatgtcaaagatcttgcgcaccagcgagaaaccgttggagtgcacaccggtggaaggcagggcaaggatcacatcaccggctgccatggtctcattgctcaggatcttttccttatccacgacacccacggtgaaaccggccagatcgtactcctcctccggcatcatgcccgggtgctcggcagtctcgccgcccaccagagagcagtcggcctgcacgcagccctcggccacgcccttgacgatctctgcgatcttctcgggaatgttgcggccgcaggcgatgtaatccaggaacaccagcggctttgcaccggcgcagatgacatcgttcacgcacatagccacgcagtcgatgccgatggtatcgtgcttgtccatgatcatggcaattttcagcttggtgcccacgccgtcagtgccggagatcagcaccgggtgcttgtagccggtgcagtccagctcaaacaggccaccaaagccgcccagaccgccaatgcagtgctcgttcatggtgcgggccacatactgcttcatcagttcaacagagcgataaccggcggtgatatccacaccggcggctgcatagctttcagaatagcttttttccatggtcttactctcctaactttttctcgtccttgggacggtcgttcaggtggcgttcgtgaatatcggtggaaagcacctcgtccggcttcacggcatattcgccggtaaagcaggcggtgcagaatccgcattttgcgttctttgcaagctggacaacatgctcagtggaaaggtagcccagcgtatcggccccgatcacttcattgatctgctcgaccgtgcggccggtggccaccagcagtttctgatccgggatgtcagtgccgaagtagcaggggtacttgaacggcggtgccgacaccataaagtgcacctcggtggcacctgcgtcccgcagcagcttgatgatgcgggcagatgtggtgccgcgcacgatggaatcatccaccagcaccacgcgcttgcccttgaccgtgctggaaacgacgttcagcttgatgcgcacgctgttctcgcgctgcttctggctgccctgaatgaaggtgcggccgatgtacttattcttaataaagccgatgccataggggatgccgctctcctgcgagtagccgagagctgcatccagaccggaatccggcacgccgatgaccacgtccgcttccacggggtgttcctgtgcaaggaaccggccggcctgcttgcgggcctcgtgcaccgagctgccctcgatgatgctgtccgggcgggagaaatagatgaattcgaacacgcacatctgggtgtccggccgaccgcagtgatccttgatgctgcgcagctcaccggtttttgcgtctgccaccacgatctcgccgggctccacgtcccgcagcagggtggcaccggcagcgtccagtgcacagctctcgctggcaaatacgtagccgccgccgggcagagtaccgatgcacaggggccggtagccgcgggggtcacgcacggcgatcagcttggtagcggacatgatcaccagactgtaggcaccttccagcacatccatcgtcttgctgatggcggtctcgatgctgcccatgcgcaggcggttgcgggtgatcaggtagcagatcacctcggtatcggaggagccgtggaagatggcaccttcattttccagctggcggcgcagctcgatggcgttggtcaggttgccgttgtggcacagtgccatggtgccgcggccgtgccggacgatcatgggttgtgcattggcccgcacacggctgcctgccgtggcgtagcgcacgtgaccggtagccatgtgcgcattggggtttgccagacttgccagcaccgccggggtgaacacctcgttcacaaggccgaggtcgcggtggccgttgatcacgccatcatcgttcacggcgatgccgcagctctcctgaccacggtgctgcagggcatacagagccgagtaggccgcagcggccacatcctcggtaccggcacggtcgtaaatgccgaaaacgccgcattcttcgtgcagcggatatgcaaaatcagacattggttctcctttacagctgggcgatctcagcctgcagcttttcctctttggcagcgatctgtgcggccatggcggtgcgctctgctgccagcttttcggtcagagcgtcgtcgctcaaagccagaatttccgcagccagccatgcggcgttcttggcaccgttcagagccaccgttgccaccgggatgccgctgggcatctgcaccgtggcaagcagggcatccatgccgtccatggcaccgcccttcatgggaatgccgatcaccggcagggtggtgttggcagcaaaggcacccgccagatgtgctgccatgcctgctgcgcacaggatcacgccgaagccgttggcacgggcgcttttggcaaactccgctgccccggcaggggtgcggtgtgccgaaaggatgtgcgcctcaaaagggatgtccagcgctttcagctgggcacatgcgccctttaccaccggccaatcgctgtcagaacccatgatcacagccactttacgaaccatatccaaacctctctttctcaaccgacaaacaaaaaaggctgcggtacacccgtaccacggcctttaattctgcgtatgctctcccgacgctttgcacaaagttgcacgatgcccctgacatgcccgaatgttgtttcgacccatgagacccggcagcatcttcatcattgaagttctccttcgcagttccttgtgcttgcgttttcaggcggcggaaaagccctttctgcgggccgccgtccctgtactacatacagtttacggcaaaaaaacatctttgaaaagagtgttcccacaaattctaccttgtgttttcatgccgtcaaaaaactttcaaaagttttgtgcagtttcgacattgtttttctttttaagtatgacttatagtttaagtatattttatgtaaataggatgcgttaactttttgtacaatagacggacttttttaaaaaataatttttgctgtaattgcccgtgcagcgcggatgaggtccgccggggcacagcacacctgcatgccgatgcgcccgccggagacatagaccttctcctgcgtcagcacgctctcatcgaacacagtcttatactgctttttcatgcctaccgggctgcagccaccgcgcacatagccggtgaccttgttgatatcggccacatggatcatggcaacgcttttttcgcccacactgcgggcagcggctttcagatccagctctgctgccaccggaatgacgaacacaaaatagtttttgctattgccctgcgtcaccagcgtcttatacacgcaggcagggtcttcgcccatgctgcctgccacatccacacctgccacggcaacgccctcttcatgagcgtactcgtgggcggtgtagggcaccttctcgcgctccagaatgcgcatggcattggtttttgcttcttttcccattgtagtattcccctttatatttagctggttctattcttaagtatgatggcattgggtcagcgtcctcgccctctccgtcattgctaacgcaatgccacctctcccaaagtgagaggctttggcaatccacgcaaagtttccgtttttgccaagggttccccctttgggggagctgctgagcgcaagcgaagctgagagggcgagcctgcttttccttttcctgcccccattctaccactttcttcaaaaaaattcaaaattctcttgacttcagtttcctgaagtgatatcatagcgtcacacacttcagaaccctgaagtttgacactgcaagctgcggcaaaggagccggtctccctcgccgtttcacacgataaggcaaaggagacaaagcactatgatcatcgtactcaaacagaacgcacctgaggtacaggtacgcgagttctgccacgaactgcaggatatgggcctgcagatcaacgattccaagggcagtgagagccacattctgggcctgatcggcgacaccaaggccgtggccgagagctgggtgctggcaaacccggtggtggagacctgccgccgcgtgaccgagccttataagaaggccaaccgcaagtttcacccggacgacagcgtgatcgatgtggacggcgtaaagatcggcggcggaaactttgcggtcattgcaggcccctgcagcattgagagcgaggagcagatcacctactgcgcacagcgcgtgaaggctgcaggtgcttccctgctgcgcggcggcgcattcaagccccgcacctcgccctactcctttcagggtatgcgcagcgagggcctcgacctgctcaagctggcacgccgcgccaccggtgctcccatcgtgaccgagatcatgaacaccgagcacctgcccctgttcgagaatgtagacctcattcaggtgggtgcccgcaacatgcagaactttgagctgctcaaggccgtcggccgtcagaagaagccggtgctgctcaagcgcggccttgccaatacgctggaagagttcgtgatgagcgccgagtacatcatggctgagggcaacgagaacgtcatcctctgcgagcgcggcatccgcacctttgagaccagcatgcgcaacaccctcgaccttgccggtgtggtgatgctgcacaagatgacccacctgcccgttattgtggaccccagccatgcctgcggccacgcatggatggtgccggatctggcaaaggccgctgttgctgccggtgccgacggcctgatgatcgaggtgcacaacaaccccgccaaggcaaagtgcgatggtgcccagagcctgacccccgaccagttcgacgagctgatgcagttcatcggcaaagaggtggagttcttcggcaaaaagctgaactgatgatttgaactatcctctgcggaattattattttgtgtt

SEQ ID NO: 1149 - DNA, 29652 bp, Unknown
  gut microbiota DNA sequence
tcctgcagcggcacatacttgcccttcaggccggtaaagttctcggccacagcaaagggctgggacaggaacttctgcagcttgcgggcgcgggcaacggtgagcttgtcgttctcgtccagctcgtccatgcccagaatggcgatgatgtcctgcagttcctgatagcgctgcagaatggactgcaccttgcgggccacgcgatagtgctcctcgcccacgatatccgcttccagaatgcgggaggtggatgccagcgggtccacggccgggtaaatgccctgctccacgatcttacgggacagcacggtagtggcatccagatgtgcaaaggtggtggcgggggccgggtcggtcaggtcgtcggcggggacgtagacggcctgcacagaggtgatggagccttccttggtggaggtgatgcgctcctgcagagcgcccagctcgttggccagagtgggctggtagcccacagcagaaggcatacggcccatcagagcggacacctcggagcctgcctgcacgaaacggaagatgttatcaatgaacagcagcacgtccttgtgggtctcctcacggaagtactctgccatggtcaggccggtctcggcaacacgcatacgtgctcctgggggctcgttcatctgaccaaagaccagtgcggtcttattcagaacaccggactcgttcatctcgccccaaaggtcgcagccctcgcgggagcgctcgccgacgccggtgaagatggagtagccgccgtgctcggtggccacgttatggatcagttcctggatcagcacggtcttgccgacgcctgcaccgccgaacagaccgatcttgccgccctttgcatagggggccagcaggtcgatgaccttgatgccggtctccaggatctcggtcgcgggcttctgctctgcaaagctgggggccttgcggtggatgggccaatgcggcacatcatccacagagcccttgccgtcgatgggtctgcccagcgggtcgaacatgcggcccagcgtggcttcgcccaccggtgcggtcaggccgtggccggtagcggtcacggtcatgcccttgcccagaccctcgctggcggaaagcatgatgcagcgcacagtggtctcgttgacatgctgtgtcacttccatcgtgcgctcggtgccctcggcggtcacggtaagcgcttcctgcagggcaggcagcttgcctgcggtgaactgcacgtccaccacagggccggctacgcgaataatagttccctgtatcatacgattgcctctatactaatttgtaaatacgttttattccgcccggtcctgcacggcagccgcaccgccgatgatctcggtgatctcctgtgtaatggagccctgacgggtgcggttgtattccagctgcagctcccggatcatatcgttggcgttcttggtggcggaatccatggcggtcatgcgggcgctctgctctgcgcagaagctctcggtcatggcaccaaagatcatgccgtgcatataaatgggcgcgatttgttcaaacaccgtccatgcagacgggaacatctccacatcgcccttcggatcgcccagacccttgggggcaggctgcagatgggcgcggtccagcggaagcagacgcaccatggtgggctcgctggtcagtgcattctcgatgcgggtatagataagatagatctcatccagtttgccggtcttgaaatcatcgatggcatccatcgtgatatcgcgggcacgctgcagcgtaggctccgtggcaccgtagtggaaatcctccaccagccgcgggtccttgtggtacagggcgcggtagccggtctggccgatcacatagaaccggtcattctcatccgcattttccttgaggaacttgatgatgttctggttgtaagcgcctgccatgcccttatctgccgtcagcacgatgtaagcccgcttggggtttgcggtgttgcgctcgtggaagaacggatgcaccggctcttccggcaggtggggcaccacgcgggaaatggtatcgcgcatacggttgaagtagggcgatacattctggtagttcttacgtgccttgcgcagcttggacgaggagatcaggtacatggcgttcgtgatcttcatggtgtcctgaatgctctcgatgcgctccttcagcagcttactggacggcatggctgtcgcctcccgcataagctttccaggcgttcaggatggcatcgaccatttcaggttccagcttgccggtggcggtgatcttatccatcgtaccggacacatccgcgcggaactgacgcacaaatgcggaagttttggcgcgcagctcggcagtgggcagttcgtccagcacaccgtgggaagccagcaccagcgtgaccacctgctcggcgtcggacttgggctgatacagcggctgcttgagcatttccatcagagccttgccgtgatccagctggcggcgggtctccgcgtccagatccgaactgaactgtgcaaaggactccatatccttgtactgtgccagctcgatacgcaggttggcgttggccttcttcatggccttggtctgggcagcgccgcccacacgggacaccgacagacccacattgacggccgggcggttgcctgcattgaacagggcgctctcgaggaagatctgaccatcggtgatggaaatgacattggtggggatgtaggccgaaacgtcgcctgcctgcgtctctacgataggcagtgcggtgatggaaccgccgcccagatcgtcgcgcatccggcaggagcgctccagcagacgggagtgcagatagaacacatcgccggggtaagcctcacggcccggagagcggcgcagcagcagagaaatggcacggtaggccactgcatgcttggacagatcgtcgtaaacgatcagcacgctcttgccctgactcatgaagtactcggccagtgcggtgccggcatagggtgcgatgtactgcaggggagcggaatccgaagcagtagccgccacgatggtggtgtagctcatggcaccgtgcttctgcagatcgcctgccacgcgggcaatggaagaagccttctggccgatggccacataaatgcacagcacaccggtgtttttctggttcagaatggcatccgtggcgatggaggtcttgcccgtctggcggtcgccgatgatcagttcacgctggccgcggccgatggggaacatggaatcgatagcgaggatgccggtgtggagcggggtatccacgctctgacgctccagaatgccgggggcctgcttttcgatggggttgtagcccacagcttcaatggggcccttgccatcaatgggctcgcccagcgggctgatgacacggcccaggaaggcatcacccaccgggatgccggcacgcttgccgctgcgggtcaccatggtgcccacaccgacggtctcagctccgtcgaacagcatgatgcccagctgttcggggtccacgctctccaccatacccttggcaccgttgtcgaaggtgacgatctcgccgtacacggcgcggttcatgccctcgacgtgcacgatgccgtcggcagaggagatgaccacaccgccctcggcagaggtctcggcgggcttgtagtcctcaatgcgggtcttgagggtagccagcgagggcttgccctccatcatcttgtccagctgatgacggccggagttatcgaacacacggtcgcccacctgcaggacatagccggacagcaggctctcgtccaccgtcacgttcaggatgacctcggtggcatcatacagcttgcgtacctcggcgcggatccggttcagctcctcttcccggggcttgcgggcgctgcgcagctcggccttgacgatgcggttgtccgcaaaaaattcacgactgaattcagttgccattgcctgcacctgctttctccagcagatcgtccagcagacgtgcgtcgtcctgggcggtcagattgcgggccagcagcttctcgcacatcgcacgggccagtgccgtggtctgggcatcggcttcccgcagcttgctctggcgttcggcctcggcgcttgccttgccggctgccacgatggcgtctgcctgcttgcgggcatctgccagcagctgctgcttttcgacctcagcctgcttttcgtaggcttcgcggcgggcagcggcctcattgtccacattgcgcagtttttcctgtgcggcgttcatggtctctgcggcttccttcttggaggtctccgcatcggccaggtttgcgtccaccatctgctggcgctttgcgatcacgtcctgaacaggcttgaacaggaacttgcgcagcaccgcatacatgacgaggacgttcacgacggtccacagcaggttaatatccaacttcagcattcgtctgcgcctccgttactgacccaggaacaggatgatcagcagtgcaacgacgaagccgaaaattgcagtaccttctgccagagcagcgcccagcagcaggttggtctggatcttgccggatgcctcgggctgacgggagattgcctccgttgccttacccgttgcgatgccgatgccgataccgccgccaatgccggtcagcgctgcaatgccagcgcccagagcaatcaaaccattcatagtaataatctccttttaaattcagtaaatatcaatggatcagtcttctccgcccatggtttctttcatgaacagcgaagtcaggaacacgaacacgtaggtctggatcagaccgtcgaacaggtcaaaatacaggctgaacaccgccgggacgaacacgggcaccacgagcttgatcagctccatgatgacgaatgcgcccagcacattgccgaacagtcgcatgcacaggctggtggggcggatggcgatctcgaggatgttcataggggtcatgaccggagtgggggcagacagactcttgaggaagccaacgccgccgcgtgcacggatgccggcaccctcgatcagcacaatgctcatcagcgccagcgctgcggtcacgtccagatccttcgtggggggcttgacaccgaacacgccgatcaggttgctgaaggcgatgtagatggccacggtcatcaggtaaggcacatagcgcctgcccttttcgcccagcagaccttcaaagaaattagtgcctgcgaggtaggccatttccagcacggcctgacgcttgctgatatggtccaccttcaggtttctggtaagcaggatcgagccgatggtgacgatggccaggatcacccagctgatgaccacggattccgggatctgcagcgggccgaccttgacgtattcgacggtcagctcttccatcaatgctttggtcagattattcaattgtttttcctccttcctgaagaatagggttccgggggtaagaccgccgcaccgccccggcggcgcagcgtccttcttatcgctcgaagaaaaggcgcagctttgtgaaaaaagtaaggaaggtgttcggctctgtccggtcacaccctccctcctgcacgggtcacttcgtcttttttcgttgtgtatgatagtacgattgacgaaaattggcaagtggctttgtgcacattctacattttaggtggttctactgcattgatatacaaaaaaagttgtgcatcttgtctaataaagcaccctttacatgtacttttttcacaaatttcttagctaattcttaggtttcgatggctttttcagggcattccggggaatatttccatcaaaaatgccccattgtacatactttatatgcccgatatataaaattcgtataggcgtctcgtccggtattacacccgctcctatacatatttattataactgcatatctaaaatctgtcagtccgcctgttttgcgccgcggcggaacaccagccggaagatggcacgggcaagcggcccgcagtacagcatctgccagcacagggccatgggcatattgcagccccatgtatgcacccaagtgccaaagccgggttctttaaacagcaccgttgcgatcaggctcatcaccgggcacatgatgcacacgatcatcagcgagatggcataggtgatgaactgcggacgatctgtgggccgcatgaacataaacgccaatccggtggccagtttctccaccacgaaaaattccaacacgcaggcaatgggaaccatgatcggcatctcgtgcagagccataacaaaggtggcattggtgacaccgcctgtgttcagcgccacattgtaaacgatcatgccatagaccataattgcagccatgacaatggtaaagaagatacgttccggtaaagttttaggcattttgattctccgtttcttttgtgtctaaatttttgccgcaaaaagccgccccgcgaaactttcatctcgcggggcggcggcgactaccattcattggcgctattttagcacaaatcgatctgacgcataataccctgtggacactttctcccgttttgcgcaaaatcctccacaaacggcccggaacttctgggcagctttgctgttgacttcctcgtcagccctccctgcagggcacagagttcctccccaaagggcccgattgcccgggcacaccgcacagaaagcggcattttgcacgttccatctgctgtttttcaagaactgcacaattttatatttctatccttgtgcactctgcgaatagacaaatcaatcaggaatatgtataataaagccagaaaccagagaagtacagcagaagctcaaaagagagctaatcccgctgacttgaagcagaaaggagcgagaccgatggtcgatatggaacccgcacagcagggacaggctgtcgggattcgctgagaagcaaaatagaggctcaccacagacgggatgtttcccccgtataaaaacacaacaaaaatgagccagtcttgagcatcaaaaatgcgattacacgacaacctgtcgataaacttaacccccagcgattcaaatagatccgccggagatgattcctatgaaggtatcttttgtacggagaacattatttgaatagcaaaaaaggagttctaccaatgtactaagtagtttgcccctagcgaatctaactcgaaagaatgtggtaatatgaaattcatcttccgaatctcggtgccgcactccatcagttaagagaagggtcaatccaatgtactaagtaatcagtccccttgaaatagattctcagtttccagtagtttctaaggagagtcaccctatgaaacgtttactccgaaaatgaggaaccccaaggagaagaggcttatgactccgaagaagtaagtatccagccggacgagggcttgcaaccgcctcgtccggctggttttattttgtgctgttttcaccaacagtcaacacccgatttgtgcaaattttacgctgcgcggttgaataccgtcctttatttttgcacttttctgtggtatactgtggaaaaagatgggaggtgcatttcatggagtcgttcgtttcgttttccactctgttcaaccttgtgctgaccgttatctggttcatctccggcattcgggatcttcaaggcaaagacccgttcctcgatctgccgttcaaccagtatcaccgcgacccggagtaccgcgccttctggcagaaaaagaacggcgtgttttacatactcaacagcatcgcctttctgatcttagccttcacacctgttacatcgctgctctaccgtatcatcttcggcatcgccatcgtgggagaccttctttatcttgtcgcttacgaaagctggaaccatagtgcggattgacagccggaaaggagccactatgaatttgaatctttcgggctgggattggctgaacgccgcgctgggtgtgctgtttttgtaccgcggcatccgggatctgtacaatggcaccggcaccggatggagcaccgaggacgaaaagaaacacttccgcaaattttacggcattgcttcgaccatcggcggcgcgttcttgctggtcaacatttttctgccaaaggtcgagccgctgcactccattttgatggtggcagcgctcgtgttgtgcgttgccctgctgatctcgtatctgtgctatgccctgagtaggagcgacaaaaccaagaagtgaggggttgctatggaagtcatctgtgcgatcttaaccgcacttttcggcatcgggttcggcatttttatggccctgcagccggaggatgccattgccctgcatgaccgtggacggtatacacagaccgaaccaacggaagcgtacatcaaattgacccggctggagggcatcggactttcggtgctctgtgccgtgcttctggtggtgctgctgttcgcaccccaataatactttgcagctttcctcttgcggattttttctcaccctgctacaatgagaaaaaacgcaggaggtattttattatggtcaagcatgtgatcctgtggcagctgaaggacgagctgtccgacgccgaaaaagccgccgtcaaggcaggcatcaaggaagggctggaaggtctggcaggcaaggtcccgggccttgtggaagtgcatgtcaacatcaacggtctttcctcttccaccgccgacctgatgctggacaccacctttgaaagcgccgaggccctcaagggctactccgtccatcccgcccatgtggctgtggccgacggcaaggtgcggccctacaccaaggcacggttctgtctggattacgagatttaatgttgacaaacccactgtttttgcgtattatagacataacaatgtaaattggctgtgaagagaagagtacgcaccgtctgcgcctgacagaaagcccgaaggatggaaccgggcaggccgcgcgatgccgaagatggtctcggagctgcgcaggtgaaaattgagcctgcgacgggtgcgcccgttaccgcgctgcgccgtgctttttggcccggcaaaaggctgcgcccgcaagggtgcggcgaaacaaggtggtaccacgaaagtttcaggctctcgtccttgtccggctcagtccggcaggatgagggcttttttcgtcccccgccaaatcaggaaaggaagagtatcaacctatgagtgagcacaagacattctacatcaccactcccatctactaccccagcgacaaactgcacatcggccacagctataccactgtcgcctgcgacgcactggcacgcttcaagcggatgcagggctatgacgtcatgttcctgaccggcaccgatgagcacggccagaaaattcaggacaaggctgccgatgccggtgtgacccccaaggagtatgtggacaagatcgtagccaccgtcaaggatctgtggaagctgctggacgtcagctacgaccgcttcatccgcaccaccgacgactaccatatggagtcctgccagaaaattttcaccaagctgtatgagcagggcgacatctacaagggcgagtacatcggccactactgcaagccctgcgagagcttctggaccgacagccagctggtggacggcaagtgcccggactgcggccgcgaagtgtacgacgcacacgaggaagcctacttcttcaagaccagcaagtatgccgaccgcctgctgaagctctacgaggagaacccccagttcatccagcctgagagccgcaagaacgagatgatcgccttcatcaagcagggcctgcaggatacctgcgtgtcccgtacctcggtcaagtggggcatcccggtgcccttcgaccccaagcacaccatgtatgtgtgggtggacgccctgagcaactatatctccgcgctgggctacggtaacgaaaaatatcacgactacgacaagttctggcctgccgaccttcacatggtgggcaaggagatcctgcgtttccacaccattctgtggcccgccatgctgatggctctggatctgcccctgcccaaacgggtgttcggccacggctggctgctgatgaacggcggcaagatgtccaagtccgtgggcaatgtggtggaccctgtgatcctgtgcgaccgctacggcgtggatgccatccgctacttcctgctgcgtgagattcccttcggcaacgacggcatgttcaccaacgaagccctgatcacccgcatcaacagcgatctggcgaacgatttgggcaacctgctcagccgcacggtcgccatgtgcgagaagtacttcggcggcaccgtgcacaatgtggccggtaccgaggccatcgacaccgagctggagaccatggtcaacgagctgaccgccaaggtcacggccgacatggacagcctgaccattccgcaggccctgatggagatctttgcggtcatccagcgcgccaacaagtacatcgacgagaccgctccctgggcgctggccaaagacgaggccaacaaggcccgtctggagagcgtgctgtaccacctgtgcgaggcactgcgcgtgtgcggcatcctgctgaacgcctacctgcccaccactgcccccaagatgatggaacagctgggtctggacgcatctgctctggacctgaccaagaccacctacggcgcacaggagacctacaccgtgcacaagggcgaggcactgttcccccgcatcgatgtggcaaaggaaattgcccacctgaaggaagaggacgagaagcgcaaggccgctgccgaagctgccaacaaggccaaggctgaagcggagaagaaggctgccgcccccgccgaggagagcactgtggactttacccacgaggaagagatcgactttgacaccttctgcaaggtggaactgcgcgtggccgaagtgcgcgcctgcgagaacctgaaggaaagcaagaagctgctgcacctgaccgtgtttgacggcgagcgggagcgctgcatcctttccggcattgcaaagtggttcaagccggaagacctgatcggtaagaagatcggcattgtgtgcaatctggcacctcgccccatgatgaagggcaagtatgtcagcgagggcatgatctttgctgctgataccgccgacggcggctgctccatcgctttctacggcgacgacacccccgtgggcagccgcatccactgagccgccatgcaggaaaacaaaacgctttcccgcgcggaatggctggataagatcttcggcacgccggtgtttgccgtgctgctggccatcttctgcaatgtgctgtggggctcggccttcccgttcatcaagctgggctaccggctgttcgccattgattccggcagcaccgcctccatcttctgctttgccggtgtgcggttcatgctgggcagctttctggtgcttctgggcagtgttctgctgcagagccgcctgcccaagttcccccgcggcaaagtggcagcggagtgctgtgctctgggcctgtggcagaccacgacccagtacgcattctattacatcgctgttgccatgctcacgggtgcctttggcggcatcctgaacagcacccagagctttctgggcgtgatctttgcccacttcatctatggcaatgccgaccgcatgacccccgccaaaacgctgggctgcgccgttggctttgcaggcgtgctcatcggcacgctgggcaaccacggcagcggcagcggctggggcgtgttctgcatgatggccgctaccatcatctttaccctgtccggcccgtggaataaatccgtgaccaaaaaagcagatagctttgccgtctgcttcatcaacctgttcgtgggcggtctggcactgttcgtgctgggcactgtgctgggcggcagtctccatgtgcagagcgcactggcggtggtggtcatgttgtatctggccttcatctgcggggcaggctatgtgctgtgggccctgctgatgaagaacaacccggtcagccgcattgccatctttggcttcgtgaacccggtggtcaacgtgctgctgagcgccgtgctcaacggcgaacccctgttccgctggcagtatctggcggcgctggtgttcgtgtgtgtgggcatctggctggtgaacaaggcccccgccaaaaaggagggcaaatgaccggccccatttttgacacccacgcgcactacagtgcccgcgcttttgatgcagaccgcgatttcctgctggacagcctgcccagtaaaggcgtggtgggcgtgtgtgaacaggccacccactccggggatgcaccccgggtgctggagctggcgcaccgctacccgtgggtggtggccgccgttggcatccatccggaaagcctgctgcccgccgccgactgcggcgaggaaggcccggctcctacggtctcggtgtacggcggcgactgggccgcagagatgcgcgctctggccccgtattacgaggaccccaaggtggtagctgtgggggagtgcgggctggactaccactggcctgtgcccaaggatgcccagctggccatgtttgaggcacacatccggctggcgctggaactggacaagcccatcatcgtgcacgaccgcaacgcccacgccgacgtttacgccctgctcaaaaaataccagcccaagggcatcgtccactgctattccggcagtgccgatgacgcggtgtggctggcaaaacagggactgttcatcggttttggcggggcatgcaccttcaagggtgccaagcgggcggcaaacgccatcagcgccctgccgctggaaagcatcgtgctggagactgactgcccctacatggcaccggagccggtgcgcggcacccgctgtgacagctccctcatccgctatgtgggcgagtatatcgcccagctgcgtggcatctctgccgaagaggtgttccgcaccacagccgaaaatgcccgccgggtatacgggctgtgatccgtttttcgcaagttgcacaggtttttctctgtgcttctgtataaatcaacaatcaaaatccaaactgttataaggagaacctaccatgaaagcacgtattcctaagcaccgcgagttcatcatcaacttccccgacagcatcgaccagaacaaggccaacgagggctgggcaaagctgcagcagatcgttgaggactacaagaaggcccacaatggcgcttccgtctacgcccccaccttcatcgaggactgcgaggccgaggtgaagaagctgcaggaagagtacggcttcgagtacacggtcgaatacgttcagtaatttctgatatttaaaatcccctctgtgcatctgcgcaggggggatttgctgtttcagggggaaccgcttttccctacggtgcacttccccgcaaaaatacagccccggcagactgcatggtctgtcggggctgtgctttcctgtccgggtcacttttccactttactcagcaggatgcggtcgttgtccagattcctgcctgcgttctcgcggaacttttcaagcaggtcgtccacggtcatccggctgcgttcctcgcccttcacatcaaagacgatgcggccggaatccatcatcagggtgcggttgcccagctccagtgcctgatgcatattgtgggtgaccatcaggcaggtgatcttcttttcagccacgatgctcttggtcagctccagtaccttttcggcggtggcggggtccagtgcggcggtgtgctcgtccagtagcagcagcttgggggtgacgagggtggccatgagcagggtcagcgcctgccgctgaccgccggaaagcagtcccaccggctgcttcatgcggtcctcaaggcccatatccagcagcgccagcttttcgcggaacacttccttgtccttgcgggagatgcgggagaagatggcgtggggcgcggtgccggcacgcagataggccagtgcaaggttttcctcaatggtcatgttgggtgccgtgcccttgagcgggtcctgaaacaggtggccgatgaccttgctgcgctggtgctccggcgcaaaggtgatatcctgtccgcccagcaggatgctgccctcgtcggcgatgaagccgccggtgatggcgttgaacagggtggatttgcccgcgccgttggagcccacgatggtggcaaagtccccggcttccatgtgcaggctgacaccgttcagggccactttttcattgaccgtgccggggttgaaagtcttgtgcagatcgttcagctgaagcatttccatcttactttccctccttgccggtggtcacgcggcggcggcaggccccatgcttgcgctgctcaaaggcgattttttccttgatggccggcatcgaaatggcgatggccacgatgatggcggacaccagcttcatggcggcggcaggtacattgaagcgcagcgccacagctacgataaaacggtacaggcagctgccgaacaccacgccgatgatccggcgcagcatggtgcgcttaccaagcagagtctcgccgatgatgagggaagccagtgcgatggtcaccatgccggtgcccacattgatatcgcagctcttctgatactgtgccagcaggccgccggagagggcgcacaatgcgccggaaatgcacaggcccaccgtaatggtgaaagccgggttaatgctggaagcacgcaccatggcagcgttgtcaccggtggcgcggatggacaggcccagccgggtgcccagaaaacccagcatcgccgcaccggcaagcaggatcatggccagcgcgatggccagcttataccagccgccaaggaagctcagtgagccctttgccagcgagaaaacagtgtcggtcttgaccagtgacatggtggaggaaaagcccatcacggccagattgatggtgtaaaggccggtgttgacgatgatgcctgccatgatgctctccacgccaaggcgggtctgcagaaaagccgtaacaaagccggagcacacacctgccgccatggctgcgaacagggccagaatggggtggccggtcagtgctacctgacaggccacggcgcagcccagcgtgaagcagccgtcagtggaaaggtctgcgatgttcaggatggaatagctcaggaacagtgccagcgccaccagggcatagatacagcccagttccagcgccgtctgtaggacgttgagcgaaaagatactcgccagcatgtgtgtgctccttttatgtttctttttgattggacgatttaaaatggcctccgcttttgctctggccataatttaaggaatcagttttttatttcggaataccggagcgtctgcggacgctccggtattccattttcacgggaagggtcgtgacggaaagcaggctcgccctctccgtcacctacggtgacacctctcccaaagggagaggccttggtagaaagatgaactttacgtggactgccaaaggctcccactttgggggagctggcaaatccgtaggatttgactgagagggcgagcctgctaaccacgaagataccggacttatttaatttagcttcttgtgatgcggtgcactgtgtgcagcaaaacacttccgcagaaccgccaaaagctcccccttcgggggagctggcaaaaccgtcaggttttgactgagagagtacttttttaagagaagttctctgcggtggttacttccacgatctcggtgcagtagggcttgaaggcttccttcacggtgtcgaggtcaaggcccagcgcttcgcaggtctcggtgttgatggtgacgatgccgttatcaaaggtctggtagggcaggtctgcggtagtctttccgtcgcagaggatctctgccaccatgtcggcagtggcttcgcccagctggacgtaatccacgccgtagcctacgaacgcaccgttcagtgcaaagctgtcggcaccggtgtagtgctgcacgcctgcctcggtaaaggtctcgtagatggacagctctgcggtcatcacggtgttgtcggtgggggtgaacacggccttgacaccggcggcgatcagagcctcagccgccatctgcacctcagcggtggtggtgccgttcttctcaatgtacttgatgccgttggcatcacaaaaagccttggcatcggcaatggcctgggtggaggcatcctgactcaggtcgtacagcaggccaatggtgtcaatatccgggttgacagcggtgatcagcttcatgatggcctcggtgttcagtgcgtcggaggtgccggtgatgttctcctcgccgtcaaagcctgcagcggcggggtcggtgacagcagagtagacaacggggatatcggtatcctccacagcggccagcatggttgcggcggtgggggtagccacagccacgatcacatccacgccgtcccctacgaggtcggcaccgatctggttcaggttggactggtcagcctgtgcatttgcgtagtagtcggcgtagtcgaaggtaacgcccttctctgcccccagctcatccagacggctctccacagattccacgatctggttgagggaagcatgatccacatagttgacgatgcccaccttgaaggtctggccgccctcggctgctgcggaagaagcggtggaagatgcagccacggtgctggaagcggagccgccgcagccggtgaatgccagtgcagaaacggcggaagcagccatagcggccttgaggaagctgcggcgggagatcatggtaacgtttttcataacagtaaactcctttcccggagcgggcggcaaaagtaaaagacccgctccccttgcgggacgggtcttacaaataaaaacgaccctgtccctgtgtgttatccacaaggacaggatcggtaaagttcgattctgcggtgccaccttgcttgccctgctttgcaaactgcagagcctctcacggagagccaacactcccctgtcctgtaacggagacttccgtccaaagctactaaggcttgctgcccatttgcccggccctcggcggcccacgaagttctgccccgctctcgcccgttttcactgtccgggctcactgaagatgcgctgtgcaggttctcttccgcctcatcggtttgattgcattatacactttatttgcataaagtcaagaggaaatttcaaaaatttcttttttctacagcacaaagtcattcttccgtgcatcaggcccgctttgtgcggcgcttgcgccagacgaagtacgccgtgtacgccagccataccacaatgccgcccaaagtcagcgcacggctcagccggatgccgtcgggctggtagacaaaatcgatgctgttttcacctgccgggcacagcacagccatcaatccctcgtccacctccacaatgtcggcctcctgcccgttgacataggccgtaaagccgtcatcgtaaggcacggagaagaacacgaggttctctttttccagcgtgatctcggcgtggaagcccgaattgttcatctggaacacactggtagccgtggcacggcgctcgcggcagtcctgcacgtaggactcatagtacagctcctcccgtctgccttccggcagatgggtgaggtacttgccgtagactgcagcatcctcgtcggtaagcaccagtgcacgcatcaggaggtttgcgcgggtggccttggctgtttcttcgtactcggtctgggtgaggtaatagtcataggcaaagcccatgggcacgtagttcgtgttgcggtagaccgcatagccgtcctttgcaaaggcatattcccagccgtcgtcggcttcgttttcaaagtcggtctgcttttccggcgtggtgataaggtactccacactcaaaaggccccgcagtgcataattggaaagctccggctcactgcgcacatcccgcttgacccccagcgccgggtagaagctgaggatgctgggggccgccgtgctgccaaaatactgcaggcagcttttatccagccacatgccgatgttgtcgtggatcttgtacgtatccacgcggtaatcgccttcgggcaggtcgtttttcaacagcagggcgcttgtgtcctgcttcacaaggtcgctgtcggtataccactggccgaacttgccaatgccgatgtgcaccacgctgaacaggaaggcaaacgccagcactgccgccgtcaggcgctgggcaaagcggctgtcgccccgccacttctggcagagatagcggtacaacagcaggcccagcaggccaaagcccagcaccgcacagtactgaccggggttcttgagcacgccgaacgaccagctgccggtgtcgctgtcctgcaccggcaccaccgcaaaggccaccgtggcgatcatcagccagctgatgccgcgggccgggctgtccagatcggtgttgtggtcttccagcgcgttcacggtcattgcggccagcaccagcaccggcatatagtaccagcgcgcatagtagctggaattgagggcgtagaacgcactgttcaggatgggcaccagtgcgaacacggcgcaggtgcccacgatgcgctttttactgtcgccgcactttgctttccagtaggccacggcaccggccagactgcacagcggcagataggccgacatgctggtccacttgatcacaccctccgaccagatggatgtgaggtaaggagaatccggcggcatgatccagctgacgagaattgcaaggtactgctgcaccttgctgtatgtcagaaagccccagccggaggaaaggtcgatggtgcgcgggttctgcaaaatggagagcaccgcaggcaccagcaggatgctgcccatggcaacgcccagcaggctttcaaatgcaagcaggccaaacttttttgcagtgagacggaagtcccttgtgctgagcttgcagatgaagtagatggccagaaataccacctgaccgatgaaaaagaagtagttgttgacaaggttcaccgccacccagaacgcaaaccagctgcggcggtcgttgtaaagggcctcgtccagcgaccacagcagatacgggaacagcgccaccacatctacaaagtggttgaagaacacattgtataccgtaaagccggagaaggtatacaggcaggctcccagcacggcgtagtcgatatttttgacgtagcggcgcagatacaggtacgcaccgccgcccgccacggcaaacttgagcaccagcagcggtaccatgaggtagggcagccacccctgcgggaagagcagcgagaaccagaagaacggcgagccgtacaggtagaacgaataggcgttcatcacgccgctgccaaggtcggtagcccatgagaaggtattgtgcaccgaggtgaacgcactgtccgggtagcctgcgcccttgataaagccgttcatatagcggtaaaagctgatctgctggctgttgaaatcgcctgcatagtggaaaaagccgccgtcgatgatataaaacggcagaaagaacagggccgccgtgagggcacacaggcccaccgtcagccagaatttatcctttttttgtcccagcagctgcggctgccgggcagtaccagaccgctccatggtttcctcttttctctgccaaagcggcagaaagttggtttgttctagtatagcacgaacactgcgcagaaaaaagggcttgacaacgctctgccggacaggtatgttggagaaaaaaggaggaagctgccatgctgtacccgttcagcgccctgctggcgcgcatgaaatatattacccgctggagcctgatgcactccacccgggccgaatctctcagcgagcacacctgcgataccgccctgctggcccacatgctttgcctgatcgcacggcggtacaccggcacgccctgccgccccaaaacggtagcagtggcggcgctgtaccacgacgcgccggagatcattaccggcgacatgcccacaccggtcaagtacagcagccccaccctgcgggatgcctacaaggcgttggaaactgagagcgtgcgctgcatgaccggccttctgccggacgagttgagcgaagagctgtccccgttcatctccggggaactgctcaccgccgaggaaaagcgcctgctgaaggccgccgaccggctgagcgccctcatcaaatgcacggaggagcagcgcagcggcaaccacgagtttgacgcggcgctggcccagcagaaagcggccctgcaggccatgcactgcccggaagccgactggttcatagagcactgtctgccctgttacacccagaatctggatgagctgacccggcagcagtaatattccccttacggaaacggcacctcgcgcacgtcgtccgggtcgatgcccgctttgcgctgctcttcaaaaacagcatcgatcagctcgtccagatcttccagatgggtcagggtgcagcagtagcggcgcagattggccgcacctttcagccccttcatatagtgcatggtctgagagcgggcctgcggcatggcgacgaactcgcccttctgctccaccatctcctccacctgacggtgcagcgcattcatgcgggcctgcaggttgggtgccttgggtgcgggcaagccttcaatggcggcgttcacccgctcaaagagccacgggtcgcccagcgcgccccgggcgatcatcacgccgtcacagccggtggcctgcatcatctccactgcatcctctgccgagtggatgtcgccgttgcccagcaccggcactctgacggcatccttcacccgggcaatgatctccgggtcgatgccgggggtgtacatctgctcccgggtacgggcatgcaccgcaatgagggctgcgccggcctgctcacaggccttggcacactccactgcagtgatgtggtcggcatcccagcccttgcgcattttcacggtgacaggccgttttgtatttgccacaacctgctccacgatgcgcccgcagcggtccgggtccagcatcagcttgctgcctgcgccgccggacacgatcttgggggccgggcagcccatgttgatatccacaaagtcgaactcgtactgttcgatggcggcggtggcttcgcccatgatctcaggcacttcgccaaagatctgcacaccatagggtgcaccgttgggttcggccttgagcaggctcaccgtcttgtggtcgccgtacaccagcgcccgactggacaccatttcgctcacggtaaagcctgcaccgtgctgggccatcaggcggcggcagggtgcatccgtaaagcccgccatcgggccgaacaccgcccggtgcggcaggatgatattgccgattttcaaaggttccattggttgttcctcgctgttatcgaaaaaagctcccccgcaggggagctgggtattaccgtgcgaatcctttcgggtacggcataagcctccctcactgagggaggtggcattgccgcaggcgatgacggaaggagttcctgtagaaaactccctcagtctcgcattcgctcgacagctccctcaatgagggagccttttttacatcttctccggcacgttgatcttgaacatggtcagcacgttgaagatggcattcttcacgccgatgcacagggccaaacgtgcctgctgcacagcggggtctgcgccctgaatgcggcagctgccgtagaagcggtggaaggcactggccagatcaatgacaaagcggttgatgcggctggggtcgtacttctcggccgccatgacgatctcctgcgggaaggctgccagcatccggatcagatccatctcggaaggctcggtgagcagggtggcatccaccttctcggcaccggcaaactgcacgccctcgctctccatctttttcaggatggagcagatgcgggcatgggcatactgcacatagtacacggggttatcgttgtcggtcttgacagcctgatcgaggtcaaaatcgatgccgctgcctgcgtcgtgcatattgaacaggaagcgtgcgctgtcgatgggcacctcttccagcaggtcggtcagagtgatggcattgccggtgcgcttggacatccgcacaggctggccgtcgcgcatcaggttgaccatctgcatcagcacaacgtccagatcttcgccgttcaggccgatggcatccatggcacccttcatgcgggccacatggccgtgatggtctgcaccccagacatcgatggccttggcaaagccacgggtggccagcttattgtagtggtaggcgatatcggcggcaaagtaggtggggatgccgttggcacggacgagcacttcgtccttggcttcctcctcggttccgtcctcggtctttttcttgttcaccgtgccgtacttggcagcgtactgggcgctgcggtacatgatggcaccgtcctctgccttatagcatgcgcccagctccagcagcttatccaccacggccttcaccgcgccggactcgtgcagggtgctctcatggaaccacacatcgtagtcgatgcggtacttgcccagatcgcgcttgagggcagcaatgttcttgggcagagcgtaggctaccagtgcgtccttcagggcggcaaaggcctcgctctcgaacagagtctcctcgtccatccccttgcaagcggcaacgtacttgtcgccgttcagctctgcaaactcgccggccagcaccttgatgtcgccgccctgatagcactcggcgggcagcggataggcttcctcgccgcagtacttctgcaggtagcgcacggcaaggctcttgccgaacttctggatctggttgccggcatcgttgatatagaactcacgggtcacatcatagccggaccagtccagcacagcggacagacagtcgcccagagcaccgccgcgggcgttgcccatgtgcatggggccggtggggttggcggaaacgaattccacattgtacttagcgcccttgccgtgatcggtgcggccatactccttgttggagcaggcacccagcaccacactggcccagaaggacggagccaaaaacaggttgatgaagccggggccggccacttccaccttggcaaacacactgttctcgatggagggcagatgtgccagcagcgcatccgcgatcatcttgggagccttgcgccagctgcgtgcaccggccatggcgatgttggaggcgatatcgccgtttttggtatcggcggggatctccacgatgaaggcgggcagctcagcttccggcagagcaccatcggccatggcggccttggcagcagcggtcagcagagcgcgtgcctcgtccagcgcagcctgacgggggttatagttctggtagatcttttcaaattcagtcattggtctggttcctttcacagtctgggaaatatctcagtttacgtgggtcacggtcacttcaaggcggttgcggctcacaagctcggcgctgttggcatccagcaggtagccgaactttgcggtgccgcccttctcggtcaggccgcactcgatctcgtcggcggtcacgcccagcgtcatggagccgtagcctgtctcgtagtggcagaggttgcgcttgcctttttcgatcagcagctgggtgctggccccgccgcccttgccaaaccgcagcatcgccacgcggctgccgtcggcggcaattttcagggtggtggtgcagccctcgtagccggtggtctcggtctctttataggtaatgtagtagctgccgcccttctgcacgaactggccgcgggtcatcagctccacaaactcttccttttcttcctgctccacaggctctttcacatgctgctcaatgcggctcttgatgcggatgatataatcttccttcagcggtttgctcacgtttttctgtccttatcaatatttatcaatggcgatctgatccaccgggccgcccttgtactcgcccaggaacaggtctgccgtctgcacaaagctgtccggcacatcgctcacgtagaagtgcgcctgaccctcgtgctcctgtgcagcgcgcaggccgcgctcggagagcatctgttccagatggtgggcggcggtcttggccggatccaccagcgtcacgctctggcccatgaactcgccgatcatggtcttgagcagcgggtagtgggtacagcccaaaatcagggtgtccacaccggcctcacgcacctcggtcaggtactgagcgatcaccagcttcgtcacctgctgtcggctctcctcgctgtggtccacgtaaccggcctccaccagcggcacgaacagcgggcaggcctgcgcggtgatctccacccccggcaccagctgacgcagcagcttttcgtagctgcgggagcggatggtggcagcggtgccgatcacgccgatgcgacggttgcgggtagcaaaagctgcttcccgggcggcagcatccaccacgcccagatacggcaccggcagctttgccgcttctgcagccgggtaggtactggacacggtgccgcaggccgccatgatgcactttacatttttagaaagcaggaatgccacgtcctgacgggcatactgcaggatggtctccgggctgcggctaccatagggcacgcggccggtatcgccaaaatagatgatctcctcgtggggcaggcgcttgcgcagctcccgcacaccggtcaggccgccaaggccgctgtcgaatacgccgatcgggcggttatccatgctgcttttccttcctttccagcgccagcgcaatcagccggtcgatgagctgcggcactggcaggccctcgtgctccatcagcttggggtacatgctgatggacgtgaagcccgggaaggtgttgatctcgttgatcagcacccggccagtacccttttccacaaagaaatcgcagcgggcaaggccctcgcagttcagggcagtgtaggccatggcggcgtaggtcttcacctcgtccagctttgcttccggcaggtgagccgggatgacggtctggctcacgccgttcttgtacttgtcgtcgtaggtatagaactcggcaccggcaaggatctcgcccggacgggtagccacggcggggtcggagccgatcacggcgcactccacttcctgtccgtccacaaaggcttcaaacaccaccttgcggtcgttttccagtgcaaggtcgatggcctttttcagctcgtcacggctggacaccttggagatgcccacgctggaaccggcgtttgcgggcttgacgaacacgggccagcccagcttcttttccacaccctcgcacacgccttccagatcggactcgatctcccagcggtcggcagccagccatctggtgtggggcacaccgttggcctcgaacagagcattggccacggctttgtccatgcacaccgcgcttgccagcacgccgcagcccacgtaggggatgccggccagctccagcaggccctgcaccgtgccatcctcgccccacaggccgtgcagcaccgggatgaccacatccacatgcactttttccacatggccttccggggtgaacaggatcatgccgtggtcggcgcggtccggactgatgacgcaggccatgttgcctgccagctcttcccagctgccatcggccatctgggcggccgtggcctcggtgtacagccagcggccctccttggtgatgcccacagtgagcacctcatatttttcacggtcaatgttgttgacgaagttgcccacagaaacgcggctgacctcgtgctcgctggacataccgccgaacagcagcacaacgcacattttttcagactgcatgataactctctcctatttacaaagcccaagacctgggcgggatataaccggtaaaaatgccgttctggcttattatacaatatctatgcgcgcgatgcaagcagaatgccaaaaagctgccggtgggtaaaagagatatttttcaaaaaaactttccaaaaatcgaagatttccgcttgacggatggaaaagtgcgtggtacaatgatatcacctcttttgcggggttattaagtgcgcctgttttacaggtaccacccgcaacccgagggaggttcaaaacaaccgttataatggaggtgtcaacaaatgaccgttaaaatcactctggcctgcaccgagtgcaagcagcgcaactacaacaccacgaagaacaagaagaacaaccccgatcgtctcgagatgaagaagtattgccgtttctgcaagaagcacaccgttcatcgcgaaaccaagtaagaaaggcggacgcatcatggcagacaaaaccgagaacaagccgggctttgtggccagagcaaaggccgctgtgaagaacttctttggcaagtgtgccaagttcttccgcgacaccaagagcgagctgaagaaggtggtgtggccgtccaaagaggacgttaagaccaacaccgtcgtcgtgctcgtgactgtcgccatcgcagcggtcgtgatgatcctgctggatgccatcttcggcggcatcctgggcttgatcatcggcgcctgagaatcatcttgaaacggagggcagaccaaaatggaagaacaatccaatgaggcactttggtatgtagtgcatacctattccggctatgagaacaaggtcgcgaatgatctgcagaccatggtggagaaccgtcatctgcaggatctgatctgcgatatcaaggttcccgtcgagatggttcccgaaattgacaagaacggcaagcagaagatggtggagcacaagctcttccccggctacgttctggtcaaaatggtgatgaacgacgatacctggtacgtggtgcgcaatacgcgcggctgcaccggcttcgtcggccccgcatccaagcccgttcccctctctgctgaagaagtagagaagatgggcgtggaaaaggctgcacctctggcagtcgacttcaacgtcggcgacaccgtgcagatcaccgccggtcctctggaaggctttatgggccttgtggaggagatcgataccgagaacttcaaagtgaagctcaaggtcaacatgttcggccgcgagacccccgcagaggtggagatcggtcaggtcgagctgccgtaaccaaccggcacaaatcgtttaccaaggtaagaccgcagtgcggttcttatagagcgtgtgcactgtgcacatgctcgtgggaggcacggagacaccgtgccgcaactcaccacagatttttggaggtgcatttattatggcacagaaagttactggctacattaagctgcagatcgaggccggcaaggcaactccggctccccctgttggccctgctctgggtcagaagggtgtcaacatcatggcattcaccaaggagttcaacgagcgtaccaagaaccagatgggttatgtgatccccgtcgtcatcactgtgtatgctgaccgctccttcagcttcatcaccaagactcctccggcagccgttctgatcaagaaggcagctggcatcaacaccgcttccggcaagcccaacaaggaaaaggtcgcttctctgaccgccgctcaggtggaagagatcgccaagaccaagatgcccgacctgaacgctgcttctctggaagctgcatgcagcatggttcgcggcacctgccgttccatgggtgtcaccgtcgagggctgagacataaacagtgggagggcataaaactgcccgcatgaccacacaggaggatatacaatgaaacatggcaagcactatgtcgacgctgcaaagctggtcgattctactaaggcatatgatgtgaacgaggctctggagctggcttgcaagaccgcttctgccaagttcgacgagaccgttgagctgcacgtccgtctgggcgttgacggccgtcacgctgaccagcaggtccgcggcgctgtcgttctgcccaacggcaccggcaagaccgtccgcgtctgcgcaatcgccaagggtcccgcagctgccgctgctgaggctgctggcgctgatatcgtcggtgatgacgagctgatcgcaaagatcgccggcggcttcatggatttcgacgttgtcgtgaccactcccgatatgatgggccgcgttggccgtctcggtaaggtcctgggcccccgcggcctgatgccgaaccccaaggccggcaccgttgctcccgacctgggcaaggctgtttccgaggccaaggctggtaagatcgagtaccgtctggacaagcagaacatcatccatgtgcccgtgggcaaggcttctttcggtgcagagaagctgtacgccaacctggacactgtgatggaggctattgccaaggcaaagcccgctgcagcaaagggtacctacttcaagagcgctaccatcgccaccaccatgggccctggcatccgtctgaacaccctgaagtacggtgtctgatttgaagttctgatcgtttttctgccgttcgtatgggcggcagaaaaattttgtcagaaaatttcaaaaaagacttgacaactccgcacgtttgcggtaaaataatcatgctgtttttgagacagcaggtactggagtccagtgtaaggctatgccgcctgccgagaaacgtgtgtaaagttgttttatgcctctttctcgaccaagtgcgggaaagaggcttttttcatacttgctccggttttcgatacaagtttttgaaacgaggtgaaaccgaatgcccagtgcaaagattctttctgaaaagcaggcttatgtcgctgatctgaaggcaaagtttgagagtgcggtttccggctgcgtcgtcgcttacggcggcattaacgtcgagaacgacaccaagctccgtaaggagctgcgtgaggcaggcgtcgattacatggtcgtgaagaacaccatgctgcgtctggctgtcaagggtacctctctggagggcctggctgagcagttcaagggcgataccgctatcgcttttgctcacgaagcggatcccatgtccgctgcccgcatcctgtgcaagtatcaggatggcgataagtccaagaagttcgtcgtgaaggctggcttcatggaaggcaaggtcatggacgctgccgagaccaacgcaatcgcaaagctgcccaaccgcgaaggcatgctgtccatgttcgcaggcgccctcaccagcactctgtctggtctggccgttgcaatgcaggcttatgccgacaagcaggaggagcccgctgcctgatggccgcgtgaccgctgcttaaacaaaacaagaaactaacaaacaaaaccattgatattggagggttactactatggcttctgagaagattactgccatcatcgactccgttaaggagctgtccgttctggagctgaaggaactgatcgacgcttactgcgaagagttcggtgtttccgctgttgctgctgctgctcccgctgctgctggcgctgctgctgccgctgaggaagagaagaccgagttcgacgtcatcctggctgaggctggcgctaccaagatgcaggtcatcaagctggtgaaggagatcaccggtctgggcctgaaggaagctaaggctatcgtcgatggcgctcccaaggctgtcaaggagaaggtctccaaggctgaggctgaggacatccagaagaagctgaccgaggctggcgctaaggtcgaggtcaagtaattgaacctcttctgagagtcgttcattcttgaacaatgagatgcccgtaccgaaaggtgcgggcatctttttttgtttgatgacaggaggggcggtaaaggcaagt

SEQ ID NO: 1150 - DNA, 33326 bp, Unknown
  gut microbiota DNA sequence
agcagctccgaaacgaccgcagtcgtttcggagctgcaaatatgatttccgctgtttatgcccagagcgaagcggagggcattctaaatcgtcatcgtcgtatcttttctgcattcaaaaactatgttatactatcctcaacaggaggaacggcagagccttcacccccctctgccgcaaaaagagagtttatggaacaccgcaactggaacaaaaacaacatccgcacttcccttttgggttacggctgtatgcgttttcccaccaaagccgacggcaccattgacgaagagcgcgccgaagctttgctgaacaccgctaaggccgccggtgtcaactacttcgatactgcctatccctatcacaacggccagagtgagccgtttgtgggccgcgtgatcgccaaatgggaccgcagcagcttttatcttgccaccaaaatgccgctgtggaaatgcaaaagcctggacgatgccaagcgcatttttgaagagcaactgcagcggctgggcgtggactacatcgacttctacctgctgcactccctgcacaaggcccggtacgaaaaggcaaaagccatgggccttgtggactggctgtggcagcagaaggccgcaggacgcatccggaactttggggtttcctgccatgacaacgccgccgggtttgagtatattctgcgcgaccagccgtgggatttctgccagctgcaatacaattatctggaccgggacgaccgcgccgaggagatctccggtgaccggggctatcagctgaccgaagaatgcggcgtgccgcttatcatcatggagcccatcaagggcggcacgctggcatccctgcctgcagatgccgccgcaccgctgcacgccctgcgtccggatgccaccgatgcctcctgggcgctgcgctgggtgggcagccacaaaaacgtgcatgtgatcctctccggcatgagtgctgaggatcagctgaccgacaaccttgccacctttggccattttgaaccgctttcccccgccgagaatgccgctgtggaaagcgtagccaacgagctgcaccgccgcatcaagattggctgcaccggctgccggtactgtatgccctgccccatgggggtggacatcccggacaatttcagcatctggaacaagctgggcatgttcggtcagaaggatgccatcaaagcccagtggaccacctgcttcccggacagcgaaaaggccctgcactgtgtgcgctgcggtaagtgcgaagccgtctgcccgcagaagctgcccatccgcaattctctggcacaactgcaaaaggagctggacgcactgtaactccttccgtcatcgctgcgcgatgccacctccctcaaagagggaggctttaaggccccatctctgagggggctgtcgccgcaggcggctgggggagtctcataacaaaaaaagaccgtcacacgtttttcgtgcaacggtcttttttatgcagttcttaccacagccggatgaccttgatcacactttcagccttatcgcgggccagctccagatggcgctgcagggaatctgcagcactgtcccagttgtcggccagagcggcatccagaatttccagatgttcgtcacaggtctgttcctgattgatcatgctcaccttgccggtcatgatgcggaagcgggtgttcagaccggtgatgcggtcatacgccgaacgcaggtacttgttgggcaaagtgctcatgagcagttcgtggaactcatcgtccgactcgcagaagtcggtgatgctgtccgggtgatgcatcagctcagcaaatgtctccagctgttcccgcgggatgccgctgccataagtacgcagggcgtaaggctccaccagcaggcgcatctcgaacatgctgtgcacgtcctcctcggtgatgccggaaaccatcaggcccttcttgggcagaatggtgatcaggccttcctgctccaagcggccaagagcatcccgcatgggggtgcggctgatgttgcccatctcggcacaaagcttctgctcgttcaaaaactcgttgggccggtactcgcagttcaggatcttggtcttaaggtactggtatgcctgcagcttcaggctcgttttggtctgcgactccatttctttcatgttctgcacaactcctattcccttttcccttgcaaagaaaaaggttcttctcctataatactctggggcgcatgctttctaacttcaaagcatcttgtattcttgctgcaatccaagtagtattccagttctattatttcataatagggcaattattacaatacttttttgtgaactttggcgcgttttatgttttatctaatttttatgccccatttttgccaaaatcaacaagtttttttgtgcttgtagccaatgccgcttcttttggcccggttcttttgcatccaatgcaaaaatatgctacaatgtaaaaaatattgaaaagggtgtggatctctcttatggcacgaagcgacggctacaataccaagacccgtcaactgattttagattatctcatcaacaaccggcagcacgcggtgagtgcttccaacattctggagcatctggaagagcagggcgcaagccccaaccccaccacggtgtaccgctatctggacaagctggccggggagcagcgcatcatgaaatacgttgccgacaagggcgaaaaagctgtgttccagtacgtggacgagggccgccactgccgggagcatctgcacctcaaatgcgtgcagtgcgggcgcatctatcatctggactgccacttcatggacgaggtgcgcgcccacctgatggcagagcatggctttaccctgcagtgcgagggcagcgttctgtatggtttgtgccgccactgcgcccaaaaagaggaacagtccgactctgatggtcaaaccgcacaaaaatgcgcctgctgtgttgacacggacaaaaagccgtgatacaatgcatgcaagaaaaagcgttgaccgggaaaagtaaggtttcaatgtcctctttcagagagtgcgggtaggtggaagccgcgcagagagcgaaacccgaacgaacacccgcaagcttcaccctgaacctgtttatgcagcagtaggggtcgacgtgcgccgctcgttatcgcggcagtgctttcaacggggagagcgcacaaaagtgactggcatggttttatgccggtaatttaggtggcaccacggatacggcagcatattcgtcctagcgattgggatgaatgagctgccgtattttttatttaaaaagaggggtaagaaatatgtgttgtgttatgggctataccgggcacgatctgagtgccgccaaattcaaggaatacctgctgcgcacggtcatgcgcggcccggacgaccaacgtgtggtggaagggccttttggtctgatgggctttggccgccttgccatcatgggcctgacgccggaaggcatgcagccgttctaccgcggtgccgactgcgtggtgtgcaacggcgagctgtacggcttccgctttgagaaagagatcctcaagcgccgcggctacaagttccagtccgactgcgactgcgagatcctgctgccgctgtactatgagtacggtctggatatgttccgccacatggactccgagttcgcgcttatcatgtacgattcccgcaaggaccggctcatcgccgcccgcgaccccatcggcatccgtccgctgttctacggctactccaagtccagccaccagatcgcattcgcctccgagatgcagaacctcattggctggtgcgacgacatccggcccttccccattggcagctactactgtgatggccgcttcgtccgctatgaggacattgccgatgtgcccgcccccatgcaggacgacatggacaccgtgctgcggaacatccgcgaaaagctgatcgcaggcgtagagaagcgtctggacgcagatgcccctgtgggcttcctgctctccggcggtctggattcctcgctggtgtgctccattgccgccaagaagcttggcaagcccatccgcacctttgccattggcatggacaccgatgccattgatctgaaatatgcgcgccagaccgcagaatatctgggcagcgagcaccacgagatcatcatcaaccgggatatggtcatcaacagtctggaagaggtcatccgcctgctgggcacctgggacatcaccaccatccgcgccagcatgggcatgtacctgctgtgcaaggccatccacgagcagaccgatgtccgggtgctgctgaccggcgagatttccgatgagctgttcggctacaagtacaccgactacgcccccaccgccgatgccttccagcaggagagccagaagcgcatccgtgagctgtacatgtacgatgtgctgcgcgccgaccgctgcatctcctccaacagcatcgaggcccgcgtgccctttggtgatctggattttgtgcgttacgtcatggccatcgacccggaaaagaagctgaacagctacggcaagggcaagtatctgctgcgcaaggcctttgagggcgattggctgccgccggagatcctgtggcgcgaaaaggccgccttctcggatgctgtaggccacagcatggtggacgacatcaaggagtatgccgaaagcctttacaccgacgaggagttccagctgcgccgggcaaactattcggcccactgtatgccgttcaccaaggaaagcctgttttaccgcgaaatttttgagaagtactaccacgaccagagccgcaccatcgtgggcttctggatgcccaacaaggcatggccgaactgcaacgtcaacgacccctcggcccgtgtactggcaaactacggtgcttccggcgtgtaacgccagaccattttgaatgcgctccgctttgctttgcgcatgaatagcggaaagaatattctataatttgtagatcgggaaaatctgcggattttcccgatctactttttcacgagagggaaccctctccgtcatcactacgcggcaatgggagacgggacatctccagtcaaagccgcaaggacgaaaacggcttgtccttcgcaagcgtcctcgccctctccgtcacctgcggtgacacctctcccaaagggagaggctctggcgaagctggaaacttcgcagttgagctggaaaccttgccgccatgccgagggctctccctttgggagagctgccgagcggagcgaggctgagagggctagctcttcccccgctgcgccgccgcttccatagaaagcaggcgcggcagccgccccttgccgtccaagcttcatctgtgaaaatgcaatgccgggcggtccgcagaccgcccggcattgctctattaaaattatttttccgctattcttgcccaaagcgcacgcggcgggcattctaaaatgttgtgttacatccggatcttctgtgccgcgcgtgcaatggacgcaagcagagccaccagccgcttttcgtccatctggccgcagtagctggtgaaggtgtagtagcagccctgcacgcagaaggaaagcacgatcttacgcaccacatcggcatcaaacgaggggtcgctctccgagatgcatttgctcattgcagcttccacgcggttgatgaacagtccctgacgggagccggaaaacagaatgccgatctcggtctgattccgggtaaacgcccggaacatttcccgggtcagccactcggtgcgctcgcttacatcacgggcggtcagctgcggcaggctttccaccaccacctccaccatttcgtcctccatggcgttggccagcgcatagatatcctgataatgcgcataaaaggtggacttattgatgcaggccagatcgcacagttccttgaccttgatcttttccagcggtttctgcgcccgcagctccatgaatgcctgcttgatggcacgctccgttttttcaatgcgaatatccagaaaacccacctcttttgctttttcgttgattatccaaccattttcctgttttgcggatagacaaggccctcagccttttttatactgggtctatccccatccgcatcactccttgcggtacaggatgcctttttcttccagctcttttttgatgcgctcaaagctcccggcatccgggcagtgcagggtgtgcagatgcacgccgccggtcatgcggctcaaaagcgcttccggcgtgtccttggcctgctggatgaagttgtccacatcgtagcggctggcaaggttcaggttgccgcgcagctcgccatacaggctgttctccacggccacatccaccacgatgccgccctgatccaccacggtgtacagctcggtgcgcatctcgtcctcggtgctgtgcacgcaggccagaatggcggtatagcctttttccgccgggtgcagctgatagccccggggcgttgcatcgatctgcgcaccgcctgcccgcagcagagccacatcccccaccacgatctggcgcgagacccccagcaaagccgccagtgcgctggcactgaccggtgcttcggccccgctgagccgtttcagaatggattctctgcgctgcgctgcattcatggttttcaaagcttcctttccgctttacggtattatgctcttattgtagcaaaagacggcggatcatgcaagaatgcgtttacttttccagctgcaggatggtagcataattggagggcagctgcactttcatgcggccccactccatgctggtcaaaacgggctgtgcgcccaccgtgtcggccaacaggtcctttgcagaggatgcctccaccggcagctggaattccagctgtgcgggactgtcgccgttgttcagcaccacgacgcaggcctttccatccagcacccgggcaaaggcatagcactgggtggtgagctgcagctctttcacctcgccgtcggtcagctccggcagctccgccttcagtctgcccagtgcggcatacacgctggtgacagggttggtggtctcagcgtccttgaagtcggaaagttccaggcaggggcgcagcggccaatcgcttccccactcttttttgccttcaatgccaaattctgagccataatagatggacggaatgccccaaagcgtatatactagaattgcaatgtggcggatgtgctcccggttgcgcagcttgttgggcaggcgctccacatcgtggttgtccgagaacagatacagccgggtatcgtggcacaggccctgcagacggcgcatggtgtgggcgatctcgaaatagttgtggtcgttgtggccgctccacaggcccttgtgcagctcgtagttggtcaccgagtgcagcatctccgggtttgcccagcggctgtaatcgccgtggatcacctcgcccatgagccagaactctggctttaccttgttggcaaggcggcgcagaccgcgcataaagtcaaagtccagcacatcggctgcgtccagacggatgccgtcaatgtcaaattcatccacccagaagcggatggtatcgtagtggtagttctgcacctccgggttgcgctggttcagcttgaccagcagattgaagccgccccagtttccgtaggaaaagccgtcgttgtactcgttgttgccccagaaattcacatcgcagaaccagtccttatagcgggcgttctcgcggtttgccttcaggtcctgaaacgcaaagaaatcgcggcccacatggttgaacacgccgtccacgatcaccttctggccccgggcatggcagtctgccacaaagtcccggaactcctcattggtgccgatgcggcggtctaccagccggtaatcgatggtgtcgtagccatgggagccgctctcgaacagcgggccgatataaatggccgtgcagccaaggtccgctgcgtgcttcgcccatgcattcagtttattaaacgcgccgggcaccgcctgcccatcgttctcatgtgcgcagccgcacagccccagaggatagatgtgataaaataccgcgttgtcataccaagccattgttcataccgctcccatacaaaaaaatcagcctccgcccactgcggcggcaggaatagtatagcacagaatctgtaaaacatgttaatttttgctgatttttgtcaagaatctacaagaatatcagccactatgccccatttcgtcttgtttttattggatatattgcccaaacacctgtgtcacatgcagtgccgccgggcgctgcctatcatagaatgtaaggagatctttgcatgaattaccccgccattccccgtgaattcttcaatggagactgctttgatgcctaccgcatccttggtgcgcatccctgctccgacaacggcatcgaagggtggcgctttgcggtgtgggcccccggtgccacggcagtggaagtctgcggcggcttcgacggctgggaggcaggcgtgcccatggaaaaagccgataccggcgtgtggagcgcattcgtccccggccttgcagagggcgacctttataaataccgggtgcatggcgccgacggcagtgtggtgatgcgcagcgacccctacgcattttccaccgagctgcggccgggcacggccagccgtctggcaaagctggacttccactttgacgacagcgcatggatggagcgccgcgacaaatgccgcaaccgcccgctgaacatctacgagatgcatgttggcagctggcggcacaagcccggcagcaagcaggaggacggctcagacggctggtacaactatgaggagctggccaaggagctgatcccatggctgctggaccatcactttacccatgtggagctgctgccgctggccgaacatcccttcgatggcagctggggctaccagaccaccggctacttttccgttaccagccgctacggcacccccgcccagtttgccggcttcgtcaacgcctgccaccgcatgggcattggcgtcatcatggactttgtgccggtgcactttgccgccaacgccgacgctctggcaaagtttgacggcacctacctctacgagtacgacagcgatgtgggccacagcgagtggggcacctgcaacttcaactactaccgccgcgaggtgtgcagctttttgaacagcgctgccgccctgtggatggacgtataccactgtgacggtatccgtatggatgccatctcccgcgcgctgtactggcagggcgacccgaaccgcggcgtgaacgagggtgccgtgaactttctgcgcagcctgaaccacggcctgaacgagcgctggcccaccggcatctacatggcagaggactccaccaacttcctcaaggtgacagctcccacccgctacgacggcgtgggcttcgactacaagtgggatatgggctggatgcatgatacgctggactattttgctacccccttcggtgagcggccaaatgcctacggcaagatcgttttcagcatgcactacttctacaacgagctgtatctgctggcgctgagccacgacgaggtggtgcacggcaaaaagaccatcattgataagctgtggggcacctatgcggaaaaatgcgcccagctgcgcaccctctatttttatatgtacatgcacccgggcaagaagctgaacttcatgggcaacgaaatgggacacttccgggagtgggacgaaaaacgggagctggactgggacctgctgaaataccccttccacgatgcgttccagaagtactttgcccacctgtgccgggtgtattccactgagcctgcactctacgatggcgagtacaaccccgactgctttgagtgggtggcctgcgagagccgcagcgagggcgtgtacgcatggctgcgcaagggccggggcgaaaacctgctgtgcatcatgaacacgcaggaccacgcccacaaaaagttcccactgtatctgcgctttccctgcagtgccgaggaggtgctgaacaccgaatcccccgagtggggcggtgcactgaagggccgccgcaagacaaagcttcacaccaccgatggcggtgtgtttggtcgggactatacccttacagtagacctgcctgccatgggcagctgcctgctgcgccttgcgccggaggccccgaaccccgatgcggcccgcatcagcgccaacaaagccctgaacgcaaagcgccgcgctgcccgcagcacaaaggccgcagcaaattccaataagtaatattcgtttcaaaatgtcccgtctgcgttcaaagcggcgggacattttgttgttttccgtgcacagcggctggacagtgcagattttgcttgctatactgtagctgtgatattctgcagctgagaggtttttgggatgagtggaatcgtttcccgtctgtctgtccttggcaaggtctggctgggccttgctgccggggcactggcgcttattgtattcggccttgccgcaccgggcagcagcctgtttttcccgttgctgagcctgtggtgcaatgcagcgctgtttgcactggcgctgctggtgctgcgccgggccggtatagagctggacctgttccacaaggcggtgctggtgggcctgtgggcagcggccgtgctttacttttactggaccctcggcagccgcaccttcctctaccactgggactacgtaaactacattctaaagcagtatcatgccgaagccgcctttgcccaaagcacaggcgcaggcttccggtttctcctcgattccatcaccgaggactatacgaatttcatcaccctgttcaccgagttcccgttctgcctgagcggaaagaccggcgacgactacgcattctgtcaggtattcagcgtactgcccagcctgctggtgctgctggcgggcctgacggtcaaggtgggccggatgctacgggtaaagaaccggttctggtatttcctcatcggcttttcgtggtgcgctaccttcccgttcgtgcgcatgtcggcggtgctgggccagccggactggttcgggctgatttttgccttcatgcttatgctgctcacactggactaccgctttgacggcatcgacctgccccgctatctgctcatcttcgccgccacggcgggcatcatcctcacccggcgctggtacttatattttgtggtgggctactgctttgcctacgtactgatgctggcagtttccagcatccggctggcaaaagatggccagcccagccgcgctgtgcaccgcatggtacggctggtggtgttcggcctgtgtgcggccggggccatggtgctgctgcttctgcccatggtgcgcaaaattttaagctttgactacgccgggcgctactcttactacaacttcggcggcatcacgctggagctggccgcacagacgctgcgcatcggtttgctgaacttcatcctcatcggaatggggctgtggtttgccgcaaaacgccgtctgcctgccctgccctgccttgcaggggcagagctgctggtgagtcttgtgctgtttacccgggtacagaacaccggctcccaccagatgctgctgttcgtgccggggtggctgctgctgttcctcgttggttccgccgcactggccgacggcctgaaaaagcacaccgccgtcaagctctgctactggggctttaccatggtgtttgcggtgtccgtgcgctgctcgccgctgaccaccgttgctctgccgggctttgtggtggatcattttcccctcaaggccgtgtcggaattcgtccggctggacaagctcacctacgaccgcaccgatgccgcccagatccagcgcgtggacgactggatcgatgcccactgcgatgcggaaaagggcgagttcgcctacatgatcccccacgatatgctgtacaactcggacatgttccagtacgccgccctgccggacatccagctgcagggcaagctgtccgccggcatctccatcccgggcacccacgagttcccggtgcggttctttgaggcgaagtacgtgctcactgcagagccgctcccccagacctttgtcagcggtggcgagctttccggccggtggaatgccctcttctgcgccgcgcgggatgagcactttacgcaggccgccagctttgacatgggcaacggcaccgtgttcaccgtgtgggagcgcaccgagcctgccgaccgggctgaggtggaatattatctggatgccttcgcgcaggaggatgtcctctaccccgaaatgttctcgcaggtggcggaagcctggcttgccggacatggactttgaattgcaaacgctttggatataaaaggagtatttcccatggaacagaatgcgaacgccctgcccaaggtcacgctgggccaatacaaggggctggaattcacccgccgggtgcgcccggtatcggaaaaggccgtggagctggaggcggcgaacctcacccgcacccgcgccccctttgcaccggtggaaaagtccgccgcgcgcgggatgcgcgtcacgctggattttgagggcttcatggacggcgcacccatcccggaaagcaaaatggaaaatgtgaccgtggtgctgggcaccggtcagctgatgcccgccgccgaggatgctgtgtacggccacaaagcaggcgagagcttccggttcgattttacctatcccgccgagttccgggtgccggagctttccggcaagacggcgcaattcgccatcaccctgcacaccgtggagcaaaagcagcctgtaccgctggacgatgcctttgccaagacactgggctttgatacggtggatgccctgaaggagagcatccgcgagaaaaagcgccgctcccacgaggccaacgccgaccgaattgccggagccgccctgctgggcatggccggtgccaatctgacggcggagctggataacgccattctggaccagaatgccgaccatgacatgaacgccctgcgcgaacggctgcgccgcagcaaaatgaccatggagctgtactgcaaggcaggccagaccacaccggacgaggtgcgcgccgccttccgccgggatgccgagcgcaagatgcgcagcatccttgcggtgcaggccatagccaaggccgaacagatcaccgtgtccaacgcagaggtggatgccgagtacgtccgcctttccaagctgcacgataccccggaagccgagatccgcaatgtgctcagccgggacgctgtggcctctgccgtgaccactcagaaggtgcagcgtttcctgatcgaccacgcaaacatcacttcggttgtggaaaaggagtaaactatgggcttttttacacgcaccgcgatggatatgctgatgaaaactacccatcccgagatcaaccgccgccagtgctggaacctgcatccccatcgcaagccctgcaccgagtgcaaggatatctgcccctatggcgaacagatctttacccgcccgaaccttgtgaaggactgggacccctgtaccgagtgcggcctgtgtgtctctgcctgccgcagcggctgcatcatcccttcgccggagcaggtgcagcgggacacctctgccgccgataccgacaatgacaccatctggatcggctgcgaaaagtccacccgcaaaaattccatggtgcgcacctgcatctctgccctcacatgggagacactggcctaccttgccctgaacaaaaagatcgtgctggacctgaccccctgcggtgaatgtgagaacgacctgtgcgccgcccagctgcgcaaggagctgacaaggcttgtggatttctttggccagcccatgttcgaggcacggttcactctggcctacgagccggacgaagcgctctaccacgtaaaggagctgagccgccgcgaaatgtttgagcaggtgagccacggctccaaaagtggcaccaaaaagctgctgcagatgctgcccggcctgcacagcgaggacgacggcggtgtggatttccgccttttgctgcaccagcgcacaaagcagctgaaggcatccatggaaacgccgctgaagtacggctactacctgcccaactttaccgataaatgctttggctgcggcaagtgcgaaaaggcctgccgcgccggtgcgctgaagctggaggacctgcccgacggccagacccgcatcgtcatcacgccgtggaagtgcagcgagtgcgaggtgtgcgtggcctcctgctccaaccatggcatcaacggcatgaagctgcgccagctcaccacccttggcccggtaagtgtacacaaatgcaccaagaccctgtgcaaggaatgcggcaagcccattgcgccgggcagtgtggatggtgtgtgcaccgtgtgccgcatcaaggcccgcaccaaaaagcggcaggaagaagccgctgccaaggcaaagcagctgcgtgaggagcgcgaagccaaaaaggctgcagaggaagccgccaaggcagcagccgaagccggtgccgacgctgctgagacagctgtacagatggctgccgcccccgcagaaaccgctgcggccggttccgtgatcacagcactgaccccggaaaaagcagcccccgccgcgctggacgaaacccctgctgccgcaccggaaaacaccgcagaaaaggatgtgcccgacacaccgaaaaacgattgacggcgcacagattcaatgctatactgaccataagaccacgcaccgtggccaccgactgttacaaaggggtaacggagctatttccgttacccctttcttatcccaaagcacgaagcaagcttttgccaagatcttacgaaagaaggattttactatggctcattcaatctcccgccgccagttcctgcaaggcagcggcgcagccgccctttctgtagcagcggccggtctgctgagcagctgcggcggctcttccgcttccaatggcggcagcaccggcgctgccgccagcagctccacctataccgtgctgtactcccgccagcccgccaccctgaactatctggtctgctcagctgacccggacctttaccacggcactcagtgcatcgacacgctggtggagtacgacaaccgcggcaagatccgggagggccttgccactgcttgggaatgggatgccgacagcctgacatggaccttccacctgcgggatgagaactgggtggactgcaacggcgaggtgcttggccctgtgaccgcgcaggactttgtggatgcgctggcctatgtgctgaacccggactacgcttcctccactgcaagccttgtcaccccctatgtggccggtgcggacgactactataactactgcgtttaccgcaacaacgccaataacggcactgtggccgaggacggcaccacctacgccattgatgccaacggcaccgtgaccgccgctgccgccgacggcaccaccaccgaatacccggctgtggatttttccaccgtgggcgtgaaggctgtggacgaccacaccctgacctacacgttgaacttcgactttcccggcttcctcagcctgctgagctatgctccctacgagcctgcctacggcccgctgctggaggagtttgccgaccagttctgcaccagcgccgagaccgcctgcagctgcggcgcgttctatctggccgagtacactccgctggaaaactgggtgatgaagaagaaccccgaaaactacgatgccgacagcgtttacatcgacacggtgcgctacatctacaatcaggaagagctgatcagcggcccggagatggtcaagcgcggcgagatcgatcaggctaccatcagctccgacattctggacagctggctggccgacgacaccaccaaggacatggtttccatggagcgcccggaaaccggcaagagctacttctacatcttcaatttcctgccctaccgccatgaattttccaactggaccgtgaccggcgtggatgcccagtacgagccggacaattgggccaaggccatcaactccaccaacttccgcagggctttcctgtatgccatcaatccgtctgtgacgctggccgtcaccgcgccggaaggctacgataactacaagctgcacaccatcactccgccgtccttctgtgccaacagcaaaggcgtggattatactgagtgcggcggccttgcaaacctctccgacttctttgacgaagccaaggccaaagagtaccgtgatgccgccgtggaagagctgaccgccgccggtgtcacctttcctatcaagatccagtatccgtacaaccccgctgtggtggactgggacaagcagtgtcaggtgttcaagcagcaggtggaagctgtgctgaacgatggcttcgacttcatcagcatcatcatcacgcagggtccgtccgacaacttcctgaatgcggtgcgccgggtgggtgcctatcagctgatgtcctactactggggtgccgattactccgaccccgagaccgaggtgtaccccttctatcaggaagccggcgaccgcggcacctgctacagcttcctgcgcaccggcgtggaggacggcatcgtgaccggcgagaccgccgacctcgtgatgcagtacatgtccatggtggagaacgccaagaccatcaccgaggatctggatgcccggtacgaagcctttgcggatgccgaagccttcctcattgagaacgcactggtcatcccgctggggatgccggtgccgccctacattgccacccgcctgaacctgtgggagggccagtacgctcccacaggcctttccaccaaccgtctgaagggcgtgcacatcctcgaccattacgtttccatggaggagtataacgccaaccgggatgcgcggtaaaaactgaatcggaaactcccccagtctgctgcgcagacagccccctctgggatggggcctctggcgaaaccggaaactttcccgtcatgccaagggctccctccccgagggagctgactttgcgcagcaaaggctgagggagtttttgtttgctcctcatttttcccgcaaaaactcacaaatcactttccaaacgtaagattttgcgttattctatacttatctgtatttataaagaaaagagaggtgcacggctatggtgcaatatctcgcaaaacgcatcgggcgctccattctgaccctgttcgtcattgtgacgctggtgttctgcctgctgcggctcatgccggtggaaggctactttgcaaactacgaaaaaatgaccgaggcacagatccaggccgggctgcagtccatgggcctgctggacccgctgccggtgcagatcggccatttctggcgggatgcgctgcacggtgatctgggcgtgagccacatttacaagctcaacgctcccgtgaccaagatccttgcccagaagcttcccatttccatcgaaatgggtgtgctggccatgctgctgagccttgtgctgggcatcccgctgggccttgtcatgggccgttataagggtcgctggccggataagctgggcacggcattcatcgtgctcattcaggcggtacctgcggcagtatactttttgtatatccagatgtacggcaccaccgccatgggcgtgggcctgctgttcgatgccgccaactggcgctattgggtgctgccggtgtgcagcatgagccttgcaaaccttgcgttctacgccatgtggctgcgccgctatatggtggacgagagcaacaaggactacgtcaagctggcccgcgccaagggcgtgagcgagaacaatatcgccctgcaccacgtattccgcaacgccatggtgccgctggtgcagtacattccctccgcattcctgaacaccgtcgtcggctccatctacatcgaaagcctgtacagcatcccgggcatgggcggcctgctggtcacctgtgtgcagcgccacgacaacactatggtgcagggcatcgtgctgctgtacgcctgcgtgggcatcatcggcctgattttgggcgatgtgctcatggtactcattgatccccgcatcaactttggcaagaaagaaggtggacgctgatgctctcttttctgaaacgcgaaaaatcgaagcagctggaggaccagctgaatgctgctcaggcacagcgccgcaccggctgggaaaatctgccggaggatgagctgttcacccccgccgggttcagtgaggaacaggccgaagccaccgccagctccaactacagctactggggcagcaccttccgtgcctttttcaagaacaagttcgccgtggccctgctgatcgcgctggtggtcgtggttgcctttgccttcatccagccccacctgcccggtcaggcagacccgaacctgtgcgccgtggaccccgtgaccggcatccagtaccgcaacatcgcccccgggcaggacggctttatctggggttccaactccatcggtcaggacctgtgggcacgcatctgggccggtgcacgtaccagtctgactatcgccttcttcgtggccctcattgaagctgtggtgggcattaccgccggtgtgctgtggggctatgtgcgcgggctggactttgtgttcaccgagctgtacaacatcttcgataacattcccaccgccatcgtgctgatcctcatttcctacgtagccacccccagcatctggaccatggtccttggcatggccatcaagggctggatcgaaatggcacgcttcatccgcaaccagatcctcatcatccgcgaccgggattataatgtggcttcccgctgcctcggcacgcccaccacccgcatcgtgctgcgcaacctgctgccctacctcgtctcggtcatcatgctgcgcatggccctcaccatcccggaagccattggcaacgaggtgttcatcacctacatcggtctgggcctgtccgtggagaccccctcgctgggcaacctggtcaacgacggccgcaaggtgatgatgcaggccgggctgcgctaccagctgctgtatcccaccctcatcctgagctttgttaccattgcgttctatctgatcggcaacgccttctcggacgctgccgatccgaagaaccatctgcagtaaggaggggacatcatggaacacaaccagctcattctctccgcaaaagatgtcaacatccagttcaacctgcgtggaaaagtgctgcacgccatccgtggcatcgatcttgacctctatcagggcgaggtgcttgccatcgtaggcgagagcggctccggcaagagcgtttttaccaagagcttcatgggcctgctggatgccaacggctccattaccagcggcaccattgattactacggcatggcggacggcaagccgctgcgcctttctgacctcagaaccgaaaaggactggctgcgggtacgcggccgagagatcgccatggtcatgcaggaccccatgaccagcctgaatccgctgaagaccatcggggcacagatcatggaagccgttgccctgcatcagggcttaaagggtgctgccgccaaggaaaaaacgctggaatacctgcgggatgtgggcatctctgacccggaaaagcgctttaagcagtacccgcacgagttctccggcggcatgcgccagcgtgtggtcattgccattgcggtggcctgcaaccccaagatcctgatctgcgacgagcctaccaccgcactggacgtgaccattcaagcccagattttgcagcttttgaaggaaatgcggttcaagtacgatctgaccatcgtcatgatcacccacgatctgggcgttgtggcaaacattgcagaccgcgtggctgtgatgtacgcaggcgacattgtggagatcggcactgctgacgaaatttattacgatccccgccacccctacacatgggcactgctttccagtatgccccagatgggcgtgaagggcgaggacctgttcaacatcgtgggcacaccgccaaacttgtttgcggaaattcgcggcgatgcttttgcaccccgcaacccgcaggcgctgaagatcgattttgtcaagtgcccgccttactttaaggtaacgcccacccacaaggctaaaacatggctgcttgacccccgggcacccaagatcgagccgcctgctgcggtaaaaatgctgcgagaggaggggctgtaagatggaaaatgaacgcgagattcttgtggaagtgaaccacctgaacgtaacctacggctccggcaaaaaagcatatgaagctgtgcaggatgccaactttaaaatttataagggcgagaccttcggccttgtaggcgaaagcggcagcggcaaaactaccattggccgcgccatcctgcgcattctgcccacctccggcggcgagatcctttataagggccagaagatcaacggcagaatttcccgccagctggacaggcagatcatcaaagagatccagatgatctttcaggacccgcagtcctcgctgaacgagcgcgccaaggtgagctatatcgtgggcgaaggcctgcagaacgtccggcctgatctttccaccgcccagcaggaggaaaaggtgcgtcaggctctgctggacgtgggtctgctgccggaatttgcctcccgcttcccgcacgaattttccggcggacagcgccagcgcatcggcattgcccgggccctgatcgtggagccggagttcatcgttgccgatgagcccatcagcgcactggatatgtccatccgtgcacaggtgctgaacctgctgcgccgcctgcagaaggagcgcggcatcacctacctgttcatcgcccacgatctttccgtgatgcgctacatctccgaccgcatcgccgtcatccacaagggccgcatcgtggagctggccggggccgaagagttgacagcccacgccatccacccctatacccgcagcctgctttccgccattcccatgccggacccccgccgggagcggcagaaaaagctgctggtgtacgaccccgccatgcacgactactccagagaggccccccagtggcgcgaactgcggcctgagcattttgtactgtgcagcgctgccgaagccgagcagtggctgccgcgctgacccccgacatttcgggctgaatcgttgttttacggttcttttacgcaacattcatagtttatttcttgacattctccggcagctccactacaatagaatctgcatcattgattctgatttttgagttattagcgtgttctgaccggcggctttcatcttctttgcaaagttgtcggcttttggcaatgaaaagaagaagaaagaaaagaggactttattctatgactactgaacagcgtgaaccgctctatgcgtccactgcgaagccctggctgaagtactatgaccagaaatacatcgacatgcctcttcctaagtgcagcgcctttgagtatctctgccatcagaacaagaaccatctgagcgagaccgctctggagtattatggccgcaaattcacctttgcagacctctttgtgaatgtcaagaaaaccgctgccgccttccgtgctctcggcgtgaaaaagggcgacatcatcaccgttgtcagcgtgatgacccccgaggtgatctatgccttctacgctgtcgatatgatcggcgcaacgctgaatctggtggacccgcgctacagcgttgagggcatccacgagtacatcgaagaggtagattcccgcctgctgatctgcctgaatgtgacctatgagcgctgccacaaggcagaaaagcgcaccaatgtggagcgcgttctggtcatcagccccgcagactctctgccgctgcatctggccgtcggctacaagctgaccaaccccgataagaaccgctacaagtccaatgtgatccactggaaggactttattgcacagggcaaggatcagagcatgaacgccgaaccctacgacccgcagcacgcctgcgtggtggtgcacaccggcggcaccaccggttcacccaagggcgttatgctgaccgacgactgctttaactctctggcccacgaattcatcgcccagagcaacctgttctgccgcggccagaagctgatgaacgtcatgcctccgttcattgcctacggctatgcctgcggcgtgcacatgccgctggtcatgggcctgcacgtcgttatcatccccaatctggaccccgacaagctgggcgcactgatctggaagcacaagcccgagcacatgttcggcgttccggcccactaccagcagatggcagcttctccgctgctcaagaagaagaaggatctctccttcatccgcaactatgccgccggcggcgactcgctgccgctgggcgctgagttgactgtgaacgagttcctgaaggcgcacaacgtggaatatccgctggccaagggctacggcatgaccgaggtcgcctctgccgctaccgttgccgccggcaacgtgaccaagcccggcagcgtgggtattcccatgctgaacacggtggtgtccatttttgagcctggcaccgagaccgaactgcccatcggtgagcgcggcgagatctgcatctgcacccccaccgtcatgaagggctactacaataagcctgaggagaccgacatgatcctgcgccgccatgcagacggccagatctgggcacacaccggcgatgtcggctacatggacgaggacggctttgtgtatctggattcccgcatcaagcgcatgatcatccgtcacgatggcttcaaggtgttcccgtccatgatcgagaacgtcatcagccgccacccggccgtgcatcaatgctcggtggtgggctgcaccgataaggaccatgtgcagggccgcctgccctttgtctacgtggtgctggacccggaaggcgacaagaaaaagcgccagatcgtgcgggaactgcgccagctgtgcaatgaagagctgccggagtatgtgcagccggtgggctacaagttcatctccgaaatgccctttacccctgttggcaaggtggactaccgcaagctggaagaagagatcactccccgcgattactgatcctgaacttcaccctgtaatttttcagacactgagctctcccgaaagggagagcttttttgtatggaagaaactgcagaatacggacgcagcgatggccgcaattttttgaattttgtcagttgacaatttttactttccattttatcatagagacaacagctgtgccgcacaggtgcagtcattccagaaaggaggaattacaatgaaaaacaaaaagtttgccagctttctggccgcagcggcagcgcttgtgctgctggccatgcctgcatttgctgccgacgaacagacggagctgcctgccgccgaagcagcagaggtgcagcaggagcagaccgcagcgcctgccgagcaggagaccgccctgcccgccgatgcccagacagccggcgaaccggagcagcagctcacctatgtggcgctgggcgacagcatcacctccggtgtcggccttgccgatatgaaatacaacatcgcccagatcggctacgatctgcagccgaactttgagggctacccttcccaatgctacaccgcccttgtgggcaagggccttgggctggaccgccagcacgcgatcaatctgggcctgcccggcctgatgagccctgacatgctggatatggtgcagaacagcgccatgcccaagatgaatcaggcttccggcgcatattacgtctacccggaatatcaggagtatctgcgcaaggccgatatcatttccatccagatcggctccaacgacgcgctggtgccctgcatcgtgggtctgggcgaggccaccaactggaagagcgagcagcttgccgcactgatggtcagcggtgccctgcgtgatttcaacttccagaagctggggctcttcctcgaagcgctgaaccgtatgacccttacctttgacgagagccgcgccaccaaccgcctgctgttccgcggcatggatgagatctgcgatcaggcctataccaatgtgaccgccagcctgccgcagatcgtggccagtatccgtgcactgaacccggatgccaaaatcgtgctgctgggctacaccaatcccgtgccgctgctgcccgcatggaacagctatttcagcaaattgaaccgctttgccaaagaccttgccgcacaggaaggcttgatctatgttgccattccccgtgcgcagaccgctgccgacggccaccccaccgttaagggccaccagtacattgcaaaccagattttgaatgctctgaagtgagctttccatcaaaaaagcctgtctcattttacgagacaggctttttttgtttgcgctgttctgttttcagctcagccggccgctttccaccgaaaagctgatatctgccgcagccatggtagacttgcggtgggagaccaacagcaccgttttgtctttgcactctgcccgcacagccttgaggatcacgccctcattcaggctgtccagattggaggtaggctcgtccagcagcaggaagggtgcatcatgcaggaaggcacgcgccacaccgatgcgctggcgctcgccgccggaaagtgcaccgcccagctcacccaccggggtatcatagcccttgggcaggctgtggataaagccgtccagtgcagcctttttgcaggctgcttccacctcttcccgggtggcatcccgctttgcaatgcggatgttgttctcaatggtatcgtcgaacagctcggtctcctgcgtcacaaggctttcctgttcgcgcagggcggcggtgttcacgcggcggatatcctctgcgccaaagcggatgctgccgctggatacatcccagaagcgcatcagcagccgcaggaaggtagactttccgctgccggagcggccggtgatgcccacgatcttcttttccggaacggtcaggctcaggtcatgcagcacctcctcattggcataggcaaagttcacatgctctgccgcagcacctgcaaatgcggtgtctgtgccgtcggtcacatcggcggtgacgggctgttcgtccagcaggtccagcacgcggtctgcgctggcgaacacctgcgtcaggctggcaccaaggtttgccagcgccaccaccgggccaaaggagctgagggccgaaagggtgcacaccagtacgccctccacgcccattttaccgctctggtaaaggttcaggctcacacccagcacggccagcaccgtgagcaggatcaaggtgttcgtgatggccacggtcaggccctcgcggtatttcatcgccttctgcttttcacccagcatctcactgtgggccgtgatgccatcggcgcgggctgcggtgtcctgatactgcagggtatccttcaggccgcgcaggctttccagcacatagctgttggtatcggccagtgcctgacggtactcccgggcggcacggtcgccgcgctttgcgctccacaccggcagggccacgcccaccagcagatagcccgccagcagcaccagcgcaggcaggatgtgccagctgcccacaaagcccgtcatgccgatgacgcagatgcacgcgatgcagatgggcgaaatggtgtgggcatagaacacctccagcgcttcgatatcggcggtgatgagcgagatcaggtcgccgcggtcacggccttccagctttgcaggggtcagacggcgcaaggcaccgaacaccttatcgcggatcagggccagcagcttgaaggcgatatagtgattggatgcctgctctgcgtaacgcagaacgccgcgcagcagggcaaacaccagaatgcaggcaaaggccgtgcccacggtcctcaccgggcttgcaagccccagcgcacgcaggatgccaaagccgccgaagatggtaatgaaggtggcgcagaagtggcctgccacccccatcacgatcgctgccagcataacgggcagcatgggctttaccagtacgatcagccgtcccacaatggcaaaggggctgcgatgattgctcttgttcatgctcaggcatcctcctcttccagtgtttccagctgccgctgtgccagatacaggcggctataagccccctgctgggccagcagttcggcgtgggtgccctgctccatcacccggccattgctcattgcatagatgcagtcgctgtgcaccacgtttgccagacggtgggagatcaggatgatcgtcttttttccggcaaggctgtggatggcctgcatgatatcgttctcgctttcggcatccacattggaagtggcctcgtcgaagaggtagatgggcgtatcgtgcagcagggcgcgggccatggcaaggcgctggcgctggccgccggaaagattgctgccgccctcatgcagagcggtctgcaggccgttctggctgcggcagaaatcggccagattcacctgttccaatgccgcccagagctgtgtctcgtccgcgtccggctttgccatgcgcaggttgctctccaccgtacccttgaagatggcggcgttgtggggcaccagcgtcagggtgcgcagacgctgttcctgctgcagctcctgcaccggcacgccgcccagcgtcacgctgccggtatagccggtgcggctgccggacagcagcgccgcaatggtgcttttgccgcagccactctcacccaccagcgagacaaagctgccctgcggaatggtaaaggagacatcgttcaggatggtgcggtccttctcgtagccaaaggtgacatgctcaagcttcagagtcgtattctctccgggcacgcggtcaccatcggcaggctcttccgctgccagaagcttgaagatcttctctgccgaagcggcaccgttcatggcaatgtggaagtagctgcccagcaaccgcagcggcaggaaaaagtccgccgccagcagcacgatggtcaatgtggcggtcagggtcagccggccttccgcaaatgcagccaccgcgctgatgatgccaaggcccgcaccgccgtaagccatcaggtccatcagtgtcaccgagttcagctgcatggtgagcaccttcatggtgatcctgcggaagcgctcggcctgcgcattcatctgctcgtgcttccagccgtcggcctgataaattttcagggtggtcaggccctgaatgttctcaaggaagctgtcgccaagggtggtgtattcgccccagtagtttgccagcagctttttggcaaacttctgcactgccacaatggacatggggatcagcggcacgcagcacagcaggatgatggccgaccgtgcgtgcacgcccaccagcagcacaaacagggtaacgggtgccagcaggctgtaaaacagctgcggcaggtattttgcaaagtaggtgtcgatctgctccacaccttcgctggccagcatcaccacctcgctggtggccgccgtctcggtgtagttggggccaaggcgggcaagctttgcgtagatgctgctgcgcagggtgcgcttgacatccttggaagcctgatcgctcatggccgatgccagcatggtaaaggcaaagcgcatgggcaccgtggcaaggcagagcacaaggttctgccacagctgtgcactggtcaggctgcccgcaaaggctgcgcccaccagctgggcaatggcccgcacaaagatcacgttgcacagcatccccagccattggaaagccacattggctcccacataccgcagcgcaccgcggtcaaaggacagcaattttttgttgatcactgggctttctccgtttctgctttttctgcatcactgccaaacagacgctcatattcgccggtaaagatgcgctccggcagtgcactggtcatggcaagggcagcggtaaagcgctcttcttcgctcagcggctcaccgaccggcgggaaatgggtcaggatcgttttcagctcccgatccacctgttttgccacccagatgccccggtctgtcatatagatcttgccgtagtgctcctttacgatcatgccgcgctccatgagcagattcatgatacgcaccaccgagggcttggtcacgccaagcttttcggcaatgctgcgggagctgatatccagatgggtctgtgagacttcgtagatcgccagcagatagcgcagatgcgccgacgtaagttccatcccgatcactctctttcgttttgatgttactcaaggctaacttttttcttttaaaaaaagggcgcgagccgaaacttccagcccgcgccctttgcggatcatttcaatgctcagtgacagccgctgcaaccgctgcagctgccattgcagccgccttcgccgcagccgctgcacccactgcagccgccgccatgcttgtgggagtgccatgtgatccagcccacaccgccaaacacgatagcacccacgatgatcgtcggcaaattaaagttcgcggcgagaaattccatcatacaaaacacaccctttccgtgcaaagcgttcttttagatcttggagatgtcgattttgacctcgttgtcaccagcatacttgttgggacggaccagcaggtagatgaagccgaccagaaccacagcagccacgatggtgaagaagttgaagccgacctcaccagtgatgatgccgcccagctggtacacgaccaaagcagagcagtaagccagagcgcacatatagccaatggcgatggccgtccacttgccgttgttcatctcgcgcttgatggcgcccatagcagcaaagcagggagcgcacagcaggttgaagatcatgaaggcgtaagccgacagagcggtgtagtcctgcgcaacagcagcccagatctcatcgccgttctcagacagctcgccgccgaagtgatacagaacaccgaaggtaccaaccacgttctcctttgcgatcaggccggagacggaagcgacagttgcacgccagttgccgaagcccagaggtgcaaagatccatgcgaccttggtagcgatcgcagccagcacggagttgtcctgatcctcgaccatgccgaagacaccgttctcgaagccgaagccctgcaggaaccacagcacaacggtagcggccagaatgacggagcctgcgcgcttgatgaaggaccagccgcgctcccaggttgcacggaacacgttgccccatgcaggcacatggtatgcgggcagctccatcacgaagggagcgggatcacctgcgaagagcttggtcttcttcaggatcacgccggagcagatgatggcagccatgccgatgaagtaagcggaaacagccacgatggaagaaccgccgaacatcgcacctgcgatgaggccgatgatgggcatttttgcgccgcaggggatgaagcaggtggtcatgatggtcatgcggcggtcacgctcgttctcgatggtacgggaagccataacaccgggcacgccgcagccggtaccgaccagcacggggatgaagcttttaccggacaggccgaacttgcggaagatacggtccatgatgaaggcgacacgggacatatagcccacatcctccagaatggacagcaggaaaaacagcaccagcatctggggaacgaagcccagaactgcgccgacaccggcaacgatgccgtccatgatcaggccgtacagccagcctgccacgccgatgctctccagcaagccgcccagagcacccggcacgatctcaccgaacaggacatcgttggtccagtcggtggcaaaggtaccaatggcccagccgccgtctgcaatggaggtgcccatggacagggagtacatcaggaacatgaccagtgcgaagatgggcagagccagaatacggttggtcacgatctggtcgatcttatcggaaacagtcaggtgctccacgcgggcctttttcttaacagctttgcccacgacggtgttgatatatgcatagcgctggttggtgatgatgctctcagcgtcatcgtccatctcagcttcgcagtccttgatgtgctggtcgatgtggtcggtcaggctcttgtcgagcttcagctcgtccatgaccttctcgtcgcgctcgaacagcttgacggcataccagcgcaggaagcggtcatccaccttgccctgaatggactcttcgatgtgggcaatggcgtgctccacgctgccggtgaacacatggggcagctcagcagccttggtagcctttgcagcagccacagcagcctttgcagcagcctcggtgccctcgcccttcagtgcgctgatctccaccgcctgacagcccagctctgcgctcagcttcttcaggtcgatcttatcaccgttcttgcgcaccagatcgatcatgttcacagccatgaccaccgggatgcccagctcgatcagctgggtggtcaggtacaggttacgctcaatgttggtaccatcgatgatgttcaggatagcatcgggcttctccttgaccagataagtacgggaaaccacttcttccagcgtgtacggagacagcgagtagatgccgggcaggtcctgaatgataacatccttatcgcccttcagcttgccttccttcttttccaccgtaacgccgggccagttgccgacatactggttggagccggtcagattgttgaacagggtcgttttaccgcagttcgggttgccggcaagtgcaattttaatgctcattgcttaatccttcctccctttgggatcagactacttcgatcatttcagcatcggccttgcgcacgctcagctcgtagttgcgcacggtcagctccatggggtcgcccagaggtgccaccttacggacatagatctcaacacccttggtaatgcccatgtccatgatgcggcgcttgaccgggccttcaccgtgcagctttgccacagtagcagtctcgccgacctttacgtctttcagagttttcatacttaaccatcctcctctgcttgtctttatagagagactattccagtttcggagcagctcccaaacagcgccggggcactgttcagccaatcatgatacggtttgccatggtcttgtccagcgcgatgcggctctccttgacctgaatgatcaggttgcctgcgatctcgttgacgaccgttacctcactgtccaccacaaaacccagctctgccagatgcagccggatctcgtccttgccggtgatctttttgatggtgacggtctcccctgcttttgccattgtcaaaggcatcatacttccgcttcccttcctgtttgaatctgggatatcgctgcggttagtcagccgcaactatcaacgtggatagtttacgctcactaaccttttatgtcaatagttttttcacaattaaaagttagttcatatgaacaaacaatttttctgcccgattttttccgttttttcaccacaatcaacaacaactaactcaaattattgaatcaaagttagccattgtttacattttcttgttcttttttggcggcatcttgtaaactatcacaaagctttttctctgctctgctgtgctcttttgcagcaaatgacacagccgcgcggtacagtggtcagtctgcaccgcgcggccgcgtgtcaaaaggaggatttctttcctgccagtgcgtggacaccagcaggtgccaggataaaaagagagtatttgaaaagagaatgacaaattttaagccgccacggcaaggcggagaatgggtgttccgctgtggaacagccgcagatagactgctgtacacttgctcagctggtcaaaatgcttctgcgctgcatccgggtcgccgtaggacttccagcagccgcagcaggtaaagttcttgccacggttctcgataaagcccacaacatcgcccagcggatagccgaggaacaccccgatctcatgcggaaattctgccgaacagcacagcttgcgggaaagctgagtgagcatattgcccacatccggtgcttcgcccgcttccggcaggcggtagccctcctgccgcagaaagctctgcaccttttcatctgccagcacggcagccagcctgctttcgcggtagacatacacaagataccggtggttgagcacgcagcccttgagcacccgcacacgcaggcccttggggttcagctgagtgttccagtttttcacccggcgcgcaaggtcggcgcagtcgcgggtctcatagcggaacaggcctgccggtttcaggcttgccagcaccggggcacactgttcgatcatgaccgtttcaaaattgcgctccatgtctgcgccctcccgccttgtttctccgggctattgttccccggatgcgccgtggttataagttagatatttctaaccccgattccaaaaaagaagcagctttgcgcggagcattcaaggcttcggcctgccgatctgtttcttgtggttagttatttctaacgtgactgtatcttaccacagcggtgggccgttgtcaacacttttcttgaaaaaagttattcgtgacgaaccgcagttttctccacctcgctttttgtgcattctaccgttttggcgcaggctgtggtataataaggaaaaccctctcaggcgctaacgcgccagctcccccgaagggggagctctttatagagtcagcgcattcaaaagctctccccttcgggagagctggcattgcgcagcaatgactgagagggttctatcttataaaaggagcacgcatccatgccacagaacattgcatcgccgggcctgatctcccttcttgccgccgcactggcacagcagcccacaaagccgctggtgctggcgctggatggccgctgcggcagcggcaagaccacccttgcaaatacgctggcccggcagttcccggccagcatcaccctgcacaccgatgatttttacctgccgcctgcacagcgcatccgcggctgggagaaaacgccctgcgccaatatggaccttgcccgcctgcgggacgaagccctgcgcccagcctacgagggccagccggtgcagtaccgtgcctattcctgccgcgagggtgcgtacctgcccgcgcgggagctggccgcgcagccgctggtgattttggagggcagctacagccaccacccgctgctgaccggttacgaaacgctgcgggtgttcctgacctgcgcaaaagaagagcagacccaccgcctgcaggcgcgggagggggagcgatatgccaattttgccgcccggtgggtaccgctggaggagggctattttgcccagtaccacattgcggagacggcggattttgtggtagacaccacccaaagcgggacgatttgaaatggcttccgcgccgccggcaagaccaaggtgccatatagcaaagcggaagaac

SEQ ID NO: 1151 - DNA, 44553 bp, Unknown
  gut microbiota DNA sequence
gtgtcaatagcacgccagacggcgttcatggtgagatcgttaaacgtccagtcgccgtcgcacagatagcatgcggagctgttgttacactgccagttataggtgccgccgttaagctctgcggtgcccgtgaagctgtcttcggcatagaagcagcggctgaaggcgaggcccccctctgccgtcttgatggtctgccccacagcgttgacggtcacgctcttggcgttgcggactgtaataaagttcgcatagtcgtctttattcccaccctttttattaaaggtcgtttctccggtgacgttgatgaccacatcgtcgttctcagcgtcgatcacgatcccgtccgcataggtaccgctcatggaataaaccttgctgccgccatgctcttcaatgaactccttgttgatgatgtcgccgccggtcaggggacaggccgctgccgcctctccggagggctctgcaggcgcatcggaattttcctgtgcgctcacagtgccttcaaattctgtacttccctccagagcaaatgcgctcacgggaaggacagaggtcatcatgcagcctgcaagtaccgcactgatgagccgtgtgccaaacttcttcataaagataactcctctctcgtttttttcgtgcatgcaggcttttttcgcctgcccgcacgttttaaacatttaaagtatagcatttctgcagcaaggcgcaatcttcattctgtacgaaccttttggacccccccgttttttcgtgcgttctgtaaaaaaatggaagagagaatgctttcgcagccgcagaaaaaacagcccggaacgatctgtgggtcgttccgggctgctgtgtcaaaaatggtttggagcgtcagagcttcagcagagctttcttcacattcaaaaggttctgcgggctcaccgagaagctgcgcaggcccagctgcaaatactgcaccgtgttggccgggttgcccaccgcaaggccgcagatggtcaccggcacattgcgcacctttgcggcatccagcaccatagtgatgagctttttcatggccttgctggccgggcggtagtagtgctccgcgctggcaagctcccggtcggcggcgtgggtatactgggtcaggtcgttggtgccgaccacaagaaaatcgaccccgtgctctacaaattcctcagcggtcaggcaggcagcgggtacgctgagcatcacgccgaactttgtatcttcgttgaacgccacgccgcgctcccgcaggtgttcgcggcagcgctccaccacacgcatggctgcgtcccagtcctccacattcgtcaccatggggaacatcacccgcagcgggccgcgggccgctgcgcgcagcagcgcacagagctgcgtctcgaactggtggggctggcgcagactgttgcggatgccccgcaggccaagcttggaagactgcaggccctgataggcgtcggaaatggtgcggtctgagccaaagtcgaaggtgcgcaccgttaccgggcagcccttggcggcagcaagacaggagcagtagaagaaatactgttcctgctcatcgaggatgcggcccggcagcatcatgtagccggtgcgcagcaggcccacgccctgtgcgccggactgcatggccgtgtcgatgtcctccggcccaaagcagttggccagcagctcaaaggcctggccgtcctttgtcctgctgggcagagcatgcagctgccccatctcttcgttctcgcgctgcagctcgcagatgcgggtctcggcctgctggcgggcggcagcgtccgggtccagcgtgcactggcccccggtggcgtccagaatcacggtgcggccgtcgcagtcgtccagaaaatcccggcccacctgcacgatgcccgggatattcattgcccgggcaatgatggccgcgtggctctggccgctgccctctgccgtgatgatgcctaaaatcatgccggagggcacgctgaacaggtcggtgggcatcagccgctctgcggcaaggatcaccgggtgatccagcgccagccacatgcgggggcggttggtgatgatgttgatgacccggcggcttgcgtcgaggatatccacgctgcgcagctgcatgtaagggttgtccttcatgttggccagctggtcggcgtagcgctggcccacctgattcatggccgctgccgcgccaatgcctgcattgatgcagaagcgcacctcgttcatcatgccctcgtcgtccagcatcatgctctggaactggaagatggcctgctcgctgggcgcagcgcggtctgccatggattccagctcgtcctgcgccgtgcggatggcatcggtgagcagctgcagttcccgggacggtttaaaggggcccacggtcgtggtctccacatggtgctccagacggctcacctgccccagcacaaggccgggagaagcgcaggaacctttatacactttcatgttcggtcacctccggcaaaagctcggcttccggcgtggtcagggtgcgccagaccagcgcctgcaaaaaggtattgggcagcagcgcggccagtgcggcccgcgccgcatcggcactgccctcaaacagcggtgcaaagctctgcatccgtgcctgatcgcactttgcaaggaatgcatcgcacaaagtatgggtggtgtagtaatgggccgggtccacaccggcatcttccgcggcggcttccagcggggcaaggtcggcatccttcatcttggccagcagcagggccgcatccgccgtcagggtgaccgggtatttctcccgcacggccttttgcacccgctcaaattttgcgtggaacgcagcagcgtccgcgcagctctgggcatcacaggagacagcataggcacacccccgcagatatcccatagcgcggcgggtatcatagtagcccagctcgatgttgcggcgggcggtgtcggggtcaaagtgcaggatatcgcccagctcccagtagctgcgcaccatcacggtgggcaggccggtgaggttggggcgggtgatgcccacgccttccagatcgacgcacaccagttcatccgcgcccatgcgtttggcaaggccggtgggcatgttgtcgctgtagccgccatccagaaacttgaccccgtcgatctcccgcgcacgcagcgccgggaagcaggcagcggaggccatcaggtagtccttgacctttcctgccgggatctcgtccagcgtcagctcccgaggctttaagccccgctgctccaccgtgacaaggccgaagcggatgggagccgcgcgcagggcatcctcgtccagcacccgctccacgatctcttccagcggggtcacatccatgccgccggctttcaccacgctgcgcaggaactggtgcagggccgaaaggtcggcatcctcctccggcagctccatcacatccttgctgcggatggccagccacatatcgcgggccgtctcgtactggtccagcacgaacatggcaccgttcaggctgccaacgctggtgccggtaatgatctgcgggtgccagtccagctccatcagcgcgcgccacacacccacctgatagctgcccctggctccgccgcccgccagcaccagagctttgcacggagcactgcgttcatccattgcctccgcctcctttgattggttccggttttgttcagattatagcatatttccagagaaatttcttccgttttttgtaaattgatgcctttctcccggcaaagaaacatggtatacttgtcaggatttcaaaaggaggcattctcatgcactgcaagcaatggatctttgatatggacggcaccctgaccgacagcatgaccgtggtgtgggagggtgcccccgacgcactgctgcgccgctatggccgcaccccgcggggggatctgcgcgccacactgctgaacatgggaatgcaggagggcgcacagtatctgatccgggagtacggcctgccgctgaccgaggaaagctatttttccgtgatgcgcgaggtgatcgccgaattgtacgagaccgtggagctgaaacccggcgtgcgcacgatgctggcaaagctgcaggccgagggcgcacgcatgtgcatctgctccaacacctgggccgaacagtgccgcaccgtgcttacccggctgggcatcgcgcagtatttctccttcatcgtggaagcgcagggcgtgctgcacaaaagccgcccagaggtgttctttgagtgcatgagccgtctgggcggtgcagaccccgccgcctgtgccgtgtgcgaggatgccgtatacgccgccgccaccgcccacaaggccgggtattacgtcattggcatcgcagaccgcacctctgccgccgacgagccggagatgcgccgcatctgcagccagttcgtgccccggtgggatatgctggactggacacgtgtgtaagaaaaaagggccgcagcgtgcggttcttttctttatctgatccttctttgctcttgcattttgtgcgcaagaagagtatgatattataaataggactgccccaagggggaagtgtcctcatttgtgagaatacactctgtgatttttaatataaaggtataatatccgtaaagaggagaccttccgtcatgaacaacccactcgtcagcattatcgtgcctgtgtacaacgtgcagaatagtgttgcccgctgtctggagagcatttgtgcccagacatggaagaatatcgaggtcattctggtcaacgacgggtcccgggacgaaagcttttccatctgtgagcaattccgtgaaaaggacccccgcatcgttctggtggacaaatccaattccggtgtgtcggagacccgcaactgcggcatgtcccttgcaaggggcaagtatgtgcagtttgtggacagcgacgattatctcgaccctgattttactgagcggctggtgactgccgccgaagcgaacaacgctgatctggtcattgcaccttactggatggtgattcccgccaactcttccaaggccacgcaggcactggaaaacctgcaggagaaccttggcatcgataccgagaaaaagcctgatgatatccgtgaatacggcttcctgcccgagggcatctacgaccgcgatacctttgccctgcgcctgatggagaagcccgcatccttcttctacagcgtgctgtggaacaagctctaccgccgggatattctggcagaccatcatcttcagttcaccagcgaggtgcgctgggccgaagacctggttttcaacctggaatacattttgtacgccaatgttttcgtatccatttccaaagcgggctaccactatgtgcagaacccccagagcatctgccacacccagatcaatctggcttccatcgtgcagaacaaactgcaggtgttccgctattacaaggagctgtacacaaagctgggcctgtacgatcaggtgcagccgcagctgtataaattcctgaccgcgttctccgagaacgcctatccctccggttctccccagaagatcatcatggacatggccaaccgctggggctttggtgttctggatgcttccgacaaggaaaagaaacacaaaaccgaacctgatgcctgatctccgggcacgaaaaaaagagccgtgaaagcggctcttttttgtttgccattttaccggtcgatccagctgcggaaggcttcgcgcactgcaccctcccgtccgcgcgggatggggatgcgcgcaccgctgcacatctgcagctcacccgccgtcagcagctgtgccgccgccagattgaccacataggagcggtgcggctgcaaaaaacgcccgtcttccagcagcggctttgctacctcggcaaaggacacccgcagcgaaagggacaccacatcctcgccgctgagcagatggaagtgaaccacatggtgggtgcactccagatattcgatctgcgcataggccagcgcccgcaagccttcggcggtgacaacggtcattgccgggccgtactccggctcggtggcgcgggcaagcagggccgaaagctcctgctggtgcaccggcagaagcagatactgcatggcatccacccggaaagcgctgtaggcgtgggccggtgtgcgggccgcaaaggccagcggagccctgcggccccggcggcgcagctccgcagccgccgaaagccctgccggggccgctacagcgcccagctcgatgagatacaagtcaaaccgttctccctcggtgtcccggcgcagcagcgcatctgcatccggcagctgctgcacgatgcacgcatcctgccgccgggcaaaatattccatgcactggcgttccagcccgctgcgcaaggccgcatccgggctgcataccgcaatgtgaaataccatctcacattctcctttccgccagccgcccgccttgatttttgcgcagggctggagtatgataaataaaactttgctgcatcgaaaaaagaaaaaacggagggacccgccatgccgcagccgcttgtcagcgttattgtgcccgcctataacgcggcgggcttcatctcccgctgtgtggagagcatcacatcccagagctacccggagcttgagattcttctgctgaacgacggctccaccgacgacacccttgctgtctgccggaagcttgctgccgccgacagccgcatccgtgtggtggacaagcccaacaccggcgcagcagacacccgcagctgcggccttgcccttgcccacggcgaatacatccagtttgcggacagcgacgatcacctgctgccgggctgcaccgcaaacctggtggctgctatgcagcgcagccatgccgaccttgtgctagctccctaccggatgatggtgccccgcaaggatggcggctatgacacccgggagtacagcctgctgcccgccggggtgtacaacaaggtggattacctgtggcagctcaccggcaatgccgctgccttttactacggcgtgctctggaacaagctctaccgccgggatctcatccagatggcgcacatccggttcgagcatgtggtatacgccgaggaccagctgttcaacacccggtatctgcaggtggcacagcggtttgccgccatcgacgaagccgcctactgctacatccagaacccgcagagcgtatgccatacgcaggtgagcgcggcggacatgctgcgccaccgcagccggatgtaccacacctacaaggaactgtgcatccagctgggcgtgtacgataaattccgcctgcggctgcacggcatctatctgagcctgtttgaaagccctctgcccaacggcccggtgcagaagctttccgacgcatttgcccgcacccacagccgcatctgagaaaaggagaacctatggaattttcccttgtaagcatcatcgtgcccatgtacaacactgccgggtgcattgcccgctgtgtcaaaagcatctgcgcccagacttataaaagcattgagatcctgctgctgaacgatggctccaccgacgacacccttgccgtttgccgcgcccttgccgccagcgaccaccgcattgcactggtggataaaaccaacaccggcgcagcggacacccgcaatcagggcattgcgctggcccacggcaaatacatccagtttgtggacagcgacgactggctggcccccgattttacggaaaagctggtctccgccgccgaggcccacaccgccgatcttgtgatcgcgcccttctggatggtgtacccggaaaactatgtggagcacatccgcccatgggaaaaggcgctgcagcatgtgctccagcgcaatccgccccgcacccgggcctatggctatctgcctgccggggtatacaccggacaggagtacgcaaagcatctgatccagaagccgaacaccttctactatggcagcccctgcaacaagctctaccgccgtgacctcctgcggaagcacagccttcatttccgcaaagaattgtttgcggaggatcagctgttcaacaccgaatatctgcgctatgtgcgcaccgccgtttccatcccggacatcggctattactacctgcagaacggccagagcgtctcccactccagagtgaccaccgccgacatcctttcgctgcggcggcgggtgatgctcctgtaccgggacatctacaccgaacttggcatctacccggagacccgggccgccattctgcgttcgccctttggcgaaaacgagttcactcttccgccgctggacaccccacagacgcactgctgcaagctgtgaccctataaaaagcacccggctgccgccgagaaccgctctggctcctgcacggctccgggtgttttttgcgctttctcagcagccgatggcggcacacttctccgccagccagctgcgctcttcgtcgttcaggtgcggtgccagctttgcaaacacctgacggtggtaatcgttcagccatgcgatctcgtccttatccagcacaccgggcaggatgggagaggtggcaatgggcacgaacatcagcggttcaaaaccaaggaaggtaccgtactggttatcggccttgtgcacgcacaccagctcgttctcgatgcggatgcccacgaggtcagtctcgtaaacgcccggctcgtcggtgaccaccatgccgggacgcatccgggtggtgttgcggctgttcagggcatgggggccctcgtgcacattgcccacaaagctgacgctgtgaccggtgccgcagcggtagttgatgaggtgccgccacagcggttcccgggcaatggtgtcgatcatcttacactcgcagtaatccagccagacggccttggcaaggtcgatgtggctctgcagagtccatgtgtagaagcgcttttcgtcctcgctcagcgggccaagcgggtaggtgcgggtgatgtcggtggtgccgtccatgtaggtggcaccgctgtccaccagcagaaagcccttcttttccagcacagcgtgatcttccggggtggcgtggtagtgcatcatggctgcgttgccgccgtaggccgcaatggtgccaaagctttccacaaggaatttatcgtccgcgctgcggtacttgtgcagaatttcatccaccgtcagctcggtcagggtctcaccggcagcaaggcggctttccagctcgatctggaaccgcaccatggccacagcgtcccggatatgggcctgctttgtgtgggcaagctccgtttcgttcttcacgcccttcatcatcagcagcgggtcggtgccgtccttcacggtgagggcagggttctgctccagcacctgatacacggcgtagttcaccgtggagcactcggccagcacggtctggggttccgtctcagcagcgaggaactccagcacatcgtcgtactccgccagtgtgatgccgttggcttccagctctgcctttgcctccggggtgacgcgggctgtgttgatgaagagtaccacgcggctgggggtcacatagcagtaggccatggcatagggagtgcactcaatgtccatggcgcgcaggttcaaaagccatgccagattatccagcttgcccacaaactgagcggtgcagccccgctccttgagcttgctgcgcagctgatccagcttttccgccggggagaagcccgcatattccttcggcaggatccacgctggggtatccggcagggcagggcggccctccgtccacagctcgtcctcaaggttcagggtcttgatggaagcgcccttcttttccagtgcctttttcaggtcgttcacgagggccgtgctggcggtcaggccgcacaggcccagtgcttcgccctcattcagggcatttgcgcagtattcctccacggtgggcacgccgggttcccccatgcgctgcagcttgatctcggtacccgcaatttccttctcggcctgcacaaaataacggccgtcggcccacagggcgctctcggtgcgggtgaccacgaagttggagttctcgccgtggaacccggagaaccaggtcaggctggtgtaatggcagggcaggtattcgctggcgtggggatcacccacagggatcagataaacggccacgccgtttgcagccatggcggcacgcagcgcggcaaggcgctcgggtacggtattcatgctcatatgatttgcttccttttctctcaccggaaagcccggcagcggtgcatttctgtttggccttattgtatcattccgggaaaaagattgcaatgcaggggcaggacggtttggaatgacctccgcttgcgctctggccatgttcagcggaaaatatttttatatttgtggttcagaaacgcctgcgggcgtttctgaaccactgtttcaccagaggggtttgcagtttccggcgtaagcgccaagtttgcgggcacgccagaggctccctccccgagggagctggcaaaaccgtcaggttttgactgagggagttcgttctccctcaaaatgccgccaatttgcaaaaaaagttacaattttttcttgaaaaaggccgttttcccattgacagccttgttataataggagtgtaagatttttgagccagcactctgcggctctgtgtgctattcaaagaaagaggcaattgaatcatgaccaaaatcgatattttctccggcttccttggtgccggtaaaactaccctgatcaaaaagctcatcaaagaggcctttgccggccagcaggtggtgctgatcgagaacgagttcggcgagatcggcattgacggcggctttctgaaggaaagcggcatccagatcaacgagctgaacgccggctgcatctgctgctctctggtgggcgacttccgcaccgccctgcagcaggtggtggagcagtaccaccccgaccgcatcgtcatcgagccctccggcgtgggcaagctctccgatgtgacccgcgctgtggaaggcgtggccgagcatctggatgtgcagctgaacagctttgtcaccgtggccgatgtgaacaaagtcaagatgtatatgaagaacttcggcgaattctacgacgaccagatcagccacgcaagctgcatcctgctcagccgcacccagaccgccagcgaagagaagatcgccgctgcggtcgccatgctgcgcgagaagaaccccaccgctaccatcgtgaccaccgcatgggacgagctgaccggtgagcagatcctgaaggccatgtccaccaaggacgacttcaaggcagagctgatcgccatggctgcaaaggccaacgaagagcacgcccacgaggacgaagaagagcatcaccaccaccatcaccacgatgacgagaacggtgtgtgcagctgcggccatcatcacgaccacgatgatgatgacgacgaggacgagcacgagcatcaccacgatcacgatgaagatgatgaccacgatgagcacgagcaccatcatcacgatcatgacgaccatgaccattgctgctgcggccaccatcacgaccacgatgacgacgatgacgaggacgagcacgagcatcatcacgaccatgacggccactgctgctgcggccatcaccatcatcatgaccacgatgccgacgaggtgtttaccagctggggcgtcgagacggcccgcaaattcaccaaggcagaagtggagcacgccctcaccgagctggataccggcaattacggcatgatcctgcgcagcaagggcatcgtgaacggcggcgcagacggctggctggagttcgactatgtgcccggcgaatgggaagtgcgtgcccgcggtgcagatgtgggcggcaagctggtggtcatcggctccaagctgaacgaaaaggccattgcagagctgttcggctgctgaactccttcagtcaaaccctaacgggtttgccagctccctcagagagggagcctgattggataatgattttttaaggagaaaccattcctatggcaaaagaaattccggtctacctgtttgtgggctttctggaaagcggcaagaccaaattcattcaggagacctttgaagaccccaactttgactccggcgacaagaccctgctgctgatctgcgaagagggcgaagaggagtacaacgagaagaagttcgcctttcccggcgtgaccgtcaaggtgctggaggacaaggccgagctgaacccgcagaacctgctcaagctggaaaaggaatccggcgcaggccgtgtggtcattgagtacaacggcatgtggctgctgcaggatctggccgaagctctgcccgagagctggatcgtgtaccagtgcatcgccaccgccgacggcaccaccgccctgacctacgcccgcgacaactccatgcgcagcctgctgctggacaagatcgcccgcagtgagctgatcgtgttcaaccgcgctgaggccgtgaacaacgatgccgcccgtcaggagctgcacaagctggtgcgtcaggcttcccgcaagtgcgacatcgcctacgagtttgccgacggcagcgtggcctacgacgatatccctgatccgctgccctttgacatcaacgcggacatcatcgacattccggatgacgatttcggcatctggtatatggactgtcaggacgagccccagaagtacaccggcaaaacggtcaaattccttgcacaggtgtgtcagaccaatcgtgccggcaagaacagcttcgtgccgggccgtttcgccatgacctgctgcgtgcaggacatccagttcgttggcttcccctgcagctacgatggctacaaggcgctggagcagcgtgcatgggtgcgggtgaccgcaaaggtaggctacaagttccacaacatctaccgcggcaaaggcccggtgctcaccgccatttcggtggagcctgccgaaaagccgctgaacgatgtggtaacattctcttgatctgatctttcaaggaggtcccggcatgaaaacactgtttcgtatccttggcacggccgctgctgtggccgttaccggtgctgccattgtggcactggacaagatcctgaaccagaaagacccgctccatgtggaggaagtagagttcccggaggacgccgagcagaacgctgaggaagccgccaagactgccgaagcctacgccgaagcggaaaccaaagcctccgatgctgccaacgaaaaggcttcagaagaagctgcgccggaagctcctgccgaagaagcggcagctgctgcccagcccgccgaagaagcctctgccccggcggcacccgcagagggcggtgagaagccggtgttcgacccggaagctcccaaccggaaccctgtggaagcaggccccgccgttgctcccaaagacgagagcggaaaattcgaccccaccaagatcgccgaagccagcgactttggcgactgggaagaacagggctgcaaaggataacctatgacccaaaaagggacgatgtgatgttcacatcgcccttttttgttattctcctcttgccagctgctgcagctttttcctgtccagcacctgcacgccgccccggaacagccgcacccagccctcctgcgcaaagtatttcagcatccggctcaccacctcgcgggcagaccccatgtattttgccatctggtcgtgggtcatgcgcacctcgtcgccgccggtcttggccagctcatcggtaagaaaaatggcaagcctgcggtctgcgctcatgaacagcacctgctgcatggtccacatgctgtcggaaaagcgctccgccgtcatctggtaggcgtagcagcgcacatgcacgttctgctgcatcagcctgcggaaaacgcccgcgctgatgcagtaggcctcggtgtcctcttcggcatcaatatacaggtcgatgttcaccgagtccatcacgcaggaggccgacaggatgcacacctccccgccgaacaggcggtagagcgtcacgtcccgcccgtcctccgagagcaggtaggcccgcagctggccgctgcgtaaaagcagaatgcccacacagctttccagcgggctgtgcacccttgccccctttgcgtagtgcaccggacgggtgtagcggcagagcatgtcctgttcgtcgggtgtcaggtcgttccagaagggaaaacctttggccagacaatcgcggtgttcctttgttgtttccgacattgcttttcatcctttccgcagggccttggcggcttcagtgcccgcctgcgcgccctcatacacggcctttgccacctgcagaaggcccccggtgcagtcgcccgccgcatacaggccgggcacggtagtctgcattttttcgtccaccacgatgcggttcccgtccacctctgcgccgatcttcctagccagtgcggtgctgcccgccacgcccagtgccacaaatacaccgctgacaggcagctgcacaccgccggacagctgcacgccggtgacaacggtttcgcccagaacagcctccacggtctgcggatagactgtgacctccggcgggaagtccgccgtcagcggtgcgccgttggtcagcagagcaacactttttgccaccggcagcagggcctgcacctcgtgcagggcatactcgccgctgcccagcaccgccacgtcctttccacggtaaaaaaaggcatcgcaggcggcacaatagctcacgccgtgcccctccagcccggcaaggcccgggatgcgcggcaccgcccgggatgcacccgtggcaaggatcacagcgtccgccgggtaatttttatccactgtttctacggtgagtttatccgtataggtcaggcccacggcttcggctgtgacgaatctcacaccaaggcgctttgcattctcgatgctgcggcgttccagttccgcaccggagaccggctcggcaaagccgtaatagttttcaattttttcggcgcggtccagcgcaccggggcctttggtgagcaccgtggtatccacaccggcgcggacagcgtacagcgcggcggaaatgcctgccgggccggaacctataatgatgatgctgggcatgggaagaccctccttcggatgcatttttctacagtatacacctttttttgaaaaatttccgtgaccgggtcgcaaagcatcggtttttcggacggtcctgctccggttcgctgtcagcggatcgtcccatgcacaaacgcgctgtcgtacaggaatcttcctgctcggcagcgcgcttttttctttcttcagaacaccagctgcaccagcagcacatagcacagcgtaccgcctgcgacactgagcagggtctcatgcttccacttgtgcaggcccaccgtcaccagcagggcgatggcctccggaatgccgcggctgcccgcaaaaggggtgacgcttttcaggcagtagacgatcagcataccaaagatggcggcgggcagcacccggcccagataccgcaccacctccggcggctgctgatccttggaagaaaacaccacaaagggcagaaagcgggtgagcatggtggcggcggtgcacactgcaatggtcaggcccatctggactgcggtcatgcgcccacctcctcgccgcttttttctgcttcggtgccttcggccttttcgatcggtttacgcagagccagcagcagcaccaggatgcatcccatggagggcagcaaaaagctgccggagccaaaaaacaccagacacgccaatggggcggcaaggccgatcagggcgctgtagtgctgccggtccttttcccactggttgagaaagatcaccgtgaacatggcggtcatcacaaagtccacaccctcggtgctgaaaggcagcaccgagcccaccaccgcgccaagaccggcactggccacccagtagaactgatccagcagggtgatgaagaacatgaaccagcccctgtccaccccttccggcggctcggccgaacaggtgatggaaaaggtctcgtcgctcatggcaaagatcatataaaagctgcgcaggccgtagcccttgtagcgctccagcatggcaaggccgtagaacaaatgccgcgcctggatcatgagcgccatcagaaaggccgaaaggggtgagaacgcgctcagcagcaggcttgccagcacaaattccagcgaaccgccgtacaccaccgtgcccatgagcatgggcatccacaccggcaggcccagcgactgcacataaatgccatagcccatccccagcacaaaatagcccgccagcaccgggatggtctgcggtgcggcggcgcgcaatgcccgccatacggtgctctgccgccttgtcaattgttgttcggttacatgttccattggtctttccctcaaaatacgatgccggtttcctctttggcctcattgccgccgataaacctattctctcgatatgaatatgtctgtattataacaggtctcacggcttttgcaaaggtgtatccccactgcttttggcagaacgacagattttttctttaaattttatgcaatttttaacggatacaaagtgactcgcggtcagtgctttattattttaatgcagtaaaggttctttgcaggatcctgttcctgaaatatccctaaatgccgtttgtgctttagtcatactcatttgacagatgccgccttttccggtatcctgtccgtatcacaaggacggctggccgaaaacacccgccttttttcgttcattctgtatttggtgggaggacattttatggcaaccatgaaggacatcatccagagcccgctgctgctggcgctgggcctgttcgccagctctgccagcggcagcaaggtggtcaagggcggcatcaagggcgtgctgccggtgctcatcatcatgacagtgctctccctcgccgcacgccttgcaggctacggctccgtgctgggcggccttgtgggcatcttcatcatcgtgatgctgcccatcggcgtccttacctcctatgtgctgtggaagaagggcaggatccaggtagtagataaagagcagaagtaaggggaaacaaaagaactcccggacggatgtccgggagttctttgttgcttattctgccttttcgtccttcttgagcatatccaactcgggcatcagctcggtgctcacaatggtgagcatctcctccagctttgcacagtcctcgggggagaagcgctctcttgcgcgctccaccacagtgtgcagataggaatagctgatgttgtagtaatcgatatacttctgggtggggcgcaggtgatactcgcgccggtcggtggtggactggatcttttccacatagcccttcttcaccagactgccgatcttatacgccgcgttgggggtggagatctgcatcatgcgggaaaactccgcaatggtgggttcgcccatggccatgatgccctccatgcagaaggactccaccgtggtcagcgtggcttcccgggtggcaaaacgctgaaaaatgttctggtagaaatgcagcttgaatttggtgtatacgtcctgaaatgcctgttccagcataggtcgtgtgcctccgatagttcattttatttaaaaataccacgttttggccgcggcgcaaagcgaaacagctgaattttgggcaggaatttattctgccgcctttttgttcgtgcgcacacggatcacgctgagcaccaccagctctacggcaatggcaacggccagcaggatcagcgaggtgaacaggctgccgtttgcgccaaggaaagcctgtgcaatgcccgtgatcacatagcacactgccgcgcaggaagccgccgtaatggcgtagggcagctgggtggacacatggttcacatggctgcagtgggcaccggcggatgccataatggtggtgtccgagatgggggagcagtggtcaccgcagacggcaccggacaggcaggccgcaatggagatgaccagcatctcgccctccgggaaggcatggcacacgatggggatgaggatggagaaggtgccccagctcgtgccggtggcaaaggcaaggaacactgccacaaggaagatgatgaccggcagcatgtactgcagcgctgcagcagagccactcagcaggttggcaacgtaatattttgcgcccagcaggccggtcatgccggacagggtccatgcgagggagaggatcagcatggggctgaccatggccttgaagccctcgggaatgcaggcggcaaagtcctgaaaggtcatcacattgcgcacgcggtagaacacaaaggtgaacagcagggcaatgctgctgcccagcaccagacctgcagaagcgttgcagtccgcaaaggcggtaacgaagtccacgccctcaaagaagccgccggtgtagatcatgccgaagatgcaggccacgatcagcaccagcaccggggcgagcaggtctgcaacatggccgcaggtatcggtgccatcgtccacatcgttgccgtagggacggtcggcggtggtgaacaggtcgccgtttttggcgttgtcctcgttgagcttcatggagccaaagtccgtgccggtgaagatgaggaacaggctcatcacgatggtgagcagggcatagtagttataaggaatggtgcgcaggaacatggtaaagccgttgatgccggagccttccggcacgctggaagtgaccgcagctgcccagctggacaccggcgcaatgatgcacacgggtgctgcggtggcatcgatcagataggccagctttgcgcgggacaccttctgccggtcggtgacggggcgcatgacagagcccacggtcaggcagttgaagtagtcgtccacaaagatcatcacgcccagcagcagggtggcaaactgcgcaccggcccgggagtggatgtgggtggaggcccagcggccaaaggcggcagagccgccggccttgttcatcagggccacaaggatgcccagcatgacaaggaacaccaaaatgcccacgttgctgctgtccgaaagcttggccaccatgccgccgtcctcattgaagaacagggtgttgatggccagctccagattgccgttggcatacagcagtgcaccggatgcgatgcccaccagcagagaggtgtacacctccttggtgttcagcgccagcacaatggcgatcaccggcggcagcagcgaaaagatggtgctgtacaccgcacaggtataggtggacgggtccgcgatcttgccgggcgttgccgctgtgcaccacagcagcagggcaaacaccagcagagctgcgaaccatgaaaggttcttgtttttcataacggattcctcttttttcaaatttccggggatgcatacccctctttgcgcaggaaaaactatccccatcgaatgcaaagggaggtgtgcgccgcgccggactataaagcgatgtattttgagctgttccgggccagcgtgcaggccgcccagctcttgcaggacgcgcagaagcgtgccgagcagcacctgctggaagctgacccgccgccgatccgattggagcaaacagagcagacggatgaagaatagttttcttcggtcagcgtcctcgccctctcagtcaccttcggtgccagctctcccaaggagagagcctttggcaaaaccgggaactttaccgtactgccaaagcctccctcattgagaaagacttcccccggccgggggaagatgtcgtgtaagcgacaaaaaggggaacggtggcatcgcgcagcgatgacggaaggagttttaccccttctttgcctccgccttggctgcgaacttggcgttgttgatgacaaaacgttcgtgggtgccgccgcctacagggcctttttcgtcgtgcagggccaccttgaaggtgagcttgcggccttctaccgccaccagctcgctctcgcaggtcacggtcatgcccacgggggtgggggcggtgtgctccagctcgagcttggtgcccaccgagccattgccttcgcccagcgcgtcggccacgctcatccagcaggtcttttccgccagagccacaagggccggggttgcaaacacctccagcgtgccgctgcccatggtctttgctgtattggctgcggtgacgagcacgctctgttccccgcggataccggtttccaatgtcatatactttcctctccttttgcgcgccgtatggcgcattttatttttgaacacctttataagataccacattttgcaccagaacgcaccctattttgcacttttttgtgaatttctctttttctttttgcgcaaacgggctgccaagtcctctctctttgggagaggtggcaccgaaggtgacggagagggcgaggacactgaccatgcggcgacctcttttttgttttcgccttccctccaatccgcatccttattgcgattcaaaaacgcaaattttctgcgttttaaggcaaatttcatcaatttagagcagacgccgaaaatctttaaaaaagccttgacaaggagcattccgcgtgatactatgaacacatgaacaagcgttcatgtgaatccacagcgaagggagatgtcaacatggcggaaataaaggaagcactgcccgcgccgcagccggaagccttggatatgccggacgacgaggtgctgtacgagctggccgacctgttccgggtgttcggcgactccacccgcatcaagatcctgtatgcactgcacgacaacgagctgtgcgtgcaggacattgcaaacgccgtgcagctgagccagtcggcggtgagccatcagctgcgggtgctcaaggattccaagctcgtgcggttccggcgcgagggcaaaaccgtttactacgcactggacgatgaccatgtgcgcagcatcctctccatggggatggatcatatcgaagaataacgaaaggctggtattacttatgaagaagagctacaagatcgaagtggactgcgcaaactgcgctcagaagatggaagacgctgccaacaccgttgcaggcgtggcaaatgctaccgtcagctttatgacccagaagatgaaggtggagttctctgaaggtgcagacccccacgacaccatggtgaacgttctggccgcctgcaagaaggtggaggacgactgcgagatctttgacatctgatgcgcggcaggttgctgcacacgatcaacagcctcgccctctccgtcacctgcggtgacggagagggcgagcccgctaaagaaaaaggcatctgcagcaagaattcgtagattttctgagagctcaaacgaatgtgcagatgctttttactttgtgtgcgattgtgttgtgcaataactttttctgttgaaaaatcagacagttttcaacagtttccactcagttttcaacaccgtttgcggaaaaagcataaaataaacgtggaaaagcgcttttacgcctgaaaaactgtgtggaaaacacgggtaaaaccgtggaatatccatttttatggggaaaagttgttgaaatccccgcccgccgcagcgtgatgcggcccatggatcccgcaaaaggagagttttgtatgaacaaaaagcagaaaaagaacctgcagcgcatcatcattgcgctgattttggtgctcatcctcaagcttttgccccagttccccacgccggtggagctggtactgtactgcatcccgtatctggtggtcggctgggacgtgctgcgcaaggcactgcttggcatcaagaaccgtcagccctttgacgagtgcttcctgatggccgttgccactgtgggtgcatttgcactgggcgactacgtggagggctgtgccgttatcatcttctaccagatcggcgagctgttccagagcgtggccgtgggcaagagccggcagagcatttccagcctgatggacatccgcccggactacgccaacattgagggcgaggacggcaggctggagcaggtggacccggacgatgtggagatcggcaccgtgatcgtggtccagcccggtgagcgcgtgcccatcgacggcgtgatcgtggagggcgcttctgccctgaacaccgccgccctgaccggcgagagcctgccccgcgatgtgcagaccggcgatgaggtcatcagcggctgcgtgaacatgaccggcctgctgaaggtaaagaccaccaaggaattcggcgaatccaccgtttccaaaattctcgatctggtggaaaattccagcatgaagaaggcccgcgccgagaacttcatcacccgttttgcccgcgtgtacacccccgccgtgtgctatggcgcattggctctggcctttatcccgcccatcgtgctgctgctcatgggccagcccgcccgctttggcgactgggtctaccgtgccctgaccttccttgttatcagctgcccctgcgcactggtcatcagcattcccctgagcttcttcggcggcatcggcggtgcatctgcctgcggcattctggtcaagggttccacctatctggaagagctggcccgcaccggcatcgttgtgttcgacaagaccggcaccctgacccagggcacctttaaagtgaccggcatccaccccgcaaagggcaccagcgaggagcagctggtggaagctgccgcgctggccgagagctggtccaagcaccccatctccctcagcatcaaggccgcttacggcagggagatcgatccgaaccgtgtcaccgatgtgcaggagcttggcggccacggcgtgaccgccaaggtggacggcaggaccgttgctgccggcaacgcccgcctgatggaaaagctgggcctgaaggctcccgccgtcagcgagaccggcaccatcgtgcatgtggccatcgagggcatgtacgccggttatcttctgattgccgatgtggtgaagccccacagcgcacaggccatccggggcctgaaggatgccggtgtgcgcaagaccgtgatgctgaccggcgatgccgagccggttgcaaaggccgtttccgcagagcttgggctggatgaataccatgcgggcctgctgccgggcgacaaggtagaccagatcgaaacgctgctcgccgcaaagcggcccaaagagaaccttgcctttgtgggcgacggcatcaacgatgccccggtgctgtcccgtgccgatgtgggcattgcaatgggcgctctgggctctgacgctgccattgaggccgctgacgtggtgctgatggacgacgaccccgccaagatcgcactggccatgcgcattgcccgccgcacgttacgcatcgtgtaccagaacatcgtgtttgcactggccatcaagtttgcctgccttgtgctgggcgcgatcggcatggccagcatgtggaccgccatctttgccgatgtgggcgtgatggtgctggctgtgctcaacgccacccgtgccctgtacaccaaggatctggcgaaaaagaatgaacagtaaaaaacagtgccggacagcctgaaaactgtccggcactgtttttatatatgaggtgcatacaggcgttctatttcatgcacaagctccggttctttttcgatatcaaattttctggcaaacatgcagggcgatgctttcagctgttccagatcagcgtatttccagacccacggattgcctctgtcccaatcgatggcacgggcactggtatcacccggcccctgatagatcttatcctgatacggcgactgcgcgatcagtgtctgcacaaagaactcgtccgagcaaaaggtcttgtccagcacctgcaggatccactcttcttttgtcagcagataccgtgcaaagccatcagtgcagctgaaccagttgctgccctttgtgaagtgaacgtcctgattgcgctttattttcagcagcttctggcccgacagcaggattccattgatcacgccgagcaccggatggcggcgcagatcgatattctggaaaaagtgccggtaataaacgcgctcatcattgaacgggctgaatgggtgcgggtcgaaatggacaaattccctgtccgggtttgcctcaaagaatgcgcggatatcttcttgtgtttgaatgggcagatccacaccggagatcaggtggtaatgctgatacgggccatgggccactgctgttttcaatagcacaagctccgcttttacctgactgacaccgccccacacaacactgtgccgttttgcgtaaaacactttcgcatatttcatgcggcactccaccgtttccggctggtagtccgtatttttgctgtccatgtggatgaatatatcattccacggtacatccagcatccgcaacagggtcagaagcatctcatcacatttatgtgcttctatcaggtacgcctgtttttctcttgtttccatcgctttatcctcttacttctgcgccgcatttttattttattataacagaaccctctttaaaaacaatcccatcacccctttttacagcacaaagccgccgcattcccttgcagagagagagcggcggctttgtttgggtatggagaaaatggaggaggtctcaaagttcacccgcggaatgcggcggtatacaccgccaccacctcgtcgcgggtgggggtgatctggttggtggacatgcaggtgtcgtgcagggcaagctctgccagcgcggcaaaatctgcagggtccaccttgttcagctgcgcaaggtttgcggggatgcccacgcctgcactgagctgacggacaaactggatcactgccggtgcggcagtgtccggggtaaaggtgccctgcaggcccatggcagcggcaatggtcatgaaccgctcccgacacaccgggctgcggctgttgaaggccagcacgtagggcagcagcaccgcattgcacacaccgtggggcaggttgtagtgtccgcccagcgcgtgtgccatcgcatgcaccatgccaaggcccgcgttggagaaagccatgcctgccacattttcggcataggccatcatggtgcgggcggcttcatcctgaccgttggcaacggcccggggcaggttctgcacgatcgcctgtatggcccagtaggcatccttgtccgtgagcgggttggcgtttttggaaagcgccgcctcgatggcgtgggtcagcgcgtccatgccggtggctgcggtgagcttgggcggcatggaggacatgaagtcggtgtcgttcaccgcgatgctgaccatgcagttggggtccaccatggccattttgctgtggcggacagggtcggtgacgatgtagaaggaggtgcactcgctgccggtaccggcggtggtgttcaccgccacgatgggcaggccgggcttggaggacttgttctcgccctcgtactgttccacggtaccgccgcaggccaccacgatgctggttgccttagcggtatcgatggcgctgccgccgcccagagccaccagcagctgcacctgcagggtacgggctgcggcaatgcagtcgttcaccacctgtacggtggggttgggctgcacattgtagtacacggcgtactccacaccggcatcggacagtacctgaccgacccgggcagcggcaccggaatcatagagaaagcggtccgtcaccagcaaagcacggcggatgcccatcttctgaagctccggtcccagaagacggatggcacccttgccaaaaaagctggtcttgacggcgttgatgcgttctgccatgtgttcaccctccgcttactgtgcctgaccgcagacgatctgcaccgggtcccaaatggaacaggacgaggaggaatagacgaaatccacctgacccagtgcttccacggtcatgccagcgcggatggcaacggcaatggcgttgatgcgggccgaaacattcttttctccccatgcctgcgcacccagcacctgacgggtattggcctcatacaccagcttgatggtgatgcggtgggggttcgggcagatgcccggacggtcggtgccggtggccattgcactcttgacccgcagaccggccttgcgggcctcggtctcggtcaggccggtgcgggcgatctccagatccgccaccttcaggctgctggtgcgcagagagccgtcgcggcaggccgcgcagtcgcccacggcatagatattgggcacactggtggcaaggtcggcaccaatgagcacagcgccattgggtgccagctgcgccccggtaccggccagcaggccggtgttgggggtaacgccgatggctaccacgcaaaggtcacaggggtaggtgccgcggttggtctgcacctgctccacgaaggtacggcccgggaaggagcgcacctgctcgcccagattgaactgcacgccctgcgcttccagctccttctggatcagcttgctcacctcagggtcaaactggggcaaaagctgctgctctttttcaatgatacgcacattgcggcccagcttgaggaaggactttgcgatctccaaaccggcccagctgccgcccaggatcacgatgtcccgcacatagggggtgcggacgaactccttgaggaagatcagatcttccacggtcttgagggtctgcacgcccacgcggtcactgccgggcacctgcggcacacggttggaagaaccggtggccagcaccagcttgtcgtagtggtcttcaaacacgcgtccggtggcaagatcacatactgtcaccttgcgggcggctgcgtcgatgccgcgcacctcatggcgcagatgtgcggtgatgccctgcgcgttcagctcagtctccttggcctgaatggccttgttcaggctgtccagatcctcgcacaggtaatggggcaggccgccggtgccgcaggagtagaagccgcctttttcgtagacggtgatctgcgctccgcgctgggcggcggcaagtctggcggcggccgaaaccccggcggcaatgctgccgatgataataattttcattgtttaagcctcacgatcccgccgggaggaagcccctctctgcggcaaaacttgcagggtgttacttactcagggtgggaggattgtccacgatgcccacgatgaaagcatcaatgggcgacggatggtccagaccatgctgggtggtctcgtcggtggtgaccagaaccatctcgcctacacccgcgccgatgttgtcgcccgccacgatggtatcctttttggagccgaacaccggctccaccagcaggaacttatagcctacaagctccggcattttgcgggtggcgacaacggtccccttgacgatccctaaaatcatagcttactcctctttgcccagcacggtgaccagctgcccctgcttgagcaggaaggcattgccatcgtccgtgtcgatgtgaaaatccagtgcacatttgtcgtttgcgcggatcagcaccccgcccatcacgcccggcttggggccgtcgatctttacctgcacgcggtcgccgtcggcaaggccgaaggcagttgcctgtgcaggagtcatgtggatgtggcggtcggcgatcatcacgccctccggcacagtcagggtgccattggggccgcgcagggtcacgcccggcgtacccttcgtatccccgctggaacgcaccggcgctttgatgccgatgttgcggcagtcggtctgcgccagctcgatctgagtggcactgcgctccgggccaaggatgcggacatgcttcagttcgcccttgggaccgatgatgtccagacattcctcgcaggcaaactggccgggctggctcagcgcctttttgggggtgagctggtagccatagccgaacagcttgtccacatcatcgcgggtaaggtggatgtgccgcaccgagatgcctaccggcacctgacggctgcgcttttgcagctctgcctgcacggcctgcgtgatcaggagcagcagctgttcctgactgatgtcatggtaaaccaaggcacagcgctcctttcttatgcagcgtcagcgcagttcttagcgcagctcaggcatgcactcggacacgcttgcgtgcgggcggggaatgaccagtgcgctgaccacttcgccaatgcgggaagcagcggtctggcctgcctcaacagcagccttcacagcgccaacgtcgccctgcacgaacacggtaacaaggcctgcgccgatcttctcctgacccaccagagagacatctgcgctcttcagcatggcatcggctgcctcgatggaagcggtcaggccgttggtctcgatcatgcccagagcggcatccagcggcacctgctcgcctgcgggcaggccggacttgccggtcgcggggcccttggcaggcatgatgcgggccagatctgcgtggggacgtgcaatgacgttgacgcagaacagctcacccacgcgggaagcagcctcttcgccagcctcggtagcagccttgacagcgcccacctcgccggtaacgatcacggtggtcagaccggcaccgatggtgtcggagccaatgaactcaacgtcagcagccttcagcattgcatcggtagcgtcgatgttgccaaccagacccttcgtctcgataaaacccagagctttcataagttgttcctcctgtcagaacactgaaaaaattgtatgtgatggtttcgtccttcaaaaactcagatgatgcgcagcccgccctcggccagcatgcagcggcggcggcggcagaaactctttgcgcaggtgatgccctcgccggtggggccggcaatggtcatggtgcagtggccctcgccgccaatgccaacaccggccttggtggcgctgttctttacgtagatggtggtctcaatgacccgggcaaagcgggtcatgtggtccacatccttggagaagatggaagcggtgtggcggttgccgtgctcggccgccacggcatcttccaccgcctgttcaaagctctggcagcgcacgatgggcagcaccggcatcatctgctccaccagaacgaacggatggtcggcaggcacctcgcagatggcaaggcggcaagtatccggcacatgcacgccgatggtctccagaatgcgggcggcatccttgcccacccactttttgttcacctcgtggccgccgctcttcttgggctgcagcacgatgttcaccagctgttcggtctgggccttgttcagcaggtaggcaccctgcttctgcagctcgtgcagcaggccgtcgtaggcggtgttcacggcgaacacttccttctctgcaaagcagaggatgttgttatcgaacgaagcgccttcgtagatcttgcggcctgccagctcgatgtctgcggtctcgtccacgatgacgggcgggttgcctgcaccggcaccgatgcactttttgccgctgcgcagcagggcgttcaccatgcccatgccgccggtgcctgccatcaggcggatcttggggtttgcggccatcttgtccacattctccatggtcggctcacgggtcatggtaatgaggtttgcagggccgcccgcctcgatgatggcggtattcagcgcctgcaggcagtcggcagacacccgctttgcgcgggggtgcacgttgaacaccacggtgttgccgcctgcgatcatgctgatggtgttgttgatgatggtctcggtagggttggtggtgggggtgatggagcagatcacaccaaagggtgcgtactcttccagcatcaggcccgcgtcaccgctcttggcttcggtggtcaggcattcggggccgggggtcttgttgatgacggccagatgtttttccaccttgtcctcatagcggcccatgccggtctcttccacgatcttgtggcaccactcctccacatgtgcgcgggcacagcggcggatggcttcaatgatgcgctggcggtcctcgatcttgtagttggccgcccagtcgcgctgggctttccatgcagcctccactgcgtcgtctacgttctcgaacacgccgcggtcgcctgctgcaccgccgggtgcagcggtataggctgcaggggcggcgcttgtctgtgcaccgcccataccggcaagcacctgcttgacgatcgcttcaatttcctgcgaactgatatccatggttttcgttcctttccgtaaaggtcatatccgttggatcaaacgaaactttttgttattgaaagctcttcagcgtccggcggatgacctcggccattgcggcatcgcgggcatttgcggacttcggtgcggccggggccgcttccattgcagggactgccgcaggctgtgcggcgggcaccggggcaggggcaggagccgcctgctgtttgggcagggtgggcagcgccatgcccggctggatcagcccggtaacgcccggcaggctcaccggctgggcaggctgtgcggcgggtactgccattgccacaggctgtgcagcgggctgagccatgggctgcacggcaggtgcgccgcacttgctgcagccggtgcagtgaccgccgcagctgccgcatttggagcagcctgcgcagcccagctttgcggtgacggctgcgtagtaatccagtgcttccaccagatgggccgcatctgccggggtcttgccccaggtcaggcagccgtcattttccagcaggacagccttatcggtgcggcacagcaggctgacagcctgtgcctgtgcgtccacgttctgggcgggcagcagctgcacccggcccagcgcccgcactgcggggctgaacgctgcaggctgcacggtctggccctgcatccccatcacagccgcgcaggccggataggtgtgcatcacgcactgggcgttctcgttttcctgatagattttcagatggatgggcagatcttcgggcaggggcttgggctttgcgctgagcatcgccttgccattcatatccacgcgcaccagcatatcctgcgtgagcgcggccttgtcggcaccggcaacggtcacccacacggcctgcgggccgacgcggacgctcatgctgccgtcaccggccaccagccagcccttggcttccagccgacgggccatttccatgatggctttttttgcctcaaagtctgagaggtaagtaacgccttgaatcaccatacgtttctttcctcctttttaacggcgcagcggcgggatcttgagcatggcgcgcacctcgtcgggagtcatgggcatcatgcccttggactttacgatgtccgacacctttgcgatcaacgctgcgttgttgtccacatggacacccggcgcgatcatgtccgaatcctcaaagccgatgcgcacggtggaagcgcccatatccagcgcagtcttgaccatttcccagtcctcgcggtgggcctgcgtgtagccccacaggtagtcgccgttggggaagttctcttccagcgcctggatcatgtggcgcagggccggcaccgtggcaggcatctcgccgccatggccgaacaccagtgcaaacaggatgggttttacaaagtggaacttgtcgttcagttcccgcacggtgttgatcatgcccagctcaaagacctcggtctccgggatcttcttgttgtccatgatggtcttgacgcagtactccacatccttgatggggttctggtacaccgaggtacccagattcaccgagccgacattcaggctgttggcttccacccaggaggggtagcagggctgcacacgttcctcaatggtcaggttggacacgccgccggtggagatctccaccacgatgtcgcacatctcgcggatgtaggccaccgtttcttccagcaggctcagatccggggtgaggttgccgttcaggtcgcggcagtgcaggtgcaccatggacgcgccgtttttgtagcactcatacacatcccgggcaatggcccgcggattgatgagaatgtctgtggccgcaacgggggccacggagatcatgatttttttcattggatgaacactccttgcatgtcacattggagaagcttaacaaaggatgctaacgtcattttagcgcaaacatcccatcttgtaagctcacggtcccccgcccgccttttacggcaggcaggaggcctgtatgcttacttcttccagaagatgtagtgatcctgcactgtagcggcgatctcgtccacctgcctgcgctcgatcacactgagcagctggcggtgcagctctacgaaccgctcgatctcctcttcgcccttggccagcaccttgcgggtggtctccagacggctgggcatcgtcagccgggtgatatactcggtgatggtggccagcatggggttctgggccgcattggcgatctgggtgtggaaccggctatccagctccagcaccttgtccaccgaaggctccggcgagtgcatttcggcagaaagctcgccgaaggtgtggtacaggtccggcagaaaggatgtgatatcattgcgctgaatgataatattcagcgtaccgatatcgatgacggagcgcagttccacaaattcctgccagctgttcttctgcaggatgatgctgtacagcatcgggtccagcattttctggttgtagttttcgctcacaaaggtgccgtcggcacgcttgatgtacaggatgccgtaggcctgcagctttttcacagcttcccgcaccgagttgcggcccgcgccgaactgcttgcacagttccatttcggtaggcagtttgtcgcccggatgcagggtgccatcgatgatctgggagatgatcccgtccatgacctgatcgactacagactttaccgcattcttctgtttttcaggatgttccattgacatggttccgcctccaaatccggtttggtggatattcggggtcattcagcgcggaacgttccggggcagaaagcctccaaacatcacatgttaaatctttgccactattttaccatatcggaggggcggacgcaacggttacgccatcaaataggtaggcagcaggatcagctgagggaaggcgaccatcagggcaatgcagacgaaggtggccgcaataaacggcaccaatgtggggaacacttcaccaacagtcgtatccatcaggtcgcaggcaacgtagatacacatgcccaccgggggagtgaccagaccaatgccgatgaccacggtgatcagaacgctgagcacgatggggtcgatgcccacgcccagagcaatgggatacaggatgggcatgaacagggtcagcgttgcaatggactccatgaacatggtgacgatgaagaaaatcagcaggatcatgatgaggatgacggtggggttggtggagaagcccagcatggtcttggccacccacttgtcaaagcctgcggtagtcagcataacagtgtacagctttgctgcgccgatgacgatgaagatacggccgctggtgcggacggtctctgcaaaggcaaacttgatgtcttcccacttgagttcgcggtagatgatgccgccggcaaacagaccgtagacaacagcgatcacgcctgcctcggtggggctgacgatacccatggtaatggtgcccacgatgatgataggcatgagcagggcgggccagctctcccacaggccgtgcagcacagggccgatggtgaagtgaccgggctccttgggcacgccttctttcttagcgaggaagtagctgacgatcatctgtgccagaccgcacaggatgccggggatgatgccgccgaggaacagcttaccggtggagatgccgcagataccggcaatgaccaccatggggatggacggaggaatgatgatgccgatggtggaggaaatggcggtaacggcaacggtaaagttcttggagtagcccttgcggatcatttccggcatgaacatgccggaaacaccagcggtatcggcaacagcggaaccggagatgcccgcaaagatcatgctggaaagcacgttcacgtgagccagaccgccgtagatgtggccgacgatggagtagcagaaatccatcaggcgcttggaaataccgcccttggacatggtgaagccggcaaaggtatacagagggatggccagcagtgcaaagctgttcatgccctcaaacatgcgctgggcaatggtgacggtgctgccgccgcccaggaacaggatgccgcccatggcggacaggcccagactcatggcgatgggcacaccaaggaacagcagaacgaagaatgagatcagcagccatgcgatcatttggattcgcctccttcaggtttcgtggtaagctcaaccaccagattgagaacggcggacaggatgcacagcacaccggcaatggggaagatggtgtacacctgacccatggtgaactgcggcatggtggaaacggcctgctttgcgcgggtgcacagctggtagccgccgtaggtgaccatgacgtagaacaggatgatgaacacatcacggatgatgacaacgatctttttgcccagcggagtcttaccgaggatggaatccaccacctccacgcggaggttggtgcccatggcgttgatgccaatgcaggcaatgagcatggaccagacgttcagatactggctgctctccatgtaccacttgaagccgccgatgccggggatcaggcgcagcacaacgtttgcgaacagaattaccatcatagccgcgcacagaatggcggaaatgagggtggtgatcttgtccagagtggtttgcagttttttcacagtacaaactcctttccaagtgcgattcagataaaatgcaaagggacgaagggcacgcccctcgtccctttgcttcggttttatttcaaggttttctggtcagtgatctcagcgggcttctttccatgccttcagctgatccagcaggtcgccgtaggtatcagcgttgtcggtcaggaccttttcggtcgcagctgcaaacggagccagttccgggctgttgatcttcatgcccttctcttccagagcggagaccaaatcgttggtctgctgctcgttcagctcacggtcgtaatcggcagatgcctttgcagcgtcggaaacgatctgctgctggtcagcgctcagcttgttccagctgctctcggcaatggtaaaacacatgccggagtagatgtggttggtgatgctcaggtactcttgaacctcgaacaggttgttgttgtagataacggggatggggttctcctgtgcatcgtaggtcttctgctgcagagcctgatacagctcagagaaactcagcggctgggggttggcacccagagcggtcatggtagccatgatgacggggttctcgggggtgcggatcagcagaccgttcatatcggcagggctgttgatggggcccttggagttggtcacgcagcggaagccgttgcagtagtgggccagcacacgcatattctggctcagcaggccttcctcagcggcagcctcgatgtcgctgtccatgaatgcccatgcatcgtcgaaggtctcgaactggaacggcagtgcggaaatgcccatctttgcatcgtaggtggcaaagttggaagcgtcggtgatgatgatatccaccgtgccggaatccagagcgatagagttgatcaggtcagcatcgccgcccagctggccggaggggtacagctgaacttccacagcgccgccggtcttttcggcaacttcttctgcaaactgctttgcgccctttgcacgggggtcttcttcgttggtggagaagcccagcttcagggtgacagccgagccggaagcggcagcggaagaaccggtggaagttgcagtagaagcagtggaagcagcagtgctggtgccggagccgccgcaggcagccagacccagagcagcagcggaaatgccagccaccttcaggaagtcacgacgggaaatcatctttttcataagaattctccttcaaaaaaatatcttctcctgagccgttctcgtgctccggctcttgttccttttttaaatggtgcctttcttttccagcgcctttttcagctcggctgcaccaaagcgggggctgctgaggaccaccttgccaaacttatcggcgatatactgttcgcagtaggccatgctgccctgtgcaaacacgatcacgtctaccttgtcggcaatggtaccggccatctcggtcatgcgggccttgaactggtcctgatccagaccgaatgcaccgtccaccagacagtccaccagctccacgtgtctgttgcactcgcgggccatgcgcaggatggtgcccttggtgggttccagcgtggtgggcagggtagccatcacgccgatgcgctggcccttgcggacagcctcgcggcacatctcctcgtccacgcggacgataggcacaccaatgtactttgccacgtcctgtgcactgtcggcaacctcgcccacgctgctgcacaggttcagcatggcatccacgccttcctcagcggctttcatgtacatgccgatcaggcgtgctgccggtgcagtggtcacatagcctgccgcgcggacatctgccagaatgctggggtcctgcaggctgtacagctccacatcatcgcccagctgctttttgacctcctgctccaccagttcgatcagttccggggtggtgctggtatagatcagacctaccttcataacggaaaagcctccttttgtttttcgcgttctcgtgccggacaagcccgcagcaaaggctctttgctacatcctacctttagttcaatctcaacagcttgtccgtctttacatcctaccattagattactcttcggtccgcaaaaagtaaattggcgaatagccgatatttcgggccggttttggtcgttctgcacaaatgtgggatgcaggtggtgaaaaattcacttctttctggacatcatcccatcttgcggcgtataatacccttaaagaaaaagacagggaaggagccaccggaacatgaatccgtttcaaagtgataacatctggaaaaagaaggcccggcagggcaaggcgcagcagcatcctctcacgccgcagcaggagtggcaaaagcaggtgaacagcagcagcctgtggctgggcggcggcgtggtgctgctggcactgtatctggccgctgtccgcgccggcaccgtggcgctggacgcaagcgccgtcgtgctgatcgtggtggtgggctgcttctgcgtatacactgccgcatccctcggcaggctgatgaagaacaagccggaggaaaaggcagcaaagaagaaaaagaaagccaaaaaagagtgatcgttcatttaaaatggctccgcgtgcgctgcgccataaacagcggaattattatttttgtatattgcaaagccggaatgactgcggtcattccggctttgctttttcacgggaaggggtcgtaacaggtagtggcatttgcttcgcaaaccggtctgcggctcaaaagtcccactggggctttcatgccctgcgggcaccgccgtcctttctggttctcttttggcgcgcaaaagagaacgtatccggcggcaatgcattttataaaagccatacaaacctgccccacacgaatgccccctgcacaagaagcagcttatcttcgtgaaaaagcaaaacagccagacccgcggaacttgtcggggcaaggcccctccatcttgctcccgcaagaacgttctgccgcttgaaagccccactggggctttcattgctgcgcaaccgcggtctggttgttttgcaatcattaaaaataatttttccgctgaatatgcccagagcgaagcggagggcattctaaatcatcagagtgtcaacccagtaaaatttccaccgcttcccgcagggtgggcacttcgcccacattgcccgggaagataatgtacggcgtgccagggaacaggctttcggcaccggtctgccataccgggatgcccggccggatctggcccagcaccttggcgcatttcacgcgcagggccttcacgcccacgtcgctgctggtgatgccgccttttgccaccacaaaagccggggaagcggtcagcctgcccacgcagctttgcagtgcatcgctgatggcaacgctgcgcacgagggctgcttccggggtgtcgtccggcagggtgagcaccacgcgctttgtggacacgcagcaggtgatgccctttgcgatctgctgtgagcagtgggccacaatggcggctgcttccttttccagctcgcccggcaccagcaccttgtcgctgtccatctcaataaactcgatgccctgtacttttttcagttcttccagctgggcagtggtctttttggtgtggctgcccaccacgatgatgccgcctgccttgctttcctgcgtgaccatctttttccgggtgagcagcggctggtcggaaatattgccgatggccttgaccagtgcggccgcactgcggatggtgaagtgacggccctttgccatggcgcggtacagtgccactgcaaacaccttcacatcgcagtccgccactgcgttgacgatcacatggccgtaatcgtgcaccgccagcagctgggcctcgatgccgtcaaagtccatggcgcgcaggctttccagcgagatgcaggtcacgtctcctgcacggactttgccgccggttttttcctcaatgtattcgcacaggttgctggcgtggtagccaaaggtctcgtccttggcaaattcggtctggccgcagggcacaagctctgcgccatagcgcacataatgcacattgtccagtgtaaagcgtccgccctcgcggaagtaggggcacaggatgtcgccatccattttgtaaccgttctcagcctccgtcacctcgcgcagcaggtcggtctccagcgggtagtggccgcgcagggtggagtcgccgcggctgatgataaggtagtccatgccgaactcgcgggccaccttggcggtgttctccgcgatctcgcggtgggccttggtggtctcggccacggtaaagccgcggctgttggtcagaataaagaagagcttttccggcgcagcaaagcccttgcgcaggctttctaccgtccaatctgtataaacatagatatcatgtaccgtctgtacgccggtagggtcgtcgtccagcacaatgatcttgcggttgctggcggcagcttcggcggcaagggcggcgttcagtttttcctcatccacctgcggaaaattggccagaacatcggcactgcggatctgttccatctgaagctcctcctttattcgtacagcacctgtgcgatcagcaccagcggctcgtcgcccaggcaggcgatctggtgggtgtcgccgggcatggcggcaatgatgtcgcccttctccaagatctgctcctcgccgttgatgatgtggaccgcgcggccggagacgatgaccatgctttccatctcgtgctcatgcgtgtgcctgccaatggtcacgcccggtgccagcgtgtggcgcacgtaggcgcggcccttgcccagcatttcggcaggcgcatccagcaggcgttccatcatcacggtgccctcgccgcccatgcaatgggggatcggagtgggtttcatctcagaagctttcttatacaacatcccatgttccacctttcaagtcatctgcagcagcatacggcagagtgtttttaaacatcctacctttcaagtcaagtccattatacatgagcgcaagcggaatagcaagattttttcctgaaaagctgttcaattttgtgcaatgcgttttgtgcaatctggctgatatcccgccgttcctgccccgcaggcatacaaaaaagcttccccgccgcaggcacgcagcccacgaaaagggaagcttttgtctgattcaatttcgggtgcatctgacggaagtagtacaccgcagcataacactccgctttccttttttcggatcccgaaataaattggaactctgcacatgttcaagctgcagtttttgtgttttttttcagagaatccgttttttgttgccggagcagcgtttcttttgtataatggcagtgatggaaggccgatgccttttgcagatttttaatcacgacgtttcaaaagcgaggtgtactgattatggaatgggcaaaattgctgtcaactgaaaagctttcttctgaacctcctgagcccgattcgttcaaggagtatcccatcaatgcatttgaaaaggactacagccggatcgtttccagcgctgcattccgcaggctgcaggataaaacgcaggtgtttcctctggacaagagtgatttcatccgaacccgcctgacgcactcgatcgaagtctccacgatcgcccggcagcttggcatcatgatctccaaaaacacaacacagtacaagccaactgatattgctgtgccggaggatgccgaagccatcgcatcggtcctgctctgcgccggccttttgcacgacctcggcaatccgcccttcgggcatttcggcgagaccgtgatcggcgactggttcaaagagaaccttgaccatgtaaaatacaaaggacagccccttcgcagctggttatccgcgcagatgatcgctgatctggaaaattttgagggcaatgcacaggcgctgcggatcctgctgaaagcaaaacacggttccagcctcaatctgtccaaagcgatcatcagcacgctggtaaaataccccaccgactcctgctccgttgataaaggcagtgcggatatccgaaagcacaaactcggcttcttcgctgcagaacaggagacttttgagcagatctcggaagcggttgggaccaccactcccgacaaaggcatcgtgcgccatccgctgacctacctgctggaagcagctgacgacattgcatactctactgccgatctggaagatgcctttaaaaagggcctgttcacccttgaccagttcattgaatattacacaaattcttatgaccattcaaagatcgttccccacagaagccctgagtacttctccgatgagcggatccaagaactttccgcgctgcgcggtgcagaccacaccccagaaaacgacagcgctgcatttaaaaaatggctcacccaaacgcgtcagtggctgatgtatgtagccatctaccgtttttcctgcaaatataaagagatcatggccggaacctactgcggtgatctgtttgaaggaaccaatcacgccatcaccattgacattctgaaaggggccatgcggaaattcgccttcgatacgcccggcatcctgaaactggagctgtccggacaggtcattctcgattttctgctggatcattttgttcccgccgtgctgtactatgactctgcatactgcaccgacgggcaggcaccttccaaggccgacaaaaagcttctcgccatcttctccggcaattacaagcaggattaccaaaacgcccgaaccggcacggaaccttttgacttgtacctccggctgctgatggtcaccgactatatcagcggcatgacagattcctatgcccgcacgctgtaccgcgagcttagcggtattgaataacgctgccctgttcagatcccacgtgcccggttcgtctgccgcttatgggctacggcatgatcgttcaaaaactgctgatacatcactctggaagcctcgcacaacttcaaatcaggtgccagcttttttacgaagacactgcttgcgaatgcgaacgccttttgaattgcaaaatgatttttcggttgctatactgggcttatcaaattttttcgggaggatgccgcaatgaccgcacatacaatgcaaatcgggaacagaccttgccgcatttacggcgagccccatgcagaatacctgctgctccaaatgacaggcgaacacgagctgcaaagcatggaaagcgaggttaccgctattgcacagagtgcgcaccactttctgtttgcggccgtgcccgtggaaagctggaacgatgcactttctccgtgggaagcccctgctgtgtggggaaagcaaggatttggtggcaaggccgggaagacattgcgcttcctggcagagcaggtcattcccacgctgaagcagcagtttcgtctcccggagaacgtcaaaatcattctgggcggctactcgctggccgggttgtttgcactgtgggcatccactcagacaaagctgttctacggtatcgccgccgcatccccctctgtgtggtttccgggctggatggagtttgaacagcggcacccgatacaggcacagcgcgtttatctgagccttggcaacaaggaagagcatacgaaaaacgctgtcatggctgcggtaggtgataacatccgcaccctgcacagccgacttgcagagcgtggcgcagactgcacccttgagtggaacagcggcgggcactttaaggacgctgatttgcgtaccgcgaaagcctttcggtgggcgatggaggaaagccgatgaatattttgattgatgccgacggctgcccggtggtggacctgacattgcaaattgcaaaacagttcggcgttccggtcatcatcctgtgcgacaccgcccaccaaatcgagcgggaaggtgcgcagacgctggtgttcgataaaggggcagacagcgtagattttgctctcgtcaaccgggtaaaaccgggggatattgtcgtaacacaggactacggccttgcgagtatgtgccttgccaagtgcgcccgggtgctgaaccagaacggtctggaatacaccgccgacaacatggaagctctcatgctgcggcgttatgaaaacaaaaagctcctccgtgccggaaagcaccccaaggggagcccaaagcggacgaaggagcaggatgaagcatttgtcgccacactgacagatattttagcgagcatctgattttctgaacggaacaccggcgaattttttcgcgtcacattctctgtaagtgaaacccgtcagaacaaagcacctctccactgcatgaaatcattgagataccgctgctttatcctctggccacgattttctgagcgccgcataggaaataaggaagtttgcaagccaacctgccgggactgcaagccaaacaaaagcaatgccaaaacgcggtgcacaaatcaaagcaacagacaagcggattgcaaggtttaccatatttgcaataagaaacggccgcatgattccaagtccgcgaagaacgccatccgttgccatcttgatgcccatgaagatgaaaaagtaaccaagccatctcatataatcaccggacacctgataggccaacgcggttccgtcttttcccaagaacaacgaggaaatctgtgtgtgcagtgtttcaatgaccacgaaagcaagaactgcaaagcatagatccaacaccagtgcagcatgatacccttttttgatacgctcaattttctttgcgccaagattctgggatacaaacggcgaaactgcattgccgatggatacgaagatcagcgaaaaaacattttctacccgcatcgttgccgcatacccggcaagtgcctgtgtgccgaagggatttaccactgcctgcacgatcatcataccgatagacactgtggactgctgcaaaaccgatggtaccgcaatgcgaagcgtggaatacagctcctgccggtcgaacctgctaaaggagctcttgtattgccgcatccgagacagaaagatcaaaaacgaaaacacggcagaaattccttgtgcgatcaaggtcgcaagggctgcaccaaacacccccagaccaagaccggccaccatccagagatccataaaaatattcaggatagatgagaatatcagcagtcccaacggaattttggattcaccgatggaagtgaacatggtggaaagaatgttgtacatgaatagaaacgggaaacccacaaagtagacacgcagatacaatactgcttcttccaatatatcggcaggggtctgtaatccgctcatcatgaaatgggaaaagcaaaagccaaagacaccaaggacaacgcttaagatcaaaaagctgatcagggacgttgacacaatggttttcattttaccataattttttgcaccaaaatagcggcttacaagcacacctgcgcccacaccagcaccaagcgccacacaaataaaaacattggtcagtgcagcacaagcaccaacagccgcaagtgccgaggagccaacaaattgaccaactattatggaatcggccatattgtatacttgttgaaaaaagctgccaaggatcatcggcatcgcaaaaacagtcagcgctttaaggggtggatctgtgatcaaatattcatctttcgacatgattatattcctttcaaaaatcgtttatcgcaaattttatcgcaagttaagaaattcgtgcaacattcaaacggcatctttgcgatatgcaattcaccgctgttgcattaaaaagttgaattgctatagtattggaatctatccaatataagtatattcccccctgtctcaaaatgcaatctgcgacttctggcggagatggtggatattctcccgcgggctaagcaacagcccgcagggctgattgcttgcggtctgcggaccgccgccctgttctcatccgcaccatctagccgcaaaaaaggcaccagcctgagctgatgccttttgttggcggagatggtgg

SEQ ID NO: 1152 - DNA, 22225 bp, Unknown
  gut microbiota DNA sequence
aagtaagttatatatttctcactgtatcatgtgtttctccacggtagggctgcactgcagtctgcccggatgatttacaaatcccgccaaaagcgttatactacttatgattgtgtaatttggcaggaggtgagcgcatggcagagcagcagctggaacagatcgagggcaccgtggaggacatcatctacgagaacaccgacaacggctatatggtgttcgaggtgtccggcggcggtgtggtcacagtggtgtgcggcattgtgggtgaactgcacgcgggcgaaagcgtggtctgccgcggccgctacgagaaccacgccacctatggccgccagtttcacgcacaggagtgcgagaccgacatgcccaaggatctggaagcggtgtacgccttccttgccagccggtcactgccgtacatcggggccaagacggcggataagatcatcgacctgttcggtgccgaggcgcttgaggtgatcgccaacgacccggcccggctcacgcaggtgcccggcatctcggcggacaaggccgaccgcatccagcaggagttcaagcggatgttcggcatgcgggagctgatcgcctatctggcgcagttcgagatcagcccgcgccgcgcgatggaagtgttccgcaccttcggccccggggccatgcaggccattgcggcaaatccctatctgctctgcggcgaaccgctgcagctggatttccgccacgcggacagcattgcccagtattaccacatggaaggtgactgcgcccagcggctggaagcggccctgctgcgcaccctgcgccacaacgcgggcaacggccacacctgcctgccgcgcacccagctgctggaaacggcatccaattttatccatcagccgccggaaaagctggctgctgcgctggacgagtgcatccgcaccgaagaactgcgggtgaagctgtttgacggcacaccgtatatttatctgcccgacctgctggaagccgaggaggacattgccgcccggcttgccatgctgacaaaacggggcaagaataccgcccacgggctggataaaaacattcaaattctggaactgacgcagggctttgcctatgcgcccctgcaaaaggaagccatccgcaaagccatgaccgagaactgccttgtgctcaccggcggccccggcaccggcaagaccaccaccgtcaacgccattctgcagctgctggaggatcaggcggaacgggtggccctgtgtgcgcccaccggccgcgcggctaaacggctgagtgagctgaccggccgcaaggccagcaccatccaccgtcttttggaggtggactacaccggcggcgtggtcagctttatccacaacgacaagaacctgctcaagtgcgatgtggtcattctggacgaaatgagcatggtggatgtgaagctgtttcaggccctgatcgcagcgctgcgctacagctgccgcattatcatggtaggtgatgccgaccagctgcccagcgtcggccccggcaatattctgggcgagatcatccgctccgggctggtgcccaccgtgtgcctgaacgagatcttccggcaggcaaagcgcagcctgatcgtggagaacgcccaccacatcatctcaggtgaaccgctgcagaagggcggtaagaccgacgacttcttctttttggaatcggacggcgatgcggcccagcggttggtgtgtgatctggtcaccacccgcctgccgcgcagctacggcttcgatccgatccgggacattcaggtgctgtgccccaccaagcttggccctaccggcacacaggcactgaatgtggaactgcagaacctgctgaacccggaacagacgggcaagccccagctgcaaagcgccgcccgggtgttccgcgtgggcgataaggtgatgcaggtgcgcaataattacgagatcatctggaaccgcattggcggggagcagggcgtgggtgcctacaatggcgacatcggcattgtggagagcatcaacacgcgggatcgctccatggtggtgcgcatggatgacaagcggctggtctacccggcagaaaacctgggcgagctggaaatcgcctatgccatcacggtacacaaaagtcagggcagcgagttcccggcggtgatcttgccggtggcgcaggtgccgccgcggctgtgctaccgcaacctgttctacaccggcgttacccgtgcacggaagctgtgcatcgtggcgggccgcagggacgttgtgaaccgcatgatgggcaacatccgccagaacctgcgctacagcggccttgcctatcttttgcaggcagagctgccgccggaacagacggaagcagaataactccttccgtcaccttcggtgacagctccctcggaaagggagcctctggcgaagaggaaaagctttctgcactgccaaagccttcctccgggagacagacttcccccggccgggacagattctccccgcgccggggagaaatgtcaccacaggtgacaaagagaggaacagatgtcacgtaagtgacaaaaaggggaacaggtggatgcgaacaaagtgagcagacggaaggagctcaaaaccggtatactttttacggcaactatgctatactgtaggctggtatgatttccggcctgcatcaacaggccgttgtttcgatagagaaaccagagaaaggaaaaagagaacttatggcacagaacgatatcggtatcgatcttggtaccactaccattatcattgcgcaggagggcaagggcgttgtgctcaaccagcccagcgttgtggcaatggatacccgcaagaagaccgtgctggaagcaggcgataaggcccttgctatggtgggccgcaccccgaactatatttctgccatcttcccgctgaaggacggtgtgatcagtgaccataccatgacccgtgagctgatctgccgttttgtcaagcaggtgtacagctcccacatggtcaagccccgcgtggccgtctgtgtgcccgctgccattaccggcattgaaagcgatgccgtggtggaggctgtggtggccgctggtgcccgtcaggtgtacctgatcgacgaacccattgccgctgcccttggctccggcatcgacatcacccagccggagggccgcatgatcattgatatcggcggcggcaccaccgatattgcagtgctttctctgggcggcaaggtcaaggccaccagcgtgcgcgtggccggcaaccactacgacgaagagatcctcaagttcgtgcgcaacaagtacagcgttgccattggccagcgcaccgccgaagagctgaaaaagaacgtggcctgctgcccccagaagactgatttccacgagaccatggagatcaagggccgcagcctgctcaccggcctgccggtgcgtgtgaatgtttccactgacgacctgtacgacccggtcatgatgctcagcgagcagatcggcaccgcggcccatcaggtgctggaaaagacccctccggaactggcaggcgatatcttccgcaatggtgtcatgctgaccggcggcggtgcacagctgcacggccttaccgaatacctgagcgaagagctgaaggtggaggtgacggtttcgcccgatcccgtcaactgtgtggcactgggcactgccatgagccttggcctgaacgacaagctggaaaccggctttttggatgcaacgccccgcattggccgcagataatcaaagctgcaccatttatccatgaatctgaacaaaagcgccaaaaagaaaaaatatctatttttgttgaaataaattggaaaataaggtataatgtacccaaattgattttctgctgacgatcttgtatcggacgcagtatacaagaaacaggaggaaaaccatggatttaggttttgacgtggtcgttaccattaccggcatcgtactggtgttcttgatccttatcctgctgatggcgattatcacgctggaaggcaagatcttcgattcgatgaacgcaaagaagaaggctgccaaggaagccgccaaggctcccgctgtacagcccgctgcacccgtgcagcaggccgcagctgctcccgctcctcaggtggaagagggcattcccggtgatgtgatcgccgccattatggcagcaatccatgcaatgggcaacggcaagtacaccctcaaggctgtgcgccgcagcaagaacggctggggcaatgcgggtgtaaacgacaccaccgcaccgttttaacagaggaggaagagcatgacacagtttattgatactctggtcggtattttccaaagctccggctttgcgaagtttggcgagccgggcggctacctgtacgcagttatgatctgcgtgggctgctttttgctgtacctggccatcgtcaaagagtttgagccgctgatcctgctgcccatggcattcggcatgatcctggcaaacctgcccggcagcggcgttatccacatgcaatatttcgtcggtgacggtctggaacaccccatgtgggtggagatcctgaacaacggtggtctggccgatatgctctacatgggcgttaagctgggcatctacccgccgctgatcttcctgggcatcggcaccatgaccgacttcgcacccctgatctccaaccccaagagcctgctgctgggcgctgccgctcagttcggcatcttcggtacttacatgggcgctcgtctgctgaccgctaccggtctggtggacttcacccagaagcagtccgctgctatcgccatcatcggcggtgcagacggtcctaccgctatcttcgttacctcccgtctggcacctgagctgctgggctccatcgctgtggcggcctacagctacatggcgctggtgcctgtgatccagccgcccatcatgaaggcactgaccaccaagaaggaacgtaccgtcgtgatgaagcagctgcgcaccgtctccaagaccgagagggtcatcttccccatcatggtcaccatcatcgtttccctgatcgttccggatgccgccgttctggtgggtatgctgatgctgggcaacctgatgaaggagtgcggcgtggtggatcgcatccagaagactgccggcaatgagctgatgaacatcatcaccatcttcctggcactgtctgttggctgcaccacctctgcaaacaccttcctgaacacccgcaccctgttcatcatcgtgctgggcctgattgcattctccttcggcactgccgcaggtgtgctgttcggcaagctgatgtatgtgctgaccggcggtcaggtgaacccgctgatcggttccgcaggcgtttccgctgtgcctatggccgctcgcgtttcccagaaggttggccagagcgagaatccctccaacttcctgctgatgcacgcaatgggccccaacgtggccggtgttatcggctctgccgttgctgctggtatcctgatcaacattttcagctaagcgctttctgaaaagcatttttccgcccgtcggttcgcaagagctgccgggcggtttttgttttacgatttgaaatgcccgccgcgtttgctttgggcataaaataaggaaattatattatttatttcgtgtttgtcgcagcctgcgggctgctccaaacacattttcacaaaaaggccgtaacgaaaaacggctgctgttttatcagatgcaatttttctctacgacctctttcgtgaaaaagtaactccgaaaagcccgcaggcttttcggagttataaattataaaaatattttttccgctgaaaatagccagagcgaacgcggcggctattctcaatcgttttgaaatgtggtatactgtattttgatagtataaacataaaaggaacaggggaaaccatggcaacagatctcacacaggaattctgcgctctgcgcgatacctatatcgaaaaacagtttggccgcctgaacgatatgcagcggcaggcagtgttcaccaccgatggcccgctgctcatccttgctggtgcaggcagcggcaagaccaccgtgctggtaaaccgcattgcaaacctcatccggttcggctcggcccacggctccaaacagacaccgcgcccggccacggaggacgatatcaaggctctgcgcaacgccatcatgaccggcactgccgcccccagctggctggacgggatgctgcgccagaacgctgtgcgcagctggaacgtgatggccatcacctttaccaacaaggcagcaggggagctgaaggaacgtctgcgccggatgctgggcggcgaggagggcgacgaagtgttcgcttccaccttccactcggcctgtgtgcgcatcctgcgccgctgggcggaggagatcggctacccgcgcagttttaccatctacgataccgatgattcccagcgtgtgatgaaggctgtctacaaagacctgaatgtggacgataagttcctgcccatcaaggctgcgatcaaccagatgagccgatggaaggatcagcttgtcagcccggaacaggcccttgccagccccgcaaaagataccaaaggcgcgctgacggcccgcatctacgcggcctacgaaaagcgcctgaaggaagccggagcattcgactttgacgacctgatctaccagactgtgcagctgctggccgagcacaaggatgtgcgggatttctaccagaacaaataccgctatctgctggtggacgagtatcaggacaccagtgtggcgcagttccgtctggtgagcctcctcaccggcccggaaaagaacatctgcgtggtgggcgatgatgaccagagcatctaccgcttccgcggcgctaccattgagaacatccttaatttcgagcgcatttacccgggcaccaagaccatccgtctggaacaaaactaccgctctacgtccaatatcctgaacgcggcgaactgtgtcattcagcacaacaccgagcgcaagggcaagaccctgtggaccagcaatggcgagggcgataaggtgcaggtgtacaccgccgagaacgagcaggacgaggccagccacatcgcggatgtgatcggccagcacctgaaagagggcggacatctggccgaccacgccatcctctaccgcatgaacgcccaatcggcccccatcgaaagctactttacccgtgcaggcatcccccacaagatcgtgggcggccagcgcttcaacgaccgcaaagaggtcaaggatatccattcctacatgtccatcgtggcgaacccccgcgatgatgtgcgcctgcgccgcatcatcaacgagcctgcccgcaagatcggtgccaccaccgtggaggtgattgccgatctggccacgcaggagggcgtgagcatgctggacatcatcggccatgccgaccaatatgcaaagctcagccgcgccgtaatgccgctgctcaagttctggcagatctatcagcgcctgcaggattctttggagacccgcacgctggacgagtttgcagccgatgtgatcgagctgaccggctataaggccatgctggaagccgatgcagccaagggccacgaggatgcggctgaccgcctgcagaaccttggtcagctggtgaacaacgtcaagaactactgcgaccagcacggtgaggaagccacgctggaaggctatctggaagatatcgccctcatcagcgatatcgacagctataacgagagcgccgatcaggtggtgctcatgaccatccactccgccaagggtctggaatttccgtatgtgttcctgattggcatggaggagggcgtgttccccagcgagatgagcaagtattccgaagctgatctggaagaggagcgccgccttgcctacgtgggcatcacccgcgccaagaaggagctgtacatctccaacagcgtttcccggatgctgtatggccgcacccagcgcaacgagccgagccgctttttgcgggagatcgagccggagtatatcgaggagacccgcagcccggtactggaacagcgctcccgctttggcggctggggcgacagctatcgtgatacggtgcccggtggtgcatccggttactccgggccgtccggatggggccgcagcgccagtgggtacggtacgggcggctacggaagcggctatagcaatcgcagcggctacctgaaccgcgaatacaacgcaggcgagggccgcggctttggctcggcctatgcaaaccggggccagagccagagcggatacggttccggctatggccgcagcggcgcaggtactggatatggttctaattacagttctgcatattctgacggaacaacgcagaaaaaatctgcaaagcaaatctcctttacaggcacaccggcagcaaaaaccgctgcaaaaggcgcaaaacactatgagccgggcgatcttgtggagcacaaggtgttcggacgcggtcaggtagtggctgtgaagcctgccgccggagatcagatcgtggagatcaactttgaaaaggtgggcatcaaaaagaccatggccaattttgcgcccctgaccaaaatcactgcggaggaataacacacttatgatgactgttcgtttgatcgcacataccccggagccggaaaaggtggtggctgcagcggcaaagctctgctattccgatgcgcacatcaccgacctgctggacggcctgaccgaggaaaagaccgcgaagttcctgaccatgctcagcgatctgggccatgccagccccattgaacatgccagcttcacctttggcatcgagggggtcagccgcactttgctggcgcagatcacccgccaccgcattgcatccttcagtgtgcagagccagcgctatgtgcggctggacgatttccgctatgtggtaccgcccgagatcgaagccatcccggaagcaaaggaagctttccttgccagcatggaagaggacgcaaagcgctacctcgaccttgcccacaagctggaagaaggccacaccgcccgcctgatggctgaaggaatgccggaaaagcaggcccgcgccaaggccagcaagcaggccaacgaggatgcccgctttgtactgcccaacgcctgcgagaccaagatggtggtcaccatgaatgcccgcagcctgcagaactttttccacctgcgctgctgcagccgcgcccagtgggagatccgggagctggccgaaaaaatgtttgagctggtgtacccggtggcaccgcatatctttgcaaagtccggcccggcctgtgtatccggcccctgcccggaaggcaggatgtgctgcggaaaaaccgccgaggtgcgtgcaaaatatgccgcgatcaaagaaggtgccgaagcatgagcaagggaaaactgatcgtactggaagggctggacggcagcggcaaggccacgcaggcaaagctgctggcagcacatttaaaggaacagggcttttctgtgcgggagatcaccttcccgaattatgagagcgactccagtgcccttgtaaaaatgtatctggcagggcagttcggccagcacccggacgatgtaaacgcctatgcagcctccagcttttatgcggtggaccgctatgccagctacaaaaaggactggggcagtttttacgagaatggcggcatcatcattgccgaccgctacaccacctccaacgcggtgcaccagtgctccaagctgccgccggagcagtgggagagttttctcggctggctgtttgattttgagttccatctgctgggcctgcctgcgccggatgaggtaatctacttacaggtagaccccgccgtgagccagaagcttatgacccagcgttaccacggcgacgagagcaggaaggatgtgcacgagaaggataccgagtatcttgcccgcagccgctgcgccgccgagtattgtgccgcgcaccttggctgggccgtcgtgcattgcaccagcggggacaacatgcgcagcatcgaagacattcaggctgaagtgcaggagatcgtgttgaagcagctgacataattttcgataagagggggcatcctgacagatgtatcgtttgatgcagccggaagataaaccggcagtgctggctttatggcagagccagcgcaatgaatcagaagaatttgccaaaaaggccattgagcagtttgcaggcgaacagaacgtctatgtggccgaggaaaatgacgagatcgctgcggtggtgctggctgtgccggtcacgctgcagggccgcagcggcacctacctgtacggtctgtgcggcgagggcagcctgatcctggcgggccttgtggactatctgtgtgcccagcagaagctgcgcggcgcagggtttacggtggcggtgcccaccagcccggagcaggccgcactgctgcaggataagggctttgcatgggccttcgccctgcgctgccttccccgcgaggtggagcgcaacctgtggagtcaggcggaatttgattccgtcaccgccaaaaagctgtgtgagctgcgggagcgcttctggcccgataccgtgcagctgaccccggagcgcatggccgtggtgctgggagatctgtactcctccggtgccaccatcgtttccagcgcccacggctatggtatttatttccgcaaggaggatacgctttactttgtggagctgcaggccgacaatgaccgcgccgccgaagtactgatggaagccgcccgcgaaaaggaagtcattgtggaaaaggcggtcattaccgtgggcgcatcccagccgctgttcctcggcgagggcacccggcaggactacggcatgatccgctttgatgccgaaccctttgatgtagccgaaagctacatgcgcctgatgctggaaaactaagataaaaggaaggtgcttatggcacacgaaaaaaacacccgcaaaaaaggcggtgtagggaagatcctgctggtgctggtggtactgctggcgctggccgttggcggggcgctgctgtttgcgcacaacgagatcagcggcaatggcagacctggcacggaggtaacggtgagcatcccgcagggcagcggcgtttccgtcattgcgcaaaagctcaaggatgcgggtgtgatccgctcggcctatctgttccgctggtatgtggggcaaaagggtgcggcatcaaagctgcagtatggcgattttaccctgcagaagagcgcctgttcttacgatgccattattgcggtcctgtccacctacgccaaggccgaaacggtgcgcgtgaccatcccagagggaaccacggccattgccattgcccagaagatggaagccgccgggctgtgcagcgccgaggatttcctgaaggaagccaacgagggcgatttcagcgaatacaccttctggcagtacgtgccggacgatgccgacgcgccggaccgctttatgaagtgcgagggctatctcttcccggagacctacgaattcttaaaggacgacaccgtgcacaactatgtagccaccttctatgcccagttcgatgcacagatcaccgatgagatgtatgcagaacttaaaaagcaggatatgaccctgccccagctgatcacactggcatcctttgtgcaggaggaagcgggcaacagtcaggactcgaacgtggcacaggtgttccgcaaccgtctggctgcggattcaccctacccgcgcctgcagagcaacacctccagccacatccagagcgacagtgacaacaattacctctggaactgggtggcaccctactatggcggctgggataatatcccggaaaatatcgtggctgcgtatgatacctacagctgcaagggcctgcctgccgggccaatctcgaaccccggcattgcggccatcaaggcagcgctggcccctcagcccaatgaggaagccaaggatgcctatttctttgtgaccgacctcaagggcagctattattatgcccgcaccctgagcgaacacaacgcaaactgccagaaggcagcacaagtgaacaaaactgtgaatacggaaaaatgagaggaatttgaactatgctgcaaatcccggaactgctggccccggcaggcgatctggaacgcctgcgctatgccatcaactacggtgccgatgccgtttactgcggcctgcctgaatttggaatgcggtctgctccggccaactttacgccggaacagctggccgagggtgtcatctacgctcacgcccgcggccgcaaggtctacctgaccatgaacaccctgcccaccaacgaggaagccgaccgcctgcccgaggccatcaaggaagcagccaaggccggtgtggatgcctttatcgtggcagaccttggtgtgctggatgcctgcaagacctttgcaccggacatcgatgtgcacatgtccacccagacaggcatcaccaactgggctgcggcccgcgccgcctacaacatgggcgcaaagcgcgtggtgctggcccgtgagatgaccctgcaggatattgcaatcctgcgcgataaaacaccgccggagctggagatcgaagcctttgtgcacggtgctatgtgcatgagcgtttcgggccgatgcctgctttccaactacatggcgggccgcgacgcgaaccgcggccagtgcgcccagccctgccgctggaaatactatctcagcgaggagacccgtccgggccagctgtacgagatcggcgagaacgagaacggcagctacatcctcaacgccaatgatatgtgcaccgcgcctttccttgatctgatctgcaaggccggtgtggacagcctgaagatcgagggccgtgccaagaccttctactatgtggcaagcgttactgccgcctaccgcagggcgctggacgcttatctggccgacccgctcaacgacaactttgagctgcctgctgaagtgtacgaggagcttacccgtaccagccaccgccattactcgccgggcttctactttggccgcgagcaggccagacaagccaccgacagcgctacttacatccgcgagtgggagtttgtgggcacggtggacggctgggagaacggcgttgcctcctgccagcagcgcggcaagtggagcctgggcgacactctggaagccctctgcccggatggccgcagcattccgctgaaccctgagtggatcgaaaacgaagccggtgaacgggtggagagcaccccgcatgccatggaaaaatacaccattcccacgccggagctgccgcccatgagcctgctgcggcgcaaaacggtataaggagaccacaatggaagcaacacgcctgtgtccatactgcctgcagccgctgcccggagcagcacaaagctgcccgcactgcggcaaaagctttgccgggcgcaaccccggcggcaccctgccggtgggcaccgtgctggccgggcgctacaccgtaggggaaatgctgagcatcgacggcgagggcatcctctaccgcggcgcagagaatctgggccgtttccgggtgaccatcaaggaatatctgcccattaccctcacggcggagcgcacggcagaaagcaccctgcggcccaagaccggcagtgaggtgctgttcaaaaccacccgcatggattttgcggacctgtaccgctccatccagcgcatcactccggccaatggtctggaagccgtgctggatgtggtggaagccaataacagcgtttacgccattctggaaaatctgggcggcaccccgctggatcagtggctggaaaaccaccccggcaccatccgcccggacgatgcctgcaccatgctgcagccggtgtttgaaggcgtagccgccatgcacaagatcggtctggtgcaccgcggtatctgcccggagaacatccgcgtgatggaaaacgaccgctgccgtctggcaggctatgccacggtgggcctgcgcacggcgggcagcggcctgcacgaacagctgtacgaaggctattccgccccggagcagtattccaccgcagagttcgagggccgctataccgatgaatacagccttgcggccgtgttctaccgcatggtgtgcgggcaggccccggtgcctgcagcgcagcgcatggtgacagactccaacccacgcgcaaaatcggtgaacggcagcctgccgctgtacgtctcgcaggtgctgcagctgggcctgcgcctgcggcccatggagcgcatccagaccgtgccgcagctgtatcaggccctttcttccaaggaatacaccgccgagctgacccgcaccatgaagccggagactccggtgcgcacagcccagccggagccggaacgcaaggagcatctgctcagcttaaaagcgctgctggcgggcattgtgatcctgctgtccatcctcattctgctcacgctgtggagcgtgctgagccagcacatccaccagcctgccgcgtcggctgcggagtcggaaccggccagcagcgaggtgatggtgccgcagaaccttgtgccgaactttattggcatggactacacgcaggtgcagaacaaccgggaatataccagcatgtatctgttctatgtcaccgaggaatacagcgataccgccccggcgggccagatcatccagcaggagccgagcgcggacactgtactcaaggcaggggagaccatacagctggtggtgagcaaaggcccgcagatggccgagatgcccaatatcatcggctttacgcaggatggcgcggtaaaggaactggaagcccggggccttgtggccagctgctttatggtggtgaacgatggctcctatgcatccggctgcgtggtgcgtaccagcgaggagccgggcaccaaggtggaagtgggcacggtgatcaccgtgtatattgcggcagaccccagtgtgcagatcacggtaacaccggaggaacccgccgctaccgaacccaccacgacagagccggcccctccggaaacaacagatcctacccccacggaaccggaatacaatacagactaaaaaacaaaagcagaagcgggagccttgcaaaggcccccgcttctgcttgtttaggataggaaagagaatggcttagttagaggttggtgtagcccatcaggtagcggtctacctcggcggcgcagtcgcggccttcgcgcaggccccacaccacaaggctctggccgcggcgcatatcgccgcaaacgaacaccttttccacgttggtcttgaagctgtggtctgccacgttgccgcgggcggtcagctccacaccaaatgcatcggccacgtaattttcgcagccggtaaagcctgcggcgatgaacgccaactggcagttgtaggtaaattcttcaccggtaggcaccatgctggtacggccggtctcagggttccgctccggcttcaggtaggagatgatagcaccggtcagattgcctgcatcatccttcaaaaattccttcacggtggtctggtacacgcgcgggtccttgccgaactttgcaaggcactcagtctgaccgtagtccaccttcagcacacggggccactccggccacgggttggaggctgcacgctccttgggcggctgcggcatcatttccagtgccaccagatcggtgcagccctgccgcagggccgtgccctgacagtcgttgccggtatcaccgccgccgatcaccagaacattcttgcccttggcatcgatggccttgccgtccgcgaactggctgtccagcagacttctggtcacgctggtcaggtagtccacggcaaagtgcacgccgtttgcatcgcggccgggcacattcaggtcgcgggccttcttggcaccgcagcacagcaccacggcatcgtagccgttcagcagctcttcggcggcaacagccccgcccacatccatgttggtgcggaactccacgccctcagcctgcatgatcttgatgcggcgctcgatgacggatttgtccagcttcatgttggggatgccgtacatcagcaggccgcccacgcggtcggcacgctcgaacacagtcacggcgtggccgcgcttgttcaggtattcagccaccgaaaggccggaggggccgctgcccaccacggctacgctcttgccggtgcgggagggcggcggtgcggcgtgcagccagcccttggcgtaagccgtttcgataatggcgtgctcgttctcgcgcacggtcacgctgctgccggtcacatcgccgcaggtgcaggccgcttcacacagggcagggcacacccggctggtgaactccggaaaacggttggtggccatcagccgatgcatggccagctcccacttgccatgataaacaaggtcgttccactccgggatgaggttattcagcgggcagccggaagccatgccgccgatcatcatgccggcctgacagaagggaacaccgcagtccatgcagcgtgctgcctgcgtctgctgctcctcgcgggagagccagacgtgaaattcgttaaagttttcaatgcgttccagcggcggaacatccgtgctggttttgcgcgtatagtcgataaatccagttgtcttacccataacgctgccctccttacttcttcttctgcaccgtgtagaatgcttcgatctgtgcctgctcgccgtccagaccgcgctcctcaacggatgcgatcacacgcagcatacggtcataatcgtagggcagaactttcttgaacttgggcaggaattcgctgaagttgtcaaggatctctttgccgcggggagagccggtggcctccacatgttcgcggatcagctctttcagggtggcaacatcgtacttgtgctccacaggctccaggctgacggtctccttgttcacgcgctggtagaagtcccagttctcgtccagcacgtaggcgatgccgccggtcataccggctgcaaagttcttgccggtctggcccagaaccaccaccgtgccgccggtcatgtactcgcagccgtggtcgccaacgccctccacaacggcggtggcaccgctgttgcgcacggcgaagcgctcaccggccacgccggaaatgaacgccttgccgctggtagcaccgtacagggccacgttgccggtgataatgttctcctcgggcttaaaggtgatgcccttgggcgggcgcacgacgatcttgccgccggacaggcccttgcccatgtagtcgttgcagtcgcccacaaggtccagcgtcaggccgttggggatgaaggcaccaaagctctggccgcctgcacccacacagtgggcggtgtaaacatcatccggcaggctgttgccgtatttgcgggtgatctcgctgccaaagatggcaccaaaggcgcggtcggtgttggagacatccagcgtcacgctctgggcatttttgctgctgagcttgaacttcttcatcagcaccttcatatcgagggtgttttccagatggaagtcgtaggtgtcctccttcacgaagtgaacattgctgttctcgatggcagggttgtgcaggatgcagtcgagatccatcttggaagcgcggctgccgggtgcggcaggcttgaccttgagcaggtcggtgcggcccaccagttcatcgatggtgcgcacgcccagctttgccatgtactcgcgcagctcctcggccacaaaggtgaggtagttgatgatgtattccggcttgcccttgaagttcttgcgcagctccgggttctgggtgcagatgcccatggggcaggtatccagattgcacacacgcatcatcacgcagccctcggccatcagcagggtagtgccgaagccgaactcctctgcgcccagcatacagctgatggcaacatcgcggccggagagcagcttggagtcgctctcaatgcgcacgcgggtgcgcaggccgttcaggatcagggtctgatgggtctcggcgatgcccagctcccacggcaggccagcgtgcttgatggaagtacgcggtgctgcaccggtgccgccgtcgtagccggacaccagaatgacctgtgcgccgcccttggcaacaccggccgcaatggtgccaacgccggcctcactgaccagcttgacattgatgttggcgctgcggttggcgttcttcaggtcgtagatcagctctgcaaggtcctcgatggagtagatatcgtggtgcggcgggggagagatcaggcccacaccggtggtgctgtggcgggtctttgcaatccacggatacaccttggcaccgggcaggttgccgccctcaccgggctttgcaccctgtgccagcttgatctggatctcttccgcagaaacgaggtatttgctcgttacaccaaagcgtgcggaagccacctgcttgatcttggaattgctctcgctgtggtagcgctcttcgggttcgccgccctcgccggtgttgctgcggccgcccagacggttcagggcgatggcaatggtctcatgggcttcactgctcagggcaccgtagctcatggctgcgcccttgaaccgcttgacgatggagcttaccggctccacctcttccagcgggatgccgccgtcaggagcatagttgaagtccagcaggctgcgcagatgcacgccgtcagcacccatattgtccacggtgctggtgaactgcttgaaagccgagtagtcgttcgtccagcaggctttctggaacagatggatggtctgggggttgaacagatgttcttccttgccgctgcggaacttgtgtgcgccgctgtcggccagctccatgttgatgtccagacccagcgggtcgaaggctgcgttgtgctgggcttccacatcggcctgaatgtccgaaagggtaatgccgcccacacggctcaccgtgccggtgaagtatttgtcgatgacatccttggagatgcccacagcctcaaagatctggctgctctggtagctctggatggtggaaatgcccatcttggaggcaatcttcacaatgccgctgaggatggcgttgtcgtagtcctccacggctgcatagtaatctttgtccagcaggccttcgtcgatgagctggccgatggtctcatgtgccagataggggttgatggcgcaggcaccgtagcccagcagagcggcaaagtggtgcacctcgcgcggctctgcactttccaggatcagggccagtgcggtgctcttcttggtgcggatcaggtactgcgaaaccgcggaaactgccagcaggctgggaatggtcacgtggtattcatccacatcgcggtcagaaaggatgatgatgtttgcaccatccttgtaggcgcggtcgacctccagaaatacacggtcgatggccttttccagactggtattcttatagtagttgatggacaccgtggctaccttgaagccgggcacgttcatgtatttgatcttgagcaggtcggtgctggtcaggatggggttgtgcaccttgagcaccttgcagttctcgggcttgtcctccagcaggttgccgtgtgcgccaatatacacgctggtggaagtgaccaccttttcgcggatggcatcgatgggcgggttggtgacctgcgcaaagcgctgcttgaagtaattgaacagcggcggatgctggttgctcagcacagcaagcggggtgtcggtgcccatagcgccggaaggctctgcgcctgcccgtgccatggagaggatcatggtgttcacatcctcatacttgtagccgaacaccttctgcaggcgggtgagctgatcgccggtgtagctttccaccttcacgttgggaattttcagcctggccagctccacaaggttgcggtcgatccactcgccgtaaggctcacggctggcgtagaactccttgagcttttcgtcatccaccacttcacccttgacggtatccaccagcagcattttgccggggcgcagacgatccttgaccaaaatattatccggctcgcattccagcacacccacctcggaggacaggatcatgcggccgtccttggtgatgtaatagcggctggggcgcagaccgttgcggtccagcacagcgcccatcacgtcgccgtccgagaagaggatggcagcggggccatcccaaggctccagcatggtggcataatactggtagaaatcgcgctttttctggctgatgttcttgttgttctcccacggctcgggaatggtgatcatcacggccagcggcagatccatgccgttcatcaccatgaattccagcgcgttatccagcatggcggagtcggagccggaagtgttgatgatgggcaggatcttgttcatgtcgtcctgcatgatggagctggagatgctctcttcacgggccagcatggcatccgtgttgcccttgatggtgttgatctcgccgttgtgcaggatgaagcggttggggtgtgcgcgcatccagctggggttggtgttggtggagaagcggctgtgcaccatgccgatagcggattcataatcctcgtcctgcaggtcggtatagaacaggcgcaggtcgtgcacaaggaacatgcccttgtacacgatggtgcggctggacaggctgggcacataagtgccgttgctggcctgctcgaacacgcggcgcacaatgtacagcttgcggtcaaaatcgatgcccttgctcaccttggcgggctttttgatgaagcactgccagatagcaggcatacagtcgcgggctttctggcccacggcatccgggttcacgggaaccttgcgccatgccagaaactcgaggccttccttgcgggtgaccacctcgaacagcttcatggcctgcgcacgcaggtgttcgctctgggggaagaagaacatgcccacaccgtactcgcgctcgttgccaaggttgatgttcagttcttcggccaccttggagaagaacttgtggctgatctgcagcaaaatgcccacaccgtcgccggtcttgccctcggcatccttgccggcacggtgctccagccgttccacaatggccagtgcatcgtccaccgtctgatggctcttgcggcccttgatatccaccacagcgccaatgccgcaggcatcgtgctcaaactgtggatcgtacagaccaagggtgtttttctgctctgtaaagttttccatagactttcccatccttatctaaaatcctcaccggtgcggcaccctccgcattttgacaaaaaagaaaaagcgccccgcaagggcatactttacccttgcagaacgcctttgttccggtaactattattatactgaacgctgaaaaatcttcaagtgacagctgcaccaaatatgacaactgctttacaccacttcttgtgcgaaacgccgcgtatggcggtcagttgtagctatagtgagaacagtgcaggctcaatgtctgcccagaatggcctgcaggtcattttccggcgttgttacggcttttaaatcgtacttttgctgcagggcagccacaacgaccggcgagaggaacgggggcagggtaggccccagccggatgttccggatgcccagcgccagcagcgcgatgaggatgcacacggccttctgctcaaaccagcacagtaccagcgagaggggcaggtcgttgacgccgcagccaaaggcgtcggccagcgccaatgcgatgcggatggcgctgtaggcgtcgttgcactggcccacgtccagaatgcggggcaggccggtgcccggcacggtgccaaggggcaggtcgttcaggcggaacttgccgcaggccagggtcagcaggatggtgtcgggcggggtaaggcgggcaaactcggtgtagtagcggcggctgggccgggtgccgtcgcagccgcccaccagaaagaagtgccgcagcttaccgtcccgcaccgcctgcacgatctcgtccgcgtgctgcagcacggcggtgcgggcaaaaccggtggtcaccgtggagccgccgttcaggccgggcagcagggtgtcctgcgcgtagccgcccagctccagcgccttttcgatcaccggggaaaagtcgcgcccttcgtcgatgtggggcacgccggggtaagccaccaccgaggtggtgaacacccggtcggcgtagctggcgcgcaggggcatgatgcagttggtggtgaacaggatgggcgcggggatgtcctcgaactcccgctgctggttctgccatgcggtgccaaagttgcccttgaggtgggggtagcggcgcttcagctccgggtagccgtgggcgggcagcatctccgagtgggtgtaga

SEQ ID NO: 1153 - DNA, 18788 bp, Unknown
  gut microbiota DNA sequence
gaagtcattcttttgcctcagcgcttggcgctcaagtataataccacacccccgcctccttgtcaacactttttgacagattttttccaatttctttgcagaataaaggatctccctgtttttcacccgttacagggcatgctttttcttgacaaggctgcagacagaacgtattatggagtcatcccccagcatcctgtgtaaggtagctatacttattctataagggagaagcgccatgtcatgtgtcagcatccgcggcgggcgcgctattatattatatatacattatattgcgctgcagaggagggctttgtttatgatactcaccgtcaacattggcaacacccacatcaccgtgggcggctacgagcaggatactctgcgtttttgtggacggctgcactctgataccgccgcaacggtggacgaatacgccatccgtctggtgaatctgctttctctgcacggtgcatcgccggcacaaattgaaggcggtattctgggcagtgtagtgcccgtgctgagcggccgggttctttccgctttgcgtatcctctgcaatgcgcgcatcctgacggtcggccccggcctgaaaagcggcatcaagcttcggctggacaaccccgcccagctgggcgccgagcttttatgcggtgctgttgctgcactggcagagtgttccgggccgctggtagtgatctcagccgataccgctatctccatgatggcagtcaatgccaagcaggagcttgtgggcggagtgattctacccgggccgcagctctcgctgagcgcactggtaaagaacaccgctcagctgccgcagatcgaccttgccgcaaaggctcctgcatccattctgggcaagagcacctcttcctgcctgcagaacggctttgtactgggcaccgccagcctgctggacggtctggcagaacgtttctgcgcagagcttggcccgcagacagcattctacgccaccggcaatctgcccattcccatccgggaagcatgctgcacccccattctataccgggagaccctcatcacagacgggctgtaccgcatctggatgaaaaacaaaaaaggatagctcgaatcctcccggcgcactgaaaaaagaaaaaccagaacacgaatgtgttctacgggtttcaggacagttcgatttttccccggatgaacagtagtcctcttgttagacattcctacaggttggcaaccgcaggctaagcaaagccgcgctgtggctgattgcttgccctgctgtgcagggcctgacgggttgcgtttgctgatttttctgcagccccttggcagggctttgaaaaatcagaacgcggccccaacaactcctccctgtttcagccgcaggctgcggtcgtcgtcgttgctgttcgaattctcccgatcgcacaaaaagaatccccggcacacgaaagtgtgtcggggattcttggtgcgaccgggaggattcgaacctctggccttccgggtcggagccgaacgctctatccagctgagctacgatcgcacatatttatttcatcggtgtaaagtagtatagcacagccacacaaaaaaatcaaatatgaaatgtcgatgctatcttgcaaaagccgcagcgacccatataatagagggtgtgccccggtgtgcgcgggcacggtttaggttaaaggataaaaagagaacatgaaatcaaataccaaaacgctgaccgaaggccctctggccaaacagatctttctggtcagtctgccgctggcgctttccaacctgctgcaggtgctgttcaacatgtcggacgtggccgtggtaggccggtttgcaggctctacagcgctgggcgcggtgggttccaccagcatcctcgtcagcctgttcaccggcttcctgatcggcctgagcggcggcatcaacgtgctggtggcccgcttctacggtgcacggcacgagcacgatgtggaaaagactgtccactccgccgccatcgtcagcctgatcgcgggtgtggtgctgctgttcgtcggcctgctgggttcccccttcatgctgcggctgctgaacacaaaggacgacctgctgcccggtgccatcctgtacctgcgggtgtacttccttggtatgcccgctctggccttgtacaacttcggcaacgctgtgttcagcgccatcggcgacaccaaaaagccgctgatgtacctgtccattgcgggcgcactgaacattgcactgaacctgttctttgttatcgtgtgtcagttaagcgtcatgggcgtggcactggccagtgccatttcgcagtgcgcctctgccgggctgatcctgcacgctttgaccaaagtgcaggactgctacgtgctggacaccaaaaagctgcatctggaccccgccacaacaaagagcattctgggccttggtcttccggccggtttccagaatgccattttcgccattgcaaacctgttcattcaggcaggggtcaactccttcgactctctcatggtcaagggcaacagcgccgccgccaatgccgatgccatgatctacgactgcatggccgcattctatatggcctgtgcaagctttatgagccagaactacggcgctggcaagccggaccgcgtaaagaagagttatttcatcagtctggcctactcctttggtgtgggcctgatcctgggcggaagcctgttcctctttggccgcacctttcttgccctgttcaccaccgagagcgccgtcattgatgccggcatgaagcgcgtgggcgtgatgggctttgcctactgcatctccgcctttatggattgcaccatcgccgcttcccgcggacttggcaagactgtggtgcccaccattattgtggtaatgggttcctgcgtgttccgggtgatctgggtatacaccatcttcgcgcactttcacaccattccctcgctgtacgcactgtacccctgcagctgggcgctgaccgcccttgccgagatcgtgtacttcgcacactgctataaggaatcgatgaggatttttgagcagccaaaagctgccgcataaagcacaaaagctcctgtctgaatgggcaggagcttttgtgttactgaacttttacttcaccggccagaacgcgcttgtaatcctcatagttgcgggccagcagggcgggggtatccagaccatatgggcacttggccttgcaccggttgcagtgcaggcagccctcgatctttttcatcttggcctgacctgcggggctgagatgctctgccgagggcgaacgccgcagcagcaggctcatgcgggcgcagttgttgatctcgatgcctgccgggcagggcatacaatagccgcagccgcggcagaactcgccgcacagctcggcacgatccccctcaatgacggcacggatgtcgtcggtcatgcgcggcgggttgtcgatataggagaggaactcgtccagttccctttcacgctgcacgccccagatgggcagaactccatcgaactgcgcctcaaaggcataggctgcggcgctgttggtgatcagtccaccggacaggcccttcatggcgataaagcccatatttgccgccttgcacttgttcaccaattccagctcctgctcaccggagatatagctgaacgggaactgcagcgtctcgtacaaaccgctgtcaatggcctcgtgggccaccttcaggcggtggttggtgatgccgatatgccggatcatgcctttggctttggcctcctgcatagcctcgtagaggccggagccgtcgccgggcttcgggcagaatgcgggattgtggaactggtacaggtcaatgtaatcggtgcgcagattggtgagtgaggtgtgcagatccttccaaaagtcctctgcgttctgcgctgccgttttggtggcgatatacacttccgtgcggatgccgtcaaaggcttcgcccagcttcacctcgctgtcggtgtaggcgcgggcggtatcaaaaaagcggatgcctgccttgtaagccttgcgggccagatagacggcatcttcctgcgagatgcgctggatgggcagtgcgccgaagccatttttgttcaccgtgatgccggtgctgccaagggtgaccatatccatagctgtttcctccactcgtgggtgtaaagactctcctttttcattataaaacgaacgattctgctgtgcaagaagttaggcaaagcaaaagggcctttcccgaaggaaaagccctctttgcttgctttttactgataatcgtggttcaggaacatcgccttgatgaccaccacctcgtcgtattcctcctgttccacctgcacatctgcgttcagggacttcaggcggttttccacggcagtcaaagcctccggcacggtgacggcgcggccctcttcgatggcatcggccatctgcttgagcacgatgggatgtgcgtaatggctgggcaccgggaaggcaccgttcgggtagtgcttcacgtattctgccatagcagcttcggccttctcggcccgcttcatgatggcgctgtggttgttgtgggcggtgggcagcatgttgtagctggagaacaggaagatggctgcaaagccaaacagtgcaaagtagatgccatagccgccggtgtgggtggtaacggcatacaggccgtaggccgcggagacgatgcccataacaaagatggccagcgccacatagcggtacaccggcttgctctgcagctgggcacgcttgcggcgctcggctgcgctcagctcatcggcgatttccggctttgcttccagatattcctttgccctgcgcagcaccgtgatgctgtgacgggcatcgtcggtcagctcgctttccggcagcttgcgggaggccttttcggcttccttcttctgcagcatctgctcaccggctgcgctgagcagatggatctgcggctgctctttggccagcacctccagcagcttgtccacatcccgctcgtccttgaagttgcactgcttctgcttgccgccatcgtactccaccacaaggtaggccatggaggcaaacatgcccttgccggtaaagccgccggagctcatagccacccgcttgaacacgcggctgatgctgccgtagggcagataatagcggcggtcgatgtaaaagctgttgaggtacagcgcctttttgccaacgccgcaggggccgatccttttgcaggactttctgtcctccaccagctcctgtttatcaagctttgccatacccagctgtgcaggtttgaagatcatggaagttcccttctttactgttagtttccggtccagccgcagatgctgcagccattccaaataaaatcaccggttctattttcgcactgcagccctcaaaatgcaaccccttctgctgctaagatttgcacaaaaggtttgtctgttatgtcaaaacacccccgtcactgcggggtgcagcggcgggggtgtcagagtttatggcttatgcggtgcggcagacatccttatgccttctgagaagcggtgtgcttcttggtagcatggatgaagagtgccagcattgcgattgcaaagatgatgccgacggggtatgcaacggcagtgttgtaagcgaccagcttgccgtctgcgtaagtattgatcatcttgcccaggcactcaggtgccagcacgaagtaggtgcaggacacagcgctcatgaaggtagcgggcacagcggtgatccagtagttcttcttctccttgaacaggtacatggatgcagcccacagaacgatcatggccagcgtctggttggtccagctgaagtagcgccagatcacggtgtagttgatgaagcccagtgcgttgccgatgcccaggaaagcaccaacgcccagaacggggacacagagcttcaggcggtttgcgtagctgtcctgatcgatcttgagccagtcggccagagtcagacgagcggaacggaacgcggtatcgccggaggtgatggggcagatgacaacgccgatcattgccagagcaatgccaatgccgcccatggtctttgcacacacgtcgtagatggcagcagactgaccagcagccagagcctcggccagaccagccatcttgccgtcggtgatggtgtacagtgcgcagccggcagcggcccagatcagagcgatgacgccctcgcagaccattgcgccgtagaacacgaagtggccctgcttctcactcttcatgcagcgagccatcagaggcgactgggtggagtggaaaccggagatagcgccgcaggcaacggtgatgaacatgaagctccaaatgggagtgcccgacggatgcatgttgccgaagtttgcccagatctcgggaatggtgtaggcggggttggtaaagatgccgaagataacgcccacagccatgatgatcaggcagatgccgaacacggggtaaatcttaccgatgatggcatcaatggaaataaaggttgcgatgaagtagtacaccagaatgatgatcagccagaacagggtggtggtcagcagaccggacatgccgctgttcttgcacagggtaacgatcaggcctgcggggcccactgcgaacacggtaccaaccatgatcagcagcacaacagagaacacacgcatgatgttctgcatgacaggtccgaggtatctgccggtgacctcagcgatggatgcgccatcgttgcgctcgctcatcataccggagaagtagtcatgcacaccacctgcaaagatggtgccgaaggtgatccacaggaacaccacgggaccccacagagcaccctgcagtgcaccaaagatggggcccagacctgcaatgttcagcagctggacgaggaacagcttccactggggcatcacaacgtagtcaacgccgtcgttgatgcgcacagcaggagtttcgcggtcgtccggtccgaacgtgttgtcaacgatcttgccatagacaaagtagccgatgatcaagagcgccagacagagtaagaaactaatcataccagaaacctcctttttgattcaaaccacagccagcattttgcgtgcccaactgcggctctgaccaatctctggcttcatgttaacacttttttcataaagcagttaatatttttctggtatggttcccatatcaaaaagtatatggcaagatgcttctgcggaatacctgcaaagaatttttatcgcattcacggcaaattttcttaattctccggcaaagacctttcccggaaccggtcaaaaccgccgctgccaaactttccagtctgtttttgtgcaagttgctcaatcgttttcgattttctccgcaaatcgtgatttctttgcctgaaacgccgcaaaatacaaggcaccctccgccgagccatttcagcggagggtgccttattcagcagatcatttgtatatatgtttgtatatatcgtgtcatgccttctgggctgccttcttcgttgcgtggaggaagactgccagcattgcaatggcaaagatgatgccgatggggtatgcaacggcggtgttgtagatggttgcgccttctgcggtcttgctgttcagcaggccgcccaggcattcgggagccagaatgaagtaggtggaagagaccgcgctcatgaaggtagcgggcacagcggtgatccagtagttcttcttctccttgaacaggtacatggatgcagcccacagaacgatcatggccagcgtctggttggtccagctgaagtagcgccagatcacggtgtagttgatgaagcccagtgcgttgccgatgccaaggaaagcacccacgcccagcacggggacacagagcttcaggcggtttgcgtagctgtcctgatcgatcttgaaccagtcggccagagtcagacgtgcggagcggaatgcggtatcgccggaggtgatggggcacaccacaacaccgaccattgccagtgcgatgcccacgccgcccatggtcttggagcagacatcataaatagccttggactggcccatggccagtgcttcggccagaccggtgttcaggccgccggtcacctcgtacaggctgcagccagcagcggcccagatcagagcgataacgccctcgcagaccattgcgccgtagaacacgaagtggccctgcttctcactcttcatgcagcgagccatcagaggcgactgggtggagtggaagccggagatagcgccgcaggcaacggtgatgaacatgaagctccaaatgggagtgcccgacggatgcatgttgccgaagtttgcccagatctcggggatggtgtaggcggggttggtaaagatgccgaagataacgcccacagccatgatgatcaggcagataccaaagatggggtagatcttgccaatgacggcatcaatggagataaaggttgcaataaagtagtacaccagaataatgatgagccagaacagcagcgaggtgagcacgccggaagcgccgctctgactgcacagctccacgatcaggcctgcgggacccaccgcgaacacagtacccaccatgatgagcagcaccaccgagaacacacgcatgacgttctgcatcacagggcctaagtacttgccggtgatctcggcgatggaagcgccgtcgttgcgctcgctcatcatgccggagaagtagtcgtgcacaccgcccgcaaagatggtgccgaaggtgatccacaggaacaccacaggcccccacaatgcgccctgcatggcaccaaagatggggccaaggccggcgatgttcagcagctgaacgaggaacagcttccactggggcatcacaacgtagtccacaccgtcattgatgcgcacagcaggcgtttcgcggtcgtccgggccgaaggtgttgtccacgatcttaccatagacaaagtagcccacgatcaggatcgccagacagagtaagaaactgatcataccagaaacctcctttttctttgtgccggaattatggaaacattttccatattttccatccattccggccagctttctaggtctatgttaacatatttttcataaaagtgataatatgcttctggtatgggggcatatcaaagaccatatagccgcaaagttttttagccgatgtttcgtctctttttcgctcgatttatcagcaaaaagacagccgcagcgcataaagcgctgcggctgtcggccaaattcctttgctttccggtttttccgcattctgatattttgccagttcttaaccggtttcggcggtcatttcacggtcagcgccgcctgcttgtgcagcagctgcacaaaggtctgctcttccgggcgcagggtccccctgtccggatagaccagaacatccttcatgcgctggcgctgggccgggcatttcctgagcaccagatgatactgctccagcgcccgccggggcatgggcgacgcccacatataggcattgggcaggttctgcaggatggagaactggctgcaccgctcatacacatggatgcggcggttcgggttcgtatgccagcgcaggccgctgtcctcgccgccgggcagttggaaatcaccgtgcaggacctccatatagctgttcagctgggtgatatcggtcacctcgcactttgccagcgggccttcgcggttggtcagcaaccggtattcaaactccatcaccggctcccggtgcaggccgtgacggtcgcagtagcggcggtaataatcctcatcctcctccgcgtagcgcagcagggccagatgatagccccgccgcagtacatggtccagcgcttccatggagccggattcccggatatgcacccgcagctgctggctgtctgccatctgctgcaaaaaatccaccgtcgcgtaggaagcgtaggtggcgtggggcagcaccacccgcagttccgcacagctgctctgccggctgcgggcatccagatccagccggtccacctcgtccagcacccgctctgcctgccggataaaatgccgtccctgttcggtggggatcatgccggtggacgagcgctcaaagatgcggatgccgtattcctcttccagattcttgagtgccttgctcacattgggctgggccgcatacagctgctttgccgccgcgctcaccgagccccacttgcggatggccaccagataacgcagttccgtaatattcatgtgactgccccctgttccaaaaatcattcctattttatcaagccgggcggccggctgtcaagccaaatgcggttgacgcgccccgcgcagagctttataataaaaatgctgtatttataaaaaggagtttagctgctatggagactacctaccgcgttctgcgcattgaagagcagatgtatggctgcgaggagctgcccgccggccagccggtgctgtgcgatgtcacgctggccgatcccgccggggagcggcgcaccctgccctacccggacaaagagctcacccgccttggcatcgacgagggcagcatggtcgtcctgaccgcagacggcacactgaaaaaagcataaaatgcaggaggaacttatgaaaaagatcaaaacctcggccctgatcggtctgggcgcactgggcatcctgttcgggcgcaaaatgcccggcgtgcaggtcattgccgatgaggaccgcattgcccgctactctgccgaaccggtcgtttgtaacggcgaagaatgcaagttctcttacgtcacccctgccgagggcaaaccggtagacctgcttctggtggccgtcaaggctacggtgctggaacaggccattcaggacattgcaaagttcgtagggccggacaccgtgatcctcagcgtgctgaacggcatcaccagcgaggagcacattgacgcagcctatcccggccacaccctgtggagcgttgccatcggcatggacgccacccgcaccgggcgcacgctggtgttcaatcaggcgggcaagatccagttcggtgagcgcagcggcgagatgaccgaccgtgtgcaggccgtggctgactatctggacgagtgcggcattgccaacgagccctgtggggatatcctttacaagcagtggaacaagctgatggtgaatgacggcctgaatcaggccgcagccgcctttgaccagccctacggcggcctgcgccagcccggcgaagcacaggacatgatgcgcgcggccatgcaggaggtcatccggctggcgaaccttgagggcgtgcccctgccgccggacaacgatgtgcagttcatcgatgccatgatgcccacctttaaccccgagggcatgcccagcatgcggcaggatgtgctggcaaagcgccccaccgaggtggaggagtttgccggtgtggtgcgccagcgggccaagaagtacgggatgcccacccctgccaacgactttttctacacccgcatccgcgagatcgaggcgggatacgaccagtaaggagccacccatgcatacgctttatttcacccgccacggagagaccgtctggaacgttgaaaacaagatctgcggcatgaccgacagccccctcaccgagcggggccgccagcaggcccggaagctgggcgaagccgtcaaagccagcggggtgcacatcgatgagatcctgtactctcccctgtcccgcgccgccgacaccgccatggccattgccgaggccaccggcctgcccgcccggtgtgagccgcgcctgcgggagcagtgctttggcaaatacgagggcacgccccgcaacggcggcgagttccgcatttccaagacccacttcgccgaccgctacgacggcggcgagagcatgatgcagctggcccagcgcatctacaacctgctggacgagctgaaggccgacaccggcaagacctatctgctggtagcccacaacggcatcgcccgagtagtgcagtcctatttctacgatatgaccaacgaggaatacgcagctgcgggcatcaaaaactgcgaactggtggaataccattttgaatgatatcaacgggaagcagacgatttaaaatggctccgcgtgcgctgcgccataaacagcggaaatattatttttataatttgcagttccgaaacgactgcggtcgtttcggaactgctttttcaccgatcgggccgtatcggtcaaatgcatcttttccgctgcgcgacggccgcaggccgacagcggcaagatgccgtttatctccacgaccttccccgtgaaaagtgaaagccagaaaatccgcagattttctggctttctttctataaaaaataatttttcctctgatattgcaacggcgacgactgcggcctgcggccgaagcagggaggagctgttggggccgtggccagcaggatgcaaggcccgctcaagggccgtagtagccgctgggtgccacaactcgtccagagcgaagcggagacaattttaaatctgtcagcctttatacagtccaaacagcttgagcagcttctgccagaaggtcagggtcacagccgccggttccggctgggcagccggggccggggccgtgatggcagtggtctgcaacgcaaactgcaccgcgcccacctcggtgttctctgccgaggtgaagctctgcaccttcccgccgccggaaagactgttcagcaggccgtccagctgggcacccatgtcgatgtcggaaacgctgctgcgaagctcgccggtgccgccggtcagctgagacgtcccctccgccagctgcgcaacgcccgccttcagctgggctacaccgtcggtgtaggcgttcaggccgtcgtccagttggacatactgggcggcaagctggttcacgccgtcggtgagcaccgagagattgcccagcatcccagtaagcacaccggccagctgacgcaccccggcatcaaactcgccgtagctgccgttcagggtgctgctgccctcgtgcagctgggcgatgccgccgttcacggtgtcgagataggtctgcatggcatcgatgttggccgtagacccctgcaaaagcaggatcacatccttgagctgcggcatcatccacaccatgccctgcagctgctggatggccttggcattgccatcctttaccacgtcaaggtcaaggccgttctctttcaggatggccttgtaggcttcaaagctcacctgctgctccagctgtgccgcgccctcatccagccgggcaatgccgtcccggatctgggtggaggcatccagcagggtgttcagttcgtcggtggaggcagagatgccgttcagcgcggtctgcatctgggtgagggccccacgcacccgggctgagccgccggtcaaggcaccggaattgccgttcagggtgtcgatgcccgcctgcacctgcgcaatgccgtctgccagcgcgttggcaccatcgtccagctgcgcggagccgctctgcagctgttccagcatcccggtcaggtccatatccccgaggtcgaggttcaggttcagccgcacgccgttcagtgaaacggcatccatggcaaaatccgtcacatcggcggtgacggtcacatcgctgtccgcgcccggcagcaggatgtaggaaagctgctttttgctgcccacattcgccaccgtagcgcccggcgcgctgatgttccgggcaaggccggtatccagactcatggtcacctgcagcgcgtagtcgtcaaaaaagctgccggtgcagtctgggttgcggctcacctgcagccggatggaaagggcaccgcttttgccgcccagctcgtcggggctgatttctgccccgtccagcgtataggtcagctttaccacccacggcagggccgtggcggcatccatggtgccctcataatagagtttgccgtcctcggtcacatgcaccgtgaccgtatcgccgctctgctccacggcatcgctcgtggtcatgttgcgcacggcagtgtagctgccgtggtccgcaacggtgtcccccgcctgcacggaaaagctgttcacggcgtacacgccggtcacagcaccggaggccgtcaggtttgcataaatgacctcttccttggcagcggaggctgctgcaaaagccggcagactgctgcccgccagcaggcagcctgccagcgccagtgccgacacccggcgcacaaatcgatgtttcatcttggtcaagcctccttcggctgttttttcttttttataatgagcgggtcggccagatacaaaaagcccggcagtgccgaaagcacgatggccagcgacaccagactgcccacgcccaggaaattgcccagctggcccagcagctggttcgaggaaatggctcccatcaggaagcccaccaccgccatggcgctgccagtggtgctgaccgaggtggtcacggcggacaccgtggccgcaacggcttctttgcggcccagcgtctcgcggaactcctgatagcggtcggagaagaggatggcgtaatccaccgtagcgcccagctgcaccgagctgatgatgaggtaggcaatgtagaacacatactggccccggaagtacgggatggccagattgatccagatggcggtctcgatgctgagcaccagaatgatgggcaaaagcagctggcgcttcataaggagcaggatcaggaatactgcaccgatggccaacaggttcaccttgaccatgtcggccgtgatggtgtccatcaggtcataggtgctcacgccctgaccggccagataataattgtccgggtaatattgctgcaccgtggcgcgcacccgctccaccagcgcaaaggccccatcgccctcggtatcggcatccaccgtaagcaccatgcgggtgtagccgccggagaccagcagccccagcgtatccccgggcacgaactccggcgggatggacgcgcctgcgttgtccacataggaaaggatgccggtcacctccgggatggtgtgcagtgcatccgaaagcttttgctgcgtggcggtgtcgccctccggcaccagtacaacgtaggtgtcgctgcggccaaaggtctcctcgatggcggcggtgtccgcacccagacgggtgttctcgccaaacatgtgggcggcaccgtagtaatactggttcgagttggaggccagatagctgggcaccatcagaatgaccagcaccagcgccatgggcagcatgatgcgggccacaaagcggccaaacttgtcaaagctgggcagcaggggcctgtggcaggtcttatccatccactgatacgctgccagcgtcagcgcgggcataaaggtgaacacggtgacaaggctcagcaccacgccctttgccagcgcaaggcccagatccgggccgatctggaactgcatgagcaccagtgccagaaaaccgatgacggtggtcaggccgctggacaggatggagccggtggatctgcacagggcatccaccatgcactcctccgggctggcatccgggttttcagcccggcactccgcaaagcggtggatcaggaacaccgagtagtccagcgacaccgccagctgcaggatgctgcccgccgcattcgtcacaaacgagatggtgccgaagatgaggttcgtgccgttgttgagcaggatggccgcgccaaggcccgtcagcaccagcagcggctccgcccaggaatcggtggtcaggatcaggatgaacagcacatacaccaccgcgatggcggcaatctttgccacctcggtcacggtggagttggtggcaacggcagtggacactgccgcgccctccagcgcgttgccctccccgatcagatcccgcacggcagccacggcttccagacgcttctcgtcctccaccgtcacggtgaacagggcgcagccatccttataatagctctccaccgtggcggtgtcctgcatctgcaaaggcactgtcacatccagactgtcgtccagccatgcaacggaggacactccgtcgatggcggcaagcttttccttgtactccagcgcctgcggcaccgtgacatcccgcaccatgacccgcatgttggggatgccgccggtgaaagcaccgttcatcacctcgatggcggtggtggagggggattccggcggcaggtagtcgttgatatcgtaatccacctttacctgacgcacagcgaacacgctcagcacagccgccagtgcaaacaccgccagcaccagcctgcggcggcgcacgatggcggtataaaaacgtttcatcaaaacaggagttctcctttccggatccataaaaaaacttttatcagtttaacaggtttgataaacgttggaaagagacagtttatgaattttgaccctcgaatgccgatttttttgatttttctgtcttgacaacaaaaataaattctgatatgctcttttttggttcatcggaggaccgttttcaacgtaatttgaaacgggccggataagatgccgtgcagacagcgccccgccggaggtttcgttgccgtagtgacgaagcagatcgaggccgggcgtgcactcacggacatttatccggcccgttttttgcaccttgtgcagaaaggaggacgccatgtccaagcatcggatccagctttccgatcattttacctattcccgccttttgcggttcgtgctgccctgcatcggcaccatgctgttcacctccatctacggcatcgtggacggcctgtgtgtctccaactttgtgggcaagacggcctttgcggcggtcaacctcatcatgccgctgcccatgctgctgggcaccatcggctttatgcttggcaccggcggcagcgccatcgtgggcatcacgctgggcgagggcgaccagaaaaaagccgaccgctatttcaccctgttcctgctggcggctctggtctcggtcagtgtgctggccgtgctgggcattgtgttcctgcggcccattgccgtgctgctgggcgcaaagggggagcttttggactacgcggtgcgctatggacgcatcctgatggtgtccctgcccacctttgcgctgcagaatatgttccagagctttttcgtcaccgccgaaaagccgcacctcggcttctggttcaccgtgggcgcgggctgcaccaacatggtgctggatgtgctgatggtgggtatctggggctggggcgtggagggcgcagccattgccacctttatcagccagctggtgggcggcgtactgccggtgttctacttcatcgaccgcagcaactccagccgcctgcacctgtgcaagaccagtttttacagcaaagtactgcgggatgcctgcatcaacggctcttccgagctgatgaccaacctttccatgtcgctggtcaatatcctgtataacttccagctgctgcgtctggccggtgagaacggcgtggccgcctacggcgtcatcatgtacgcggccttcctgttcgtggcggtgttcgtgggctatgccgtgggcagtgcgcccatcgtcagcttccactatggtgcccgcaaccacgccgaggtgcacaacctctaccggaaaagcctgcggctcatcgccgtggtggctgtgaccctgacgctggcttccatgttcatcatcccctgtgtggcgcgcattttcgtgggctacgacgcggagctgctggccctgaccagccgggccttccggctgtatgcgctgagcttcctcatcatgggcttcaacgtgtacgcgtcctccttcttcacggcgctgggcgacggcgtgaccagcgcactgatctcctttttgcgcacgctggcgtttcaggtgatcgccattctcctgctgccgctgctactgggcatcgacggcatctggctggccgtcaccgccgccgagctggcggctctggccgtgagcgccgccatgctcctcaccaaggacaaggtgttccattaccgcaaggcatgataagatcccctgctttctgcgaaacggcgaaaagcgggggatttttttggtgattctggctctgccgctggcagcaaaatcgtgttaaaatggacacagcctttattcactttttatgaggaatcattatgacattgtttttgaccagcagccccagcggctgcccctttgagccgggccctgcagtgccggtgctggacacgcgcaaccactttgtggcgaacctgcgggccgtctggccggatcacgccgtgctgggccttgccattgcggcagacccctatgcctacgagcagaacgacgagatgtgccgggtgtttgcccagagctttgcgaacgcccacctgcccctgacggcgctcatcccctgcgatgcccgcaatgccgaggaaatcggttctcttctgccccaaagcggctttgtgatgctgtgcggcgggcacgtgcccacccagaaccacttttttgctcagctgggcctgccggggctgttccacaactaccacggcatcgtgctgggcgtgagtgccggcagcatgaacgccgcccacatcgtgtacgccgcgcccgaggaaccgggcgaagccgccgacccgcactactcccgctggatgaacggccttggcctgaccgagacccgcatcctgccccactaccagttcatccgggatcatgtgctggacggacagaaggtggaggacatcgcccttgccgacagcaaaaagcggcattttctcgctttgccggacggctcgtatatcctgtgcgccgacggcagcgaggcgctgtacggcaaaggctggtactttgccgatggcgccatggaagagatcaatgacgatgaagatgtgctgcccttgcggtaaagcatgacaaaaagagaacacccgctg

SEQ ID NO: 1154 - DNA, 15078 bp, Unknown
  gut microbiota DNA sequence
aattctgtgtaggcagcggcatcccaattgtggtagatgcccgccatcaccttgcctgcctgctctgcgttcaggcacagggggatgccctcgctgcccagcaccacaccgatttcttccttggtgtgtacaagatcggtgcggttgtccctgcccaaaatggtcacggtaccgccgtccctctgcagtatgtccagaatcaatttgatggtggtgcttttgcctgcgccgttttcaccgatcaggccgcagatggtgccgccgggcagtgtcagatccagcggtccgagggtaaagtccttatagtgctttgtaagtccccgcagttccagtgcgttcatgttcagccctcccacagcagttccagcatctcccgcagctcttccctgctcagcccgcaggatgcggacagcttcacagcttcggtaaggtgcgcttcaatttttttcaggttctcttcccgcagcagctcggtgtttttaggggctacaaaaaagccctttgccggtactgcgtaaaggaagccctctttttccagttcatcgtaggcacgctttgtggtaatgacgctgatgcgcagatcccgtgccagcccccggatggagggcatggcctcgtccggctgcaaagccccgctgatgatctgctgcttgatctggttgtagatctggtcatagataggcgcgccgcttttgttgttgataaacagttccatcggctgctcctttggctcttgtgttttatctgtatatgcacagtatatacagtagatacggatttgtcaagagaatgcgcaaaaaaatacacccgccgtccaaaacggacagcaggtgcattttttaggttttacagtgccttgatggcggtcttgatgcgctcggcggccatcttggtcttttcggcgtcgccgaaagcggtcaggcggaagtagccctcgccgcactcgccgaagcccacgcccggggtaccgaccacgccgcagttttccagcagccagtcgaagaactcccagctcttcatgttaccgggacagcgcagccagatgtaggggctgttcttaccgccgcagtaccacacgccgcactcgtccagagcgtccgcgatgaccttggcattcttgcggtagtagtccaaattctgctggatttcggccatgccgctctcggtgaacaccgcagcggcggcgcgctgcaccacataaggcacaccgttgaacttggtggtctggcgtcgcagccacagcttattgatgttcattccctcgcgctccagctccttgggcaccacggtgtagccgcagcgggtgccggtgaagcctgcgatcttggagaaggagcaaatttcaatggcacactcgcgtgcaccctcgatctcgaagatgctgcgggcgaggttctcgtcggagatgaagcactcgtatgcagcatcgtacaggatgatggcatcgttcttcttggcgtagtccacccatgccttgagctggtcgcgggtgtaggcggcaccggtggggttattggggctgcagatatagatgatgtcagccttcacattctcatccggcattcccaggaagccgttctcctgactggtgcggctgtagatgatcttgcggccatcggtcacgttatcgtccacgtaggtgggataaacggggtccggcaccagcacggtgttgtccacatcgaacaggcccagtacgttggccagatcgctctttgcaccatcagagatgaaaatttcatcctctgccagctgggtgccgcggcctgcgtagtagccctgaatggcctgcttgaggaaggggtagccctgctccgggccatagccgtggaagccttccttggtacccatctcatcggctgcatcgtgcatggccttgaccacacactttgccagcggctgggtcacatcgccaatgcccagacggatgatctccttctccgggtgtgcctcctgataagcggccaccttgtgggcaatgtccacaaacaggtagcttgccttcagctcgttgtaatgcttgttcatcttcatagtactttccctcgcttctgttttggtatgaccctctcagtcatctcgcgtccgctcgacgccagcttccccgagtgggggagcttttttgttgtgaagaaaaacttttcctcttgatgtggaaaagctcgcccttcgggagagctgtcgccgttaggcgactgagagggttttcgttttccttacacttctgtcgtgccttcgcacacggtctcggcggcgccggtcatcagcagctgtctgccgggcaatacccggatggtcagcacaccgccgcgcagctgcacatggatgtcctcgcctgccgggcagatgccaagctcggtcagggccgccacggtggcgcaggtgccggtgccgcaggcccatgtctcgccgctgccgcgctcccacacccgcatcttcaggtgggtggcatccaccacctgcacgaactcggtgttgatgcgctccgggaagtttgcgtggtgctcaaaggccgggccgatctcttccagcttcaggctgtccacatcctccaccacggtcacacagtgggggttgcccacactgatgcaggtcacatgccacgttttgccgtccacggtcagttctttgtccacaagcggttcttcgcccatgttcacagcaggcaggctggcaggcatggcactgtaagcgcccatctccacctgccacaggcccgcacccttgtgggtgacggtcttcaggccgctgagggtatcaatggcaagggtctctttggcaatgccgtgggtgtacagccattcagccacgcagcggatgccgttgccacacatcctgccctcgctgccgtctgcgttgaagatgcgcatcatgccgtccgcacccgccgtctgcgcagcgcagatgcagatgatgccgtccgcaccaatggaaaaatgccgccgggacaatttttcggaaagggctgcaatgttctccggcacaccgcttttgcggcagtccagatagatataatcgttagcgcagccctgcattttggtaaatgaaagcttcatgctcaaaactccttcatgggacttgtggtcagtccctataaactcgctactctataatgataagaaaccggggcgctcctgtcaagcgaaaatgcacctttccggcaatttttcgcaaaggaatctgtcagaatggaaaacagggcttgacaatacgcatggcatgggatataaaaaaagagagagttttgtacagtccggggccgcgcagcatctgcgggtgcatccgtcacggcagccgcacgcacggcaccggtgtacaggacaggcaaaacaactgcaaaaaggagaccacaggaatggatacttttgaaaaaatccgtgcattgctggcggagcagctggatgttgacccggcaaagatcacgatggacagtgacatcatgagcgattttgaggccgacagtctggatatcgtggatatggtgatgacgctggaggatgagtttggcattgaggtgccggacgatgccatcgagtccctgcgcaccgtgggcgatgtggtaaactttgtggacagccacgcgcagaactgattcagtcaaaaagccctgccttctggtgcggcacccggccgcactgcatggacggggcttttaatatggttcgtgcggaacgcaagccgtttggcgcacggccttaggaggaaaaagcaaaaatggcaaaagattcaaagaagctcgtacaggcgatcaccagccaggaagagaacttcgcacagtggtacaccgatatctgcgtgaaggcagagctggtggagtactccagcgtgaagggtttcatcatcctgcgcccctacggtcaggccatctgggagctgatccagaaggacatggatgcccgcttcaaggccaccggccatgagaacgtggcaatgcccgtgctgatcccggaaagcctgctgcagaaggaaggcgaactggtcaatggcttcgcgccggaggtggcgtgggtcacgatgggcggttccgacaagctggaagagcgtctggccgtgcgtcccaccagtgagaccatgttctgcgaccactggtcccgcgtactgcacagctaccgtgagcttcccatgaagtacaaccagtggtgcagcgttgtccgctgggaaaagaccacccgccccttcctgcgcagccgcgagttctggtggcaggaaggccacaccatccacgagactgccgccgaggctgaggctgagacccagcagcagctgaactgctacgcagatgtctgcgagcaggatctggccatccccgtggtgaagggccgcaagaccgacaaggaaaagtttgccggtgccgaggctacctataccatcgaggccatgatgaaggacggcaaggccctgcagagcggcaccagccactactttggcgataagttcagcaaggcttatgacgtgacctttaccggccgcgacaaccagctgcatcatccgttccagaccagctggggcgtttccacccgtctggtgggcgctatcatcatgacccacggcgacgacgacggcctgatcctgcccccggcagtggcccccattcaggtggtcgtagtgcccatcgcagcccacaagcccggtgtttccgagaaggctgccgagctggccgagaagatcagcaagtatgcccgcgtgaagctggacgacagcgacaacgcaccgggctggaagttctcccagtgggagatgaagggcgtgcccctgcgtctggagatcggccccaaggatctggaaaagaaccagtgcgtgctggtgcgccgcgatacccgcgaaaaagtcttcgtctctctggacgagctggagactgcgatccccgcacagctggaggccctgcgcaaggacctgtacgagcgtgctcttgccaaccgcgagaagcgcacctgggctgccaccaccatggacgaggtgaaggagctggccaaggcaaacaccggctacatcaagaccatgtggtgcggcgaccttgcctgcgaaatgaagatgaaggaagaagtcggcctgtccagccgctgcatgccgtttgagcaggaacacctgagcgatgtatgcccctgctgcggcaagcccgccaagaccatggtctactggggcgtggcgtactaagcttttcttttactgacaatacaagaaaaaacggaacacttcggtgctccgttttttcttgtattttgacaatttttgtgttattatgaatttgtcgctttcaggcggcaaggcactgcatacaacggcaggcggttcggccccacttccgaaaggaggtgaagctcatgccaattactttgacattccatatcttcggattggtatttactatcaaggtaaaaagcgagaaccgccaccctggccggtgacggttcttagtttttaagactgttcatcaaaaaggctgaccgcttgtcgcagtgccttttctgtttacagtatactcattttcaaaggttctgtcaagtgcacgcagcttcgtttctgcgtgcttttttatcgttcaaacgtggtgctcagggtggtctcccagctttcacccggggcaaggcaggcggcagcggcacgctggctccactgctgcgggtcagtctcggcggcgggcagactgtgccacggctcaatgcacacaaaccgcaccggctttgcaggggccgaccagatgagcgcgtaggggtagccttccacattgcaggtgatcttgcggccggtgcccttctcatagatgccaatggtcttggtgcgcaggcccgccatgcagaagctgtcgtttgcgaacagatcatccgtcagctggatggcctgctggttcttccactgataatagcacttgccagacagcaggccgttcggacgggcatccagaatgaccgggctttccggctggtcgaaccggaactcgtaatccgtggtggtgtgctgtgcatcaaaggggatgttgaacgccgggtgatagccgatgccaaagcgcagctcttcggtgccggggttgcgcaccgtcagcgtatggtgcacggtcttgccgtccagacggaaggtgctggtgagcacaaagtcgaaggggaagcgctcggccttgatggcgtcatccgagcgcagctccaactggatggtatcgccctcggccttgagcagggtgtgctccatgtcgcgggcaaagccgtgctgaccgcccttgtacgttttgccgtccacctcaaaggtaccgccgggcagcttgcccgtccacgggaacagaatgggagcgtggcgcttccacacagccgggtcggcctgccagagcagctcttcgcctgcggcgttcttcaggctgacagcttctgcaccgtgggtgtccacggtcagggtcagaaattcgttgtgaatggttgcctgcattttcagtatctcctttgtccttcttattttccggggtcttctgcttccagtatactcccccgtgtgccaaaaataaagtcccgcccagtttcagcagggctgtgccagcggcagggtgactgcaaaggtagtgccgttttcgctgctgcgttccacggtcacactgccgccatgcagcacggcgatctcccgcacaagggcaaggccaagcccaacgccgcccatctcccggctgcgggacttatccacccggaaaaagggctggaagatgctctcccggcagtctgcggggatacccgggccggtatctgcaacgcgcagtacagcggtctgcttttcctgttgcagggtgacgcgcaccgcaccgccggggcggttatacttgatgccgttttccaccagattgaacaccagccggtagatcagcgcatcgctgcccaccatgccaagttcctcgcagtcctgctgcaaagagatattgtttttctgggcaaggggggtcaggtcggtcagaatctcctccaccagcggcgcaagggcgatctggtcggtgcgggagactgattgcagattgctcatctctaataaagtgcgcacaagagcggtcaggcggtccagctgctcccgcagagagcggatcagcccggcagtttcggcgtccatggccgggtgctcctctgcaaacagttccagcttcgtctgcaaaatagccagcggggtgcgcagctcgtgggcggcattgcccgcaaactgccgctgcaactcaaaggactgcgccagaccatccagcatccggttcaccgaccggctcaactgcccgaattcctgcacagtgttttcgtccagacgggtggtggcgatgctgtcctgatcgacctgctgcgcctgctgcgcaagctgctgtaacggtttcagcgctctgccgctgacaaaataagcaatggcagcgctgacgatggtgaccacgacggtgatgcaccagcccttgcggccaaagaccacctttgcatcgtagacttcctgcgaaaaatgcgccagcagactggacatttcctcctgcgggatctcgatggtcaacggatccgcactgccgggctggtactgcatcataaagccgttgagggcatccatgccggtaacgccggtgcggtataaaagcaggttcatgcacacgcaggcgcaggcgatgagcagcgcggtcagcagggtgatgcgccattgcagggacaaatgtttcattgtacctcgcctccgatctcgtagccttccccgatgcggttgcggatggggtcgtagcccagcgccgcccgcagctttttgcgcagggcagagatatgcacccggatggagttgctgaagctgtctacactgccatcccagacgtgctcgatgagttcttcctgactgaccgggcgtccctgatgcagcagcagatattccagtacgccgctctccttccgcgtcaaagcaagggtctgaccgtccacagcagcaacgcggctgcgggtgttgaagctcagccgtccgcagcacagacagacgtcttgctgaataaatttgcgccgggtcaggctgcgcacccgggcttccagctctgcaaggtgaaagggcttggaaaggtaatcgttcgccccggcatccagcccctccactttatctgcgatttcactgcgtgccgacaagatcagcacacaggtctcaaggtcgtgccggcgcagggtgcgcagcacctgcattccgtccaccttgggcaggttgaggtccagcagtacaaggtcgtaccgctctgctgccagtgcctccagcgcggcctcgccgtctgcacaggcatccacctcgtacccggacaaccgcagctttcgggcaatatcctcccgcagggagtgctcgtcctctaccaccaaaaggcgcatctttgttttccacctttcccataaaaattgcgttttttcttcattataacagattatagcagacggtgttaagattcgtgttaagattttcttagcaaagattttatcacgcatggtgtatactgatgccatcaaacaacaggaggctatgatgttcatgacaaaaaaacaggcgcagctgcttttgcttgccgccggggttctgatgctgctgttcggcttatggcggggcgaggcagacaccgtattttcaaaagccatccggctgtgtatggagtgtgtgggcattggataagaaaaagaaaaagctttctccccttgcccgcttccggggctttatacaagccggggctaccctgctgaccaatctccacctacccaattttgcaaaaggagcgctgtatcagggcggcggaaaatacgtctgcgtgccggggctgaactgctattcctgcccgggcgcggccggtgcctgtccggtgggagcattccaggcggtggtgggctcttccaagttccgcttttcctactacattaccggcatcctcatcctctttggggtgctgctggggcggttcatctgcggtttcctctgcccattcgggtggtttcaggagcttttgcacaagatcccatcccccaagctttccaccaaaaagctgaagccgctgcgctatttaaagtatgcggtgctgctggtcatggtggtgttgctgcctttgctggcggtcaatgagctgggcatgggcgaccccttcttctgcaagtatctctgcccgcagggcgtgctggagggtgccattcccctctccctgaccaatgcgggcatccgcgctgcgctgggcaagctgttcacatggaaggcctgcatcctgctggcggtcatcgtgggcagcgtggtattctaccgccccttctgcaagtggctgtgcccgctgggcgcgttctatgcgctgctgaacaaggtctcgctgttccagatgcgcgtagacacccacaaatgcgtctcctgcggagcctgtgcaaaggcttgcaagatggacgtagacattaccaagacccccaaccacgccgaatgcatccgctgcgggatgtgcatgaaagcctgccccacggacgccattcagtacaagttcgggctgggggaccaatcaaataccgaaacaacaaaggagtaaaaccatgaagatccatcgtatcgccgcactttttctcagccttgtgctggctttcagccttgccgcctgcgggcagggcgcatcttctgcatcctcttctgccgcttcctctgcggcagaagaaagcaaaaccgaggagcagctgctggccgaggaaaacgagatcctttctgcaaacgatgctctgtgggagaaagtgttctcatccatggacaaaaacgtgaccgaaaccacgatcagcgccaactacggcgattttctgctcagcgctgtggaaaagaccaaagatcagttctcggacgaggagtacaagaccctgaccgcagatgccgaaaagattcgtgccatcgaggagcagatcgccgctcttgcccccgcagaggatgccgcttccagtgccgccgcacagggcaccgccttccccaagtttgagggcagcgatttagagggcaacccggtggacaacagcctgtttgcgggcaacgcctttacggtggtgaatttctggttcaacggctgcaagccctgcgtggaggagttggacgacctgaacgccctgaacgagaaggtcaaggcacagggcggtgaggtcatcggcatcaacaccgagacgctggacggcaaccagcagggcattgatgccgccaaaaaactgctggagacaacgggcgcaagctaccgcaacatctactttgcctccggcagtgaggccggcaagtttgcactgaacatcatggccttccccaccacttacgtttttgaccgggacggcaacgttgtggggcagcccctgcttggcggcatcgacaaggaagaaaaccttgccactctgcaaaaaaatatcgacgccgcccttgccaaggacagcgccaaataaacctttctcccctgccgccttcgggcggcttttttatttgcggtgtgcattgccatgcacgcccgggtgccggacggaatacgctgtgagagaagcgataccacttttacagcaaaggagcatccgcctatgaaaaacaccggcattctacgcattcaggctttcggtgcccgtcagtcctcgcccatcgagggtgttctcgtcaccgtgtccggcaacggctttaccgctcagcgtatcaccgacgagaccggcaccgctgccgacctctccattgaagccccctcctgtgcgctgtccctgcaggaggacaacaccatccggccctatgccgttgtggacctgactgccgcaaaggcaggcttccgcaccgtgcgcattcagggtgtgcagatctttgccgggcaggtcacactggcccagccggagatgatccccgagaccgaagaggatcgcgacgtggtaaacccgcccatagtcatcccggagcattcactgttcaccggcgatggcggcagcggcccggaccccatggagaactgcgtgccccgggtgctggacagagtcatcattcccaaaaacatcacggtgcatctgggcaagcctgcggcatccgcccgcaatgtgactgtctccttccgggattatatcgccaatgttgcatccagcgaagtctaccctacctgggctgacgaaaataacccaacggggccattaaactgctctaccacttagaaattccattcaatcgtgattttttgctctccggtgagtggatctttcgttccgacaacgacacgatgaaccagcagtacagcaagttcacgggtcagatgggaaacctgtgccagttcccgcacacgctgcatctgcgtctgaaccacgctggtttcttcctgctgctgttccaattccgcttccaaaatattgattcgcgtttctgcgttttttacatcttccagaaaagtctggttcatttcagaaaactggacggtatcaatcagaccagacaccttatccagatacagttcctgcatagctttgcgccgccggtctacttcgcttttcaaccgtttcagctcgtcacgctttgcatgttctcgctgctggattgggtcatcctgttctggaagggtaactttttcagggtcaaaataatctgccacatacgcccggatacgttccagcacagcattctccaatgcgttcatatctgtacaggtcttgttgccacacacttccggtgcgcgctggtgcatccggcagcgaacatagcgtctttgagtcccatccgcctttggctgacggccagtttgttccatgtagctgccgcagcatccgcaaaccacttttttcgccagcggatgaatcgttccttttccaccactccgggtacgttctttcagcatcatctgaactgtttcaaacgtcccccggtcaatgatggcttcatgggtgttttctacaacgatccactgcgactggggaagccaaatcgtcttttcggacttataactcacctttttatgccgcccctgcaccatatctccgacataaagctgattgtgcagcatttggtataccgtggggctactccaaaggtctgcattgggatttttcgctgcaatatggtaatggatgccatgctgctgtttataagcagttgggcttggaactttctcatcattcagaatccgcgcaatcttatgcgcaccgattccactaagagccatagagaaaatccaccttaccacttcggcagcttccggatcgatgataagttttccttttgcattcgggtctttgcaatacccataccgcgcaaaagagccgatgaacaaaccctctttcctcttgtggtcaagcaccgagcggacattggtagacaagtcttccagataccactcgttgatcaggccattgatctgacgagattttttattcgcagtatcgtttgtatccacatggtcaacgacagcaatgaaccgaatgccccactcaataaactttccgtgcaggtatttttccacgagttccatatcgcgggtaaaacgggattgcgtcttggccagcaccacatcaaatttatgttcgcttgcggcttgtatcatcgaattgaaagccggacggttccggtcgatgccggaataatcctcatccgaataaatctggtaaatatcaaatcctttctcaatggcgtactggatcagcatcgatttctggttctgaatactttccgattcgccaattttacattcatcttctttgctcaggcggcaataaattgccgctttcatgatttgcacctttctttttgtgcacaatcgtccatgcgcaacataccgcattctcccctcaaattcaaggatgccaaatcaggcgcaggattttgaaggagcggtatcggacagctcatcgacgatatatcgttcaaatttcttttggaaatgttctttgcgctgttcgttgttgtccgaacaaaatttttcgtgcagaataaaaggagtttttttcatcgaatcccccttttcggttcacttgattgtgatatgtgtcacttcagtctatttccagtcggcgaaattcagaacttttcaaccagtcaatatggcttataaactaaaaaagcctctgaggacgactcccaaatgggaagagtcctcggaggtattcgtttagcgggtgttctgctgtctgcgagcgtccttccgcacagctttctgtccgcatcaaagatattttcggatggtcggaacaaggatattccgattgattaactttgcgatactgttcatgttgtagttggttcattgcagtttcagcttacaacaaaaaatgagataggcaacccctttgggggaagtctatctcatttttttgttggggctattttgcaacagcccccctttataacaaccctgccttacagtttgggagaaacgcttagtgcttcagttccagcagcgcatcgccctgctttacggcaccactggctttagccgcgacagcggcatagtcatcagtattgcagacaatgagcggtgtggtcacgggatagccttcggccttaatggcttccagctcaaagcggatcaatggctgacctttcttcaccttgtcaccctcgttgacgaggtaggtaaagtgctttccgcccagcttgaccgtatcgatgccgatgtgcatcagcagttcggcaccgtcagccgtggtcatgcccacggcatggtgggtctcaaaggtggaggagatctcaccgtcagcaggtgccaccagttcaccatcggtgggctcaatggcaatgccgtcccccagtgcaccgctggcaaaggcttcatccttcacatcggccagcggcactaccgtgccgttcaggcaggcagacagcacggtatcctttgctgcgggggccgccggggcgggtgttgcggtcgccgccggggtcttaggtgcattttccagataatcttccagctttgccttgatgacggccaccttggggccgtataccacctgcacaccgttgcccttgcagatcacgccggaggcaccggaggctttgagcacatcctgccggaccagcgcagcgtccttgacggtgcagcgcaggcgggtggcgcagcagtccacgtcggacagattagcggcgccgcccagaccttctacgatcagggcgctgaccgggtcatcccctgcgggggcggtgctgccggaagcggcgctgcgggcgttcacgtccgcacgggtgtacagcttgacttcctccgcatcgtcgcggcccggggtcttgtagtcaaacttggagatcataaagcggaaaatgatgtagtacagtacaaagtacaccgcaccgaccacgaccacccacatccagtgggtcttggcgttgccctgcatcacgccgaacagcaccaggtcgatgagaccgccggagaaggtcatgcccacgcccacattcagaatgtgcatcagcatgaaggacagaccggccagcacgcagtgcacggcgtacatgggcagagccacaaagataaaggtaaattccagcggctcggtgatgccggtgaggaaagccgtcaacgcagcagacagcagcaggccgcctgctacctttttcttttccggcttggcgcactggtacatcgccagcgccgcgccgggcagaccgaacatcataaaggggaacttaccggccatgaaacgagtagcgctgaccgagaacacagtggtggacttggaagccagctcggcaaagaagatgttctgtgcgccggtcacggtaacgccatcgatgatggcggtgccgcccacagcggtctgccagaacggcatatagaacacatgatgcaggccgaaggggatcagcgcacgctccagcaggccgtaaataaaggtgcctgcgtagccggaagccagcaccagtgcacccagcgcggcaatgccgctctgcaccaccggccagatgtagaacatggcgatgccgaccaccagatacacaatagaactgacgatgggcacaaagcgggttccgccgaagaaggccagcacctgcggcagctcgatcttatagaacttgttgtgcagcgccgccacgcccagaccgaccacgatgccgccgaacacacccatttgcagggttgtgatacccagcatggtggtggtggagttggcaggcatcgcttctacgccgcctgcc

SEQ ID NO: 1155 - DNA, 8096 bp, Unknown
  gut microbiota DNA sequence
cagtgtaacaacagctccgcatgctatctgtgcgacggcgactggacgtttaacgatctcaccatgaacgccgtctggcgtgctattgacacagatggagccaatgtgaccgtcgaaggcggcacctacgactgcagctatagcaccagcgcgacgttttggattcagaattcccccagttcgtccttcaaggatgtgacagcctccggcgcgggctgggtcctgaacgccatcaacagttgggtcgatgtcgtcggcggctcttacttcagcaatgagggcgtccgggtattcccagaccgtccgacgctgcgcgccgccgataatgcaacgctgaacgtcacaaatgccaaagtcaccggaacctactgcgatgtgtttgtgacgggcgccaccgccaaccttgtcggcggtacttataccaacaccaaccagtatcttaatcttggctacgagtcccctgcactgaaggtatggaacggcggcacattgagcgtcaatggtgccactgtggattgcacgggcgacaatgctgccatttcttcgggcgaaccggcagggtcgtattaccattataaatatggggacggcggcaagctggtcgttgagaactgcacgatcaaaaacagcaaatacggcatttatctcggtcggggcagcagcacctccgcagagctgaagagcgccacgtttgagaataacgagagcgatatttacctcgagtccggcaagaagatcaccatcagcgatacctttaccacccccgccaccatcaaggttgccgacccggaagaaggccgtcagctcacggtcgcaggcaatgcaaacaagctgcaccttgtgggccagaacgagagctaccgcgtggcgtatgacaaggcacagcactattattacctgacccaacgggcacccggctacaccctgaccgccaaggatgccacggcaacgatcaaggtcgggggcgttgacactaaggttgaccccaatgacgagatctacgaaggcaccccggtcaccctgaccgcagacccagcccccgatggacagaagttcgcaggctggaccgggatcgtgatcttgaacggcgttgtacagaatgaaatgaatgacctgctgagcttccccaatgaggaggaccataccacggcgaactttgaaatgcccaaaggcaacgtgacggtcagagccgtgtacgaagcctgtggacccggtagacccggtggacccggtagacccggtggacccggtgggccccgtggaccccgtcctgcccggtgttatcatcggcggcgctgtaatcctgggtgcctatgagaccggcaccggcatctaccgtctgatgaacatgcagggcctccccctgccgtctgaccgcatcgagctggcagagctggtctgggagcgtgcaggcaagccggagccgcagaacatgaccgatgaggacctgtatgcggacattgacgccgccgataccgatgcccagaaggctgcacactggatggtggagcaggagctgatgaagttcgacgaggacaacaacaagttccatccgtgcttcccggtcagcaagctgcgcgtctgccttacctgacagaatgcaaaggacaagggtctcattgactgatctgccctgcgtctgcacagcggaacaataaaaaaaacaaggggccgctcctttccgggagcggccccttgttgctgtccggaaggcccgcaggcgctgccgggcagcacaaagcattattccagatttcccgtcagggtcatgaccgaagcaagcacggccagcggggcggtctcgcaccgcaggatgcgggggccaaggcccaccgttctggcaccggcctttgcggccatctcggcttcctcggcggcaaagccgccctcggcaccagtcacgatggcgattttcagtctttcaccatcggcgggctttgctgcggccagcaggtcgcgcaagggcgcaccgccgcactcgtagcagaacagcacaaggtcgtactgtgcaaaggtgcggcacacggcaccaaagtttgccagcggcagggccacatccggcagaatgccccggccgcactgcttggcggcttccgccgcaatgcggttgtagcgctcgttcttctgctcctcttttttgggcgcggccacgcaataccggctgaagaagggcacgatgtgggctgcgcccagctccacgccgtgcttgatgatctgctccagcttgtcctgcttggggtagccggccagcagagtgacctccacgctgggttcggcggcgctgggatagcccggctccacccggaactccacacactcatcgccaaagccggtgatggtggcggtgtattccacggcattgccgtcgcatagaatgacagtatcgcccagccttgcgcgcatcacacgggcaagatggtgggcatcggccccgcgcagggtggcggtgccgtcagagatctcggtggtaaaataacggtgcggcataaaatctccttacgctttcttgcagacgatgcactcccagccgcgcttctccttcacttccacaacggcaaggccggctttttccagcccggcgatcacttcgtccttgcggctgtcgatgatgccgctggcaataaaggtggcatcctccgccatcaggccgggcacagccggtgccaggctgagaatggcgttggccacgatgttggccgtgatgatgtcgtatttgccgctggccttatcggaaaggtcgcccaccagcacggtcagcttgtcctgcacgccgttcaacgcggcgttctcgcctgcggtgcgcacggccacagggtcgatgtccacgccctcggccacagcagcgcccagcttcagcgccgcaatggcaaggatgccgctgccggtgccgatgtccagcacccgctcgccgccggtcacccgctcgtccagcgcttccatgcacaggctggtggtctcgtggccgccggtgccgaaggcaaggcccgggtcaaggatcagctttacccggtcggtgtcgtactgctgccacgagggcaccaccgccagccgtttgccgatctccagggggtgataatacttgcgccagccgttctgccagtcctcctgctccacgccctcggtcgctacggtgtaggcgatgccggcggcttccatgcgggcggcaatgagggccagcgtctccacgggggaagcgcccggctccagatacatatggatgataacggtatcgcggggcttgtccagcagctcctgctcgatcagatccacatgggcgatctcggccacctgctgctcgatgtcgctgtagtcttcgatatagatgccgccttcggcgatcatggtggcaacggcttcggcgttgtcggcatcggccttggccacggtcaggcggatatcagtccattccataatgctgtctccttttattttgcatcctcgccctctccgtcattgcttgcgcaatgccacctcccccaaagtgggaggctttggcagtccatgcaaagtttgcggttttgccaagggctctccctttgggagagctggacgcgaagcggcctgagagggcgcatgttctttataatagtatagtacccgattcggctgtgggatgcaagcctttgggcaaaatgtacgtaaaaagaaaagaattttcaacacaaagacgacccttgtgcggaaaaactaaaaattatcgactgaaaaactgccaaatgaggacttttgatgcattttgatagaaaaaaggcgaaagggactttctttttttgcggaaatatgttactattctattacggaattatggacggcctgcaaccagaggcgtctgtaaacacaaacatttcttaaggaggaatgtgctttatgatgaagtatctccagaaactgggcaaagctttgatgcttcccgtcgcggtcctgccgatctgcggcatcctgatgggtcttggttatgcccttgctccgggcgttatgggcgttcccggtgcagcaacctccggtgcagcttacaccgttggcttcctgctggtcaaggcaggcggcgctctgatcgataacatggcatggctgtttgccattggtgccgctgtcggccttgcagacaacgacggcaccgcaggtctggccggtctggtcagcttcctgatgatgcagcagctgctgaaccccggcgtggtcggcatggtccgtcacctggaagaaggcactgctacctacatcgccttccagaaggtcgccggcaactccttcatcggcattctggccgctgttgtgggcgctgcctgctacaacaagttcaaggatatccagctgcctgactggctggcattcttctccggcaagcgcttcgttgcaatcgctaccggtctgatctccattctggtgtccgttgttctgctgttcgtctggcccgtcatcttcgacgctctggtcgcaatcggcaacggcatcgctggcatgggcggcatcggcgccggcatctacgccttcctgaaccgtctgctcatccccaccggcctgcaccacgctctgaacaacgtgttctggttcgacaccatcggtctgggcgacctgagccacttctgggctggcgagacctctgctgatgtgggctggagccttggtatgtacatgtccggcttcttcccctgcatgatgttcggtgtcctgggcgctgctctggctatggtcaagaccgctaagaacaagaaggctgccatcggcctggttctgtccgctgcaatctgcgccttcgtctgcggcgttaccgagcccttcgagttcggcttcatgttcctgtgcttccccctgtacgttgtgtacgctgctctgtacggcatcttcaccatcatcacctactactccggtttccgtgccggcttctgcttctctgcaggtgctaccgacctggtgttctctgcttccctgcccgcagctgccaagacctggatgatcattcctctgggcatcgcagccttcgtggtgttctacgcagtgttctactttgccatcaccaagttcgacctgaagacccccggccgtgaggacgaggacgaagaggccgagaagaaggtcgttctggcaaacaacaactataccgaagtcgcttccgctgttctggctgctgtcggcggcaaggagaacgtgaaggaagttggttactgcgcaacccgtctgcgctttgaggtcaaggataacgccaaggtggacgagaaggctgtcaaggccgctggtgctgccggtgtcatccgccccagcaagaacgcttgccaggtgatcatcggcaccaaggttcagttcgtgtacgacgagctgaagaagatgctgtaacgcacacagcattctgaacggagtttgtgcgggagactggttgctcctgcattcccataaaagccgccgggagcagggcagagcctgccgctcccggcggctttttgcgttcccgcgcggagtgtgctatactggttcaaaaggcagatacgggaggaaaaaccatgagcaaagtgtacagctggcggaaactgaacgaaaaagaactgacgcgggtctatctggacgaaatgcggcgggactttccgcccacggagctaaagcccctgagcatgatcctgaacagcgaagcggacggcaccgcccacacatggggcgtgttcgacagcgaaacactggcggcgtacctgctcatggtgcgcccggcaggcagcagggtgagccagctggattactttgccgtgctgccggaataccgttctgcagggctgggcgcgcagctgctggccgacctgccgcagcacgagcgcggtgcgcaggccatcctcattgaggccgaatgcccggataaggcagaggacgaagctatggctgtgcggcggctgggcttttactcccggtgcggcgcgcgggacaccggcttcaccgagcacctgtttgatgcatggttccgcattctggtgctggactgcccgggtgccggtacctttgcggaccggcaggccgtggatgctctggtggactgctaccgccgcaccatcagcgagaccgagtggcagaagtacgtgcagttctactgcccggacggaacaaaatactgctgagcagaaggcgctctgtgcaaattatgtgtacagagcgcctttttgtcatatttttgttgacagactccccaaaagtggtacgctaaaagcacagcaaaacgcttttagaggagggcaatattatggcagaaaaaatgacccggcgtacctttatgaagagcgcagcagctgcggctgcagcaatctctttgtccggcgtgctgaccggctgcggcggcggtctggcacaggatgaggtacagatcggcgcatttaccgcaaaagtctacaatgcaaaggctttctgggtcggcggcacgggcaccaacagcagcaattatatcacagccactgcacggctgacgctggacacgaaaaacagcacctttgtttcgcagcagtatcagggcatgtttgtgggcaccattggtgattctgcactgagcacgaatgcaccgaacggaagcgacagtctggtcgcttccaacatgcctgttctgagcgcatttctaagaaagaccgaagtgaagttgaaactgagctttgcggaggaaaaggattttgtagcgtttaagaatggcacaccggtcaagctgaccattaccatcaacaatacaccgggctatctgtatctgtactggaacggtgagcagaacggtctggtcgtgaccaatgccgcaccgcaggcataataaaatcatcccgtgagcgtcatgccgccgggcattcctgaaaaggagtgcccggcggctttttgtcactttgcccagccagaaaatggcattttcggcatatttatcctgtttgtaaaatttgagtacaggcttttcatgccggctttacgcaggcttgacacagccgccggagcctgtgcaaaagctttacctccattttgcgcgtacatggtcgcagcgcacacggcggtgcggtacaataaggccgttcccaaggaaaacacagagaaacaagaaaacatcggccggcaatgcattccggcatttattggaggaaaagagttatgaaaaagatcactcgtcgttcgtttatcactgtctgcggcgctgctgctgcagcgatggctctgaccgcctgcggcggtgcagcctcttccactgtggcatcctctgctgcggagtccacctcttcttctgccgctgctgagaccgctgcaggcaccctgtccggcaatgtggctaccggcggttctacctctatgaagaacgtcatcgctgccctgaccgagggctttgccgaggtggagccgggtgtcaccgtcagctacgaccccaccggttccggcgcaggcatcaccggtgctaccgataagacgctggacatcggcctgtcctcccgcgccctgaaggacgacgagaagaacgacgtggacggcaccaccgtggctctggacggcatcgccatcgttgtcaacaaggccagcaaggtggcagacttgaccgtggaccagctgaagcagatgttcaccggcgagatcaccaactggaaggatgtgggcggcgacgacggcgagatcgttctggtgggccgcgaggctggttccggcacccgcgatggctttgagagcatcgtggacgtgaaggacagctgcaagtacgcacaggagctgaccgctaccggcgcagtcatcagcgctgtggaggccaatcctctggccgtcggctacgcttccctgtccgctgtgggcgacaccgttgctatggtcaccgtggagggtgtggagtgcagcgaggacaccgtgaaggacggcagctacaagatccagcgtcccttcgtgttcgtcaccaacaagagcgtgaccctgtcggagcaggcacaggcctttgtggactttgccaccagcaaggacgctgccgacctcatccgcaccgcaggcgctgtgccggtgaacgagtaacggttagcgggctcgccctctccgtcattgcttgcgcaatgccacctcgttcccctttctgtcgctcacgcgacatctgctcctctctttgtcacctacggtgacat

SEQ ID NO: 1156 - DNA, 3256 bp, Unknown
  gut microbiota DNA sequence
ggcgcggtagagataggtggagcgttcctcggtgtcgggcttgaagcggacatacgccgttgcctgcatgaactgggtcaggttgtcgctgtccgccatggctgcttcgaggttctggatagagcgctcgctgatggtaaactgatagcggttcgccagcagacggtgcagcccctccagcatccacagcaggatgccgggacgctcctcggacagctcttcgatgaggaaggggttatccacccggacagggtcacggtcttttaccgtgatgaggatctgtctgcgccagaagccgtcgctgtcatcgtgagcagccacaaggttgccattgccgaagcagatgaaacgaacgtacagcaggccttggacagcctgcttgtttttccgctcgatgcacaaacggtcttcagcggtgacgatggacttgatgttccgtgtttcgggcaaagccaccatgttcaggtcgtcatcgaccatgaccaacttgtactccagatttgcactggcaaagcggttcgtttcgatgcggaggatggattcggagtgagaggcttccccgaacagcttcttcagcagcaagccgatgcgggattttccttcgccgcccttgccggtcatgaccagcatcttctgcgccttggtagacgggatcagaagatagccgagatattcctgcaaggtcagaatgtcctccgggatcagtagaccgtccagaaattccagccacttggtcggtgcgggggcatcgggctggtattccacggggagccggttcaggcagagttccttttccggcacaaagccccgctcgtccagaaagtaggttccgttctggagatggatgcggtcaagctggggtttccattcgggggtataggtttcgatacggagtgcgtccagaacctgcttttccttcttggcaaggttgtcgagcacaaagtcacggaggtcgctgtggacttcgtagagcagtgcgtcctcgtctacctcgccgttctggtcgaacagcttctgtttcaggcacatcatggggtgtttctctaaaaggtactggcagtaagcggtttcacgcactttgcccttactgtctacccaagggcattcgcattcttcctcttcttccagttcgtcctcatcacgccaatcgtcgttcctctttttccagtcgctcatgcaatccctcccaatacttccgtagctcgtcttcggtcttcgggtccgggagcaccgaacagtccagataatattcaacgatgtcaaggttctttatcgcttcaaggaagcaggggtgaagttcttctgtgggtgactgcggtgcgtatcggatccgccaacgctgcagacagcggtaatagtccagcaactgctgccggacggtgggcggtctgcggggagcaagccgcaccttgccgtcggcaagtgccatgccgaaatcgttcttcaacttttccacggccttatagggagaaagttgaaaaagtctgccgacaaaatcgatcacatcgccatctgcctgacaggcgaaacaatggaaacggctgtccaccttcatgctggggtgtttatccccgtggaaggggcagcacatcataccgttccggtttacggctaagccgtacagctccgctgcctgccgggtcgagatggcgttctttacgtccgaaaagacagaggtgctaccctccgtcccaatgggtggggtacaggcgaaaggacgaagcccggtgaggggcgtgggtgaggttgggtttattcacacatcgatccgtcagagtgttgttcatttgacctcctgctgcggtacggcgtggctgagctcttccttgcggaagaaggcttccacgttctgttgtgcggtgcggagttcacgcagttcgatctgcgctttcttgtagcgggtgtagaacccgtttttctccgaggaaagggtctgatattcggcatccagctttttgaggtccggcagcgtcctgagcccgttggccttgaaataggcgcaagcggcctcgtacacagcaaattctgcacggtgctgctccttgaacttggcgggattccgcacagtctggagcttctgtgcaaggggcttgtactgccgatagaccacaagatgcccgcgcagctccttgagggagaccatgcgggcatccaggtctttgaccaccgccagtgcatcgtcgtgctgcgtttgcagttcggcaatgcgctggtgcagggcatcttcgctggtgagacctttctcctgcaacaggatgagtgtctgcgaccagcgtttgaggttgaactttttcgcccaacgctcatagccgatgcccttacctgcggcaactttcgcctgaatgtcaaccagtttcctgatcttatccggcttcttctcgctggcgggctggatggcggttgcaagctggatgttctgggagagggcggtcagcaccagctccttttccagcttcttgctcagtttcttggcggtgatgaactttgtccggccgggcgggcagtagctcaaccggcctcggctctccttcacggcgatgccgtgttcctgcatgagcaatgcagaaaattcctcgaaggtggtggtcttgttcagcacggagtagatctgctttcgcagcttgtccagctcggtctggtagacggtctgggtgggctgctgcccttcggcggcaagtttggcgttggcatggtcgaggcggcgttgtccacgccgctgcgcccaatactcgcgctccgaaacatggtcgccttgggcttccagcagattgatctggttcaggtcggcttgctcgcacatctccatgactgcgacacggaggtgccggagcatggcagaagtgcagcggtgcttcttgcccgcttcccagtcgcacggcttgtccatgaaaggctgccgttccacggtgcggacacgcaagctgccgatgacgatgtggacgtggatgttcccggcactgttgtgcccatccgggtgggtgcagacgatggcgggatgaccggggaagttgtccttgcagaactgtaagccaagggcttgcgcccgctccatggtcaggccgttctctactgcgtccttcgggtcgaagctgatgatataatggtgggtcttcacgtcctcccgcccgccgttcttgccgtacttgcgattggcaatcaggcaggccatagcaaacgaagattcgccgcactcaagggtgtcgagcaggtacgaatcccgcagcttgggtctgcccttctcgtccagaatgggcag

SEQ ID NO: 1157 - DNA, 37810 bp, Unknown
  gut microbiota DNA sequence
gaagtcattcttttgcctcagcgcttggcgctcaagtataataccacacccccgcctccttgtcaacactttttgacagattttttccaatttctttgcagaataaagaatccccctgtttttcacccgttacaggacgtgccttttttcttgacaagacagtgcacagaacgtattatggagtcatccccgtatcctgtgttatatagctatacttattctataagggagaagcgccatgtcctgtgtcaacatccgcggctgctgcatcggcgagggccgccccaaagttattattcctattgtagagcccacggaaaccgccattctgaaaaaggccgccgaattttccacattgcgcgccgattgtgtggaatggcgtatcgattgctttgaaggtgcaaaagaccttccggctatcgtgcactgcgctgcgaagctccgtgttgccttaaaggatcagctgcttcttttcaccttccgcacaaaggccgagggcggcaaagtcgctttgacccacgaagagtatcttcattttatccgcaccgtttttgccaccgactgcgccgatctgatcgacattgaatttttcactgcgggcgcagagcttcccgcgctgatcgaagaggcccacaccgccggggctgcagtggtgtgttccagccacgacttccataaaacgccgctgcgcgccgaactggtgagccgcatggttgccatgcagcaggccggggctgatctgcccaaactggctgtgatgccccagagccgtgccgacgtgctggagcttctggctgccaccgctgaaatggccgaccggcatccggagactcccatcattaccatgagcatgggagctctgggcgcggtgagccgcctttccggcgaagcccttggctccgccatgacctttgccaatcccgggcaggccagtgcaccgggacaggtatcgttggaggtcgtaaacgaagtattggatgcactgcatttataaatccagaaaggagcttttatgaaaaagaagtattctgctctcccagaacttcttttgcgaagtattttttacacgcttatcaattatgtgcttctcagcatggtgctgtcttttcggcttcattggagttccattctgttttctgctgccatgctgtggtttgctttggattattcaaagaccatccagcagttgaccggcaaacggcttctcgcagaccttttgtggcttggctgcattctcatcagcacatttattgcattctttgtcgggtacattcaaggctcgttcgcatcattttaacgaaaaagaccggagctgtaggtcgcacttacagttccggtctttctttttatgtcacaaagagatgattatgccagcttggcttccagacgggtgcggatggccttgataaagccctcgctgtccacagcggtgggggtgatgccctcagccagaccacacaggtctttcgtcatgatgccgtcgttcagggtctgcaggctggcggcttccagtgcctcgccaaacttcaccagctccggcaggccgtccagttcaccgcgcttcttgaacgcgccagaccacgcaaagatggtagccatggggttagtggaggtcttttcgcccttcagatacttataatagtggcgggtgacggtgccgtgggcggcctcgtactcgtacttgccgtccgggctgaccagcacactggtcatcatggccagagagccaaaggcagtggagaccatatcgctcatcacatcaccgtcgtagttcttgcaggcccagacaaagccgccctcgctgcgaatgacgcgggcaacgatatcgtcaatgaggctgtagaagtaggtgatgcctgcggcctcgaactttgccttatactcggtgtcgtacacctcctggaagatatccttgaaggtgtggtcgtacttcttggagatggtatcctttgcgccgaaccacagatcctgcttcacatccagtgcgtagttgaagcagctgcgggcaaagctgcggatggaatcatccttgttgtactggccctgcagaacgccagcgccctcaaagtcaaacacggtggcgcgctgctcagagccatcggcaccggtgaacaccagttcagccttgccggcacccgggatgcggaactcggtgcacttgtacacatcgccgtaggcgtggcgggcaatggtgatgggctttttccagtttttgaccaccggcttgatgctgtcgatcatgatgggtgcgcggaacacggtgccgtccagcaccgcgcggatggtgccgttggggcttttccacatctcatgcaacttgtactcgtccatgcgctgggcattgggggtgatggtggcgcacttgaccgaaacgccgtacttcttgttggcaagggcggcatccatggtcaccttgtcggcggtagcgtcgcggttgggcaggcccagatcgtaatattcggtcttgaggtccacaaacggaaggatcagttcgtccttgatcatcttccacagaatgcgggtcatttcgtcgccgtccatctcgacgaggggcgtggtcattttgatcttttccatagcagggttccctttcctctctttggatcgtttctccagccgcgctgcactgccagatgccgcgcgggcagttcggtagaatgtttatttgcggtaagcggctgccagcttttcaagggcaggcaggctgcgcttgaccttttcggtatcgatgcagtaggcaaggcgcacatagcccttgacgccgaagctgtcgctgggcaccagcagcaggtcaaactcccgggccttcatgcagaaagcgttggcatccttttccagagccttggggaagatgtagaaggtaccgccggggcgctccacctcaaagcccagcgcggtgagcttatcgtacagcaggttcatgttggtctcatacacactcagatcactagtcacatcctgacagcggcttacggcccgctgaatgatgctgggcgggcagttgtggccggtgaagcgggagatctgggccatcatgtccaccagcacatcctcgccttcacagcccggacgcaccgccacatagccaaggcgctcgccgggcaggctcaggctcttggagtaggagaagcaggtgagagtgtgggggtagaacgccgccgggtagggcacctttttgccgtcgaatgcgatatcccggtagggctcatcgctgacgaggaagatattgtggccgaacgccttgctcttctcggtcaggatctctgccatgcgggtgagtgtcccggcagagtagaccacgccggtggggttattgggggtgttgatgagcacacaggtggtcttttcgccgatcatctgctcgaatgcgtccagattgggctgaaaggtcggtgcctgcggcggcaccaccttgaggactgccccggtgcccgccacataagggccgtactccgggaagtagggcgcaaaggtgagcacctcgtcgccgggctgcgtgaccgcacggatggcatgggcaatggcacccgccgcaccggtggtggggaagatgtgcttctgctcatagggcaggccaaaggtctttgtcaggtgcgctgccacatcgatgcggaagcccgggtcaccctgactggggcagtagccgtgcaggtttaccggctcttcgttggtcagcagatcctgcatggcggcagtgaactcctgcgggcagggcacgctggggttgcccagcgagtaatcgaacacgttctcatatccgatctctgcggcacgctgcttgccgtacatgaaggtctcgcggatgacgctcttattgccgagcatcgcgcggtaggtctcgttcagcataatactttcccccgagagtttatttgtgggcagccgtatagctctgctccaccttgataatgcagctgtaggctgtatcctgttccttgatgaactgttccagctgttccagcagctctaccttatcccctgcatagcctgccggcagcaccagatcgaacagcacgttggtgtgggtcctgcccggcacgatgcgcagatcgtgcagcgaaagggccgggtcgagctggcgcagcttttcggtcaggcgggcgcgcagcacgcccacggcagcatccgaggtaacgatggggtcgtagtggatggtaaccaaaagccggtcattctttagaaaatcccgttcaatgttgtcgatcaggtcgtgtgcctccagcgggtcctgctcggcaggcagttccacatgcagggaggcgaactggtgtcccgggccgtagtcgtgcaccattaaatcgtgcattcccagcacgccgggataggagagcaccttctgctcgatgtggtccaccagatcctcgctggggctttcgcccagcagcgggctgagcgtatccatcacaagaccccagccggagatcaggatgaacgccgccacgcctacgcccatcaggccatccagcacatcccagccggtcacgcggcacagcaccgctgcaatgagcaccgcgctggtgctcagcacatcgttgcggctgtccgcagcagtggcaatgagggtctcggagccgatgatacgcccgatggtgcggttgaagccgctcatccacagcttgacgaggatggatgcgatcagcacggccaccgtcagccagctgaacatcaccggagtggggtgcagcaccttgaccacagattccttcagcagcgaaaagccgatgccgagaatggtcacgctgactaccagccccgccagatattcataccgggcatggccgaagggatgctctgcgtccggggccttgccggccagcttgaagcccaccagactgaccacgttggacgaggcatccgacaggttgttcagggcatctgccatgatggcaatggagccgaacagagtgcctacggtcagcttgcccagacatagcagcaggttgcatgccacgcccacccagcaggcaaggttgccgtaggcggcgcgcaccttagggtcctgcgcatggtcgggctggcggatgaaaagacgaatcaaaaactgagtcataacggtcctccatgggcagcgctggacacctgcataccctgtcatcgcttatagtatagcatttcgctttatcgttttaaagtattttccgaaaacttttgcccggtatagaaaagccccggcagagcgggatgccctgccggggagctttatgggaacggtaaaccgggattctcggatgaattacttctcagaaggcttgctcaggtccacgctgcggatgatcttgcgcaccggcaggatgctctttgcattcatggacagctcgtccacgcccatgcgcaggaaggtctcggtgagggcggtgtctgcgcccagctcaccgcagatgcccacccagatgccgtggcggtggcccgcctcaatggtcatcttgatggcgcgcagcacagcgggatggtgcgggttgaagaacggctccagctttgcattctggcggtccagcgcacaggtgtactgggtcaggtcgttggtgccgatggagaagaagtcgcactcggcagccagctcgtccgcgatcagcacagcggcgggggtctcgatcatggtgcctacctcgatgttctggcccatcttcacgccctcggcggtcagttctgcgcggcactcttccagaacagccttggcatcctgcagctcccgcaggctggtgatcatggggaacatgatgctcatgttgccgtaggcagaagcacgcagcagagcgcgcagctgagtcttgaagaagtccctgcgggtcaggcagatgcggatggcgcggtagcccagagcggggttctcctcgtgatccagcttcatgtaatcgacggtcttatcggcaccgatgtcacaggtacggacgaccaccttgcggggagccagactctccaccacctgcttgtaggcctcgaactggtagtcctcggtggggaagtccttgcagttcaggtagacgaactcagtgcggaacaggcctacgccgccggcatcgttctgctgcacagcacccacatcgctcatgccgccgatgttggcaaagacattgatggtcttgccgtccagcgtggtgttgggcttgcccttcagctcctgcagcagggcctgcttcttctgatcttcctgctggcgcttcttcaggctcttgagcaggtcgggggtggggtcaacgtaaacgcaggcgttgtagccatcgatgaccgccatcttgccgtcccagtcgtcctgaatatccttgcactggatcagggcagggatgttcatgctgcgggccagaatggcggtgtggctgttggagctgccctcacgggtgataaagcccagcagcaggctcttatccatgcggacggtctcagacggggccagatcctccgcgaccagaatgctgggctcggtgccctgcaggctggcgttgtccaccccctgcaggatgtccagaatggcctgtgcgatatcgatgacatctgcactgcgggcctgcagatacgggtcatccatggcggcgaacaccgcagcctgattgttgcctgccgtcttgacggcgtactcggcacactttttctggctgttgatgatctccttgatggcatccacaaagtcgtcgtcttccagcatcatggcgtggatgttgaacacctcggcgatgtcctcgccagcctctgccagtgccttttcatacagcgcagtctgctgctcaatggccttctgctgcgcttcttcaaaacgcgccacttccgctgcggtatccgctacctctgcggcagaaatggcagtatcctttttcttgtagatcttgagcttgccgatggcgatgccattcaggacgctcttaccggtgcctacctgcattgcacactactccttcttcatctgtgccggggccgcactgctccgacagtccaaaaaaagcccccgcagctcacccgcgagggccttcctcatcttaactgcggaatcagacgttctcggtcaggaacttctggatggctgctgcagcagcttcctcgtcgtcgccctcgaccttgacggtaacggtctcaccctgctttacacccatgcccatcagagccatcagcttgcgcatatcgcagctcttgccgtccttttccagagtagcgctgctggcaaagcccttgacggtcttgacgagcaggccggcgggacgagcgtggatgccgcatgcatccttaacggtatactggaattccttcataatcattttctccttacttgatcccgtgcggcgcttctgcacttgcaccagacgcggccgagccgcggcacggttgatacatctattataaacccttgccgggaatttttcaccatttcatattgctaattttttatgcaaaattttggtacaattgaacatacaaatgtgacaaaaatgcacgcatttcactttttcttctgcttgtgcgcaaattttaggcaaattgcgacctgattttgcatcaaaacccgaagctattcccggtcgtttccggctttggcaggtcgtttcggtgctcattccaccgggtagccctcggcatccagcggcagttccgtataaggcacagcctgcggcacggcatccggctcaccggaggtctgctgggcggtcaattcctcgtcatggcgttcgccccaatcgccgctgtagtcctcgccggaggtctgctgtgccggttcgctgccggtcagctcttcgtcgtggcgctcaccccagtcgccctcgtagtcctcgccggaagtctgctttgcctcagcttccgccatggcggcctgcatgtctttcaggcccaccacaacgccggagggccgttccagcaggtaagctcccacggcctttttgcggtacaccaacagcacgccgtagcggctggtctcgccgctgcttgccgccgggatcagcgccgtccatttttccacggtcttgcccttgtagcgtgcaaggtccataccgctctgctgcaccaccccgttgaaggccgaaaagctgtcatcccacttgcgggggatcttgaccttatctgccgtgatggatgcgccgtccacatccagaccgtagccggtgaaccatgtctggatgtcctgtgcactctcaattttgttcaccgccgccgagaccgcaacggtgcggttgctgatgaaccggcccagcagagcactgcccaccaccagtgcgcagcacatggcacccagacccagttttttcaggctcgttttgcttaacgtgactacaaacatatccccatgcctccccagcctgtttattgctctgagaacaatttattcagcacagctggggtgtatgacaaaagggcaggtaaaacctgcccttttgtcaatatcgatcaatgtgcttttgtaaaatcttccgagcttacttcgccgttctggcggagcacctgtttcagcacctgcatcacgccgtattcccggtgggacggtgccagaaacggcacctgcgcccgcagcggtccgctgccgttctccatcaaaaagccgtacttcgcggtggtgagcatctcggcatcgttgtaggtgtcaccaaaggccatcatgctgtcggccggaatgcccagcagtgcacccacctttgccagtgctgcacccttgtgcacacctgggttcatcacgtccacccagtttctgcctgccactgccaccgagaatgcaccgccatttccggtgtggaatgcgccgtagacccggtcgaaggctttctgcgagtcgtcgttgggcagatagacggtaaacttatccgccgccgcttccaccgcagtcaggtcatccacgtattccacccgggtataaaaattcttgaaaacggcatcgtatttctcgtcctgcttttccgcgtaggccgcctgcagtccgcacaaaaggcccacgtctccggcctgctttgtgctgcgggccagctgccgccagccctcggcaggcatttcggacacaaacaggtctttccccttccagcgggcagcgccgccgttgtcgccaatgagaatgatctcctccagcagatccgggaacatcgtttccagagtgtacagaggccgcccgctggcggcggcaaacaagatgccctgcccggccagtgcacggatggtctcggtaaactttggcggcagctggctgtactcgtccagaagggtcgcgtccatgtccgatgcgatcaggcgaatgcggtccattgcagtttcctcacttatccgatgtagctgatgttcacgtccatatcgcccttatagccgggcaggcgtgccgtgcaggtgccctgccacagggcgcagtcgatggggctgctggcaacaccataatgcgcgttccagatggtatattttttcaggctgttcagattgacacgcttgcggtaccacagggtagaggcatacacaccgggtttatagccctgtgccttgacctcctcacagaaggcgatggcgcacttggtgcggtcctccatacccagaccgtcggcgcggccggaaccattggaagcgccggatgcttcggtgtcaaagaagatggggtaatccagcttgcgtccgttcagcacgtaggcgcaggcaaaggcttcctccttggcttcctcctcggtggtggcctgactgaagaaatacacgcccaccttcaggcccgcattcttcacattggtgaaatgctcctcgaacatggggtccagcaccagcgtgccggaagcaccatagccgcggtagccgatgcggacgatcacaaagctcacgcctgcctttttgatctggttccagtcgatgttcttctgatacttggaaacatccacaccaaaggtcttgccattttccagcacaccgtccgcattgaagtaatagagtttattgtcgatgcactggatgccggtcaccggcttgttggtggtctggctgtagtagtaggtcttgccgccggaggtgcgccagccggaatagaccggctccgtatcgctcttgcccagccagccgaacaggaaattgagcagccagctgaaaaatccgttctcatcgctcaggtcgatgcactgggcctcggcggcatccatggcaccggcatccagcgcggcacggatctcttccggtgtcagcaccacgctgttttccggcgtgtgctggttcgtgctgttctcctccgcttcagtggcctgtacaggcggcgcttccgggtcctgtgcagcaagctccggggtctccgtctgcagggtgggcattgccgtttcctgctgtgcagaaatagtctcggtcactgccgcggtactttcttccggctgtgcagccagtgccagcggtgcgcccattgaaaaggtcattgccaatgccagaactgccgctgcgcaccgcgttttgccgcgggtgccgcgggcagtcagtttattccagaacgtttttttcatgctgtgctccaaacctcatgcatttttatcgggatgccgcccttcacaaaaagggcagcgtttcatcttctcaatactctttcagtatacacccgcgggcaagcccccgtcaattgccgcacactgcaaagcgcagctccgaaaagctgccgccccggtatcagaaaatgctccaaaatagatacgtctcagcccgcaaaaacattgcacaaagccaaaaattgcagatatttccagcaaaatcagcatttcgtcttgttgtcttgacatgtgtatggtattatacttgacatgcagtttttgcattgaatccaccatcttgaaacagaaaggcagtttctcatgtcaaatgtgaaagatttcttaaaacgcaaggatatcgtcatcaccccgcagcgctatctcattgaagcgctgggtgccatggcacagggcctgtttgccagcctgctgatcggcaccatcatcaagacgctgggccagcagaccggccttgacgtgctggtagaccttggcggttacgccacggccatgagcggcccggccatggcctgcgccattggctgggcgctgcactgcccgccgctggtgctgttcagcctgatcaccgtaggctactcagccaatgctctgggcggcgcaggcggcccgctggccgtgctcatcattgccatcgtggcttccgagctgggcaaggccgtgagcaaggagacccgcgtggacatcctcgtgaccccgctggtgaccattttttccggcgtgggcctttccatgctgatcgccgcacccattggcgctgccgcaagtcaggtgggcaccctgatcatgtgggccaccgaacaggctccgctggtcatgggcattctggtatccgtcattgtgggcgtggcgctgaccctgcccatttcctctgccgccatctgcgccgcgctgggtctgaccggccttgccggcggtgccgccgtggcaggctgctgcgcccagatgatcggctttgccgtgatgagctacaaggagaacggcgtgggcggtctggtcagtcagggccttggcaccagcatgctgcagatgggcaacatcgtcaagaacccccgtatctggatcgcgcccacactggccagtgccatcaccggcccgctggccacctgcgtgttccactttgagatgaacggtgccgctgtctcttccggcatgggcacctgcggtctggtgggccagatcggcgtgtacaccggctgggtcagcgacattgccgccggtaccaaagccgccatcaccccgatggactgggctgccatggtgctgctgtgctttgttctgcccgccgtgctgagtgtgatcttctgcgagatcgagcgcaagctgggctggatcaaagagggcgatctgaagctgaactaacttttagagttgtctccgcttcgctctgacaatatcagcggaaaaatatttttatatatagcaacgccggaatgactgcggtcattccggcgttgccttttcacgataaggagccgggcggtgaacagccttttgctaccgtcaacctgcagctgtcgcacagcagatggagctcaaacgattcgtttcccgtccagcactgcctgcgtgagggtgtcgccttcatacaccagcttgagggagaaataaggccgttcctcattcagcagccggaagaagattttgtcgccctcccagatgggcagttcagccgccttatccttcggcacccattccagcacgccttccctgcaggcatcgccctgcaccatctcgcccgtccattcatcagcggtgtacaggtggatgaactcggtcatgttgccccaaataaaggtcagcagaccccgggcgcggaagcgcttcagcgtcaggccggtctcctccttcacttcccgcagcaggcagtcctccgggctttcaaaccgctcaaactttccgcctacaccgatccatttgtcgtggttgtagtcgtcctgctttttgatacggtgcagcatcaggtaggcatcgtcccgttccagatagcacagcgtggtgctgaaaatgggaaattcggggttcatgaaggctcctagattcattgagttctccttttgatcttgtttttgtggaaaatgccgtttttcgctgcggcccctcccgtgaaaaaacacccccggcaaagcccgcaggctttgccgggggtgcaaaccaaaaataactttttcctctgaatatgccagagcaacgcggcggcaatttaaaatcattgccccttccggcttgctcttcccttgcccgcattgttcagcttgcgcacaaggtcgttctgatgcttgcgctggctgggcgtgggctgcgggtctttggcctcctcggcgcggcggccgctctgggcggtgtccggatcgatgcgttccagcgtccactcctgattgccgcctgctacaaagttccagatctgggcctgtgcgccgttggaggtgttcatacccacaaggtcgatgtatttatccgccagcacattgcggatgcgggtgcgcccgctgcgggtgggctccagcgcccagcactgactcagcccgctggtgcggtcccactggtgcagccatgtgccctccaccacaccgccaagggccagatccatcatcttgccggtaaagcggttgcagatgcgccagcggccctcgcctgcatccacgaactgccactgctgccacggatggcctgcatagctccacagctggatggccgcgccgttctcggtgttgaagttctttacttccagtacctttccattgggggctttgatgatataaaattcattttccagaatgactgcctgtgatgcctttgccatagagcacgactcctttccagtttggtagccctattatagcgtatttgtcctttggcagcaagaatgcttttccataatctttttacgttttattgtgcattttgacatgattcccgcaacgataacgtttacgcgcaacaaaaccgtctctgcagggaatttctttacactccggcctgtcttgtgatacaataaaggcacacgcttttagggagggatttggaatgaccaacgaaaccttggaaaccattaaaagccgccgcagctgccgtgcctataagccggagcagatcaccgacgaagagctgaatgccgtgctggaagccggcacctacgctgccagcgccatgggccgccagagcgcaaagatcgtggtggtgcaggacgctgccacccgcgcccagctcacccgcatgaacgccgctgtcatgggcaaggacaccgaccctatgtacggcgctcctaccattctggtagtgctggccgatgccggttccaaaaatgccgtgcaggacggcagccttgtcatgggcaatctgatgctggccgcggcctcgctggggctgggcagctgctggatcaaccgcgcaaaggaagagtttgaatccgacgagggcaaggccctgctccggcagtggggcatcgagggcgattgggtcggcgtcggccactgcattctgggctatcctgctgcagaccccaagcccgccgccccccgcaagccggattatatcgtaaaagtgtaaggagaactatgaagcctgattacaagctggtcgccaaggccaaatacatccacgccaccgccgaccttgccagtgagctctggcacgaggtgtacaagcgctactatcccgcaaagcagctggacacccttgtggaagagctgcagagcgcagacgccatcgaagcagacatcgacaacgatgtgaactattttctggtcgttctgggcggcaaaaccatcggctactttgcgtggaagatggagaacaccgccctgcatctgatgcacctgtacctcaggcccgaataccgcggcaaggcactgggccgggacatcgtgctctcctgcgaacggctggcccgcggcgagggcaagggccgtgtgtggtgcaccgtgcacgccaaggccctgccggtgcagcagttcttcaaggccctgcgctaccgcaatttaaagcccgccgagcaggaaaacggcaccgtcccccgggacgaagtggtgtttgagcacacgctgggctaaaaagccgcaaatgctattgaaatttctccccgtttgtactacactggtgtagtgtaataaagtgtctgcctgtgggcggcatccgcaaaaaaggagaacaacatggcaaaagatcatcctaccggccagtccggtctgtatcaggcatttttgcagctcaagactccggaacagtgctaccgttttttacaggatgtgtgcagctattccgagctgagcgcaatggagcagcgctacaacattgccgaaatgctggtggacaagcgcatctacaccgagatcatggataagaccggtgcatccagcgccatcatcagccgggtaagccgggtgctgagtgccaacgacagcgtgttacgcgccttgctggaagcggaaaaagctgccgacgatcaaaactgaacttccacacaaaccatgccgcgtgccgcccgtgcggtatgcggcttttatcattcaaccgggaaggcagaagtccccacgccagcggggtacttctatcgtttttcctcatgcggcgcagatgtgccgtcttcatcagaaatcagggaggtttgattttcatgagcaaagctgttgtattttttgccgagggcaccgaggaatgtgaagccctgctggtggtcgatctgctgcgccgcgccaaggtggaggtgaccgtggccagcgcatccggcagccgcgagatcgtgagcagccacaaggtgcatatcaccgccgacgcactggccgaagaggtggattattcggatgtggacatggtggtgctgcccggcggcatccccggcaccccgaaccttgccgccaacaagaccgttaccgacacctgcgtttcctttgcaaagagcggcaaaaaggtagctgccatctgcgcagcacccagcgtgctggcatctctcggcctgctggagggcagaaaagccacggcgcacgccggtttccaagacaaattggccggtgccgaggtgctggataccgaagtggtagtggacggcaatatcaccaccagctacggtctgggcggtgccatcccctttgcgctggagctggtgcgccagctggccgggcaggctgaggccgaccgcatccagaacgccatcgcttaccgccactgagggagggagtcagtatgcgttttgtcacctgccgcctgccggacggcgtggaagatccggccattctttctgccgacggcacacagatctggccgttgagctggctgggcctttcctatgaaaccttgtccgatgccatcccctttctgaccccgcaggtgcgggccggcctgcagcttgccattgcgggcatcccagccctgcccgtggatgccgtgcagctgcaaagccctattccctgcccggcgcaggatgtggtgtgccttggcatcaactacatggcccactcggacgaagcggagaaatactctgccgatgcctttgcaaccaaacatcaggatgccatttatttttccaagcgcgtttcccgcgctgtgccggacggcggctttattgaagctcacactgaccttgtgcagaagctggactacgaatgcgagctggctgtgattctgggcaaagatgccagggatgtgcccgccgggcagacaaaagactatgtgttcggctacaccatcctgaacgacgtttccgcccgcgatgtgcagaccgcccacaagcagtggtatttcggcaaaagtctggacggcttcacgcccatcggcccctgcatcgttaccgcagacgaattcgacacctacccgcccaagctcggcatccgcagctttgtcaacggcgaaaagcggcaggactcgaacaccggcctgcagatctttgatatcgaccacgtgatccacgagctgactcagggcatgaccctgaaggccggcaccatcattgccaccggcaccccggcaggcgtgggcatgggcatggacccgccgcagtttctgaagcccggcgacacggtgcgctgtgagatcgacggcattggcagcctggccaacaccgtgcggtgagcactggcatttgtgccaaatatccgttgcgttttccgtctgtttgcatgaaaatccgcagcggcactgctcttttcggagcgggtgtgctatactgacttgtatgaatgaaaaatgcggtcccgggccgcagaaggggtaaatgaactatgaaggaatacgcattcggcatcgatctgggcggtaccaccgccaagatcggcctgttcaagaccaccggcgagctgctggaaaagtgggaagttcccaccgacacctccaacgccggtgaacacattctggaaaatctggccgctgccgtgcagggcaagatgcaggaaaaaggccttgccgccgctcaggtggaaggcgtgggcgtgggcgtgcccggccctgtgctggacagccgcattgtgcccatcatctgcgcaaacctcggcggctggggcaagcataatgtagccgaagagctgagcaccatgctgggcggcatccgggtccttgtgggcaatgacgccaacgtggctgctctgggcgagatctggatgggtgcagccaagggctgccgcagcgcagtcatggtcacgctgggcaccggcgtgggcggcggcgtcatcgtcaacggcaaggtcatcgatggcacccacggtgccggcggcgagatcggccacatcacggtggaccgccacgagaccgccgcctgcggctgcggcaagcacggatgtctggagcagtattccagtgctacgggcgttgtgcgctgcatgaagaagctgctggacgagaacccggacaccccctgcaccctgcgcggcaccgagtttgccgccaaggacgtgtttgatgccgcccgcaatggcgacgcccttgccgcccgcgaggtggacgagatgaccgatacccttggcatggcgctggcgaccattgccgccaccgtggacccggagatgttcatggtgggcggcggcgtatcccgcgccggtgatgtgctgtttgccccgctgcgggagcatttcaaggtctatgccttcaagtcctgccgtgagacccctatcgtgcccgccatccttggcaacgatgccggtatctatggttctgtgcgcctgatcgtgggtgaataattcagcggtattttttcagaaacttaaaaacccggaaacgacggtcgtttccgggtttttctttgtacgttcaataaaatttacagcgtatcttcccccggcagctgattccacaggcggtagtagacgccctgctttgccagcagctggtcgtgggtgccggattctacgatgccctcttcgcccagcacaaggatgcggtcgtaatccttgatggtggtcaggcggtgggcgatggtcagggtggtgcggccatgggccagcttttcaaggctctggcccaccaggatctcgctttcgttgtccagtgcgctggtggcctcgtccagaatgaggatgggcgggttcttcaggaacacccgcgcaatggcgatgcgctgcttctgtccgccggagagcttgacaccgcgctcacccacataggtatcaaagccgtccttcagggccagaatgaacttttccgccccggccagacgcgccgcttccatgatctcttcgcgggtggcgccgggcttgccgtaggcgatgttctgggccaccgtgccgctgaacagatacacgtcctgctgcacgatgccgatatcctgccgcaggctcttcagggtgacatggcggatgtcctgcccatcgatcaggatgcggccgctggtcacttcgtagaagcgggggatgaggttgcacagggtggtcttgccgccgcccgaggggccgaccagcgccagccgttcgcccggccggatatccagactgacgttatgcagcaccttgttgtggtcgtccgggtactcaaagctgacgttttcaaaccggatgtcaccggggccgggctgcagcggtaccgcatccgggacatcgccgatggtcacaggggtgtccatgatctcggcaaagcgctcgatgccggtcatgccgcgctggaactgctcggcaaactccacgatgcggcggatggtggcaataagggtggtgacgtacagcatataggccaccatgtcaccggcggtgatcctgccgtacaccagcgagaggccgcctgccagaatgaccaccagatacatcaggccgtcgaacaggcgggtggaggtgttgaaggcacccatggcgtagtagccgagggtcttgatctgctcaaaatccctgttgccctttgcaaacttctcgcgttcctcatcctcggcggcaaaggccttcacgacaccctgccccagcaggctgtcctcgatggtggagttcagctcgccgatctgcacgcgctgctggcggaaccgcgcccgcagccgtccgttcaggtaaacggacaccacgcccatcagcggcacgcaggcgaacaccgccagcgtcagcggcacactggcccggcacaggatgacaaaggacaccacgatcttgatggccgcaatgaaaaattcctccgggcagtggtgggcgaactcggtcacatcgaacaggtcgttggtgatgcggcccatgatggtgcctaccttggtgttgttgtagtaggtgtggtccagcttgagcaggtggtcaaaggcatcgcggcgcatatccgtctcgatgtgcacgcccatgatatgaccgatgctggacatgtaatagctggctgcaccgtcgatgatgcgcagcacaaaatagagtgctgccagccgcagcacgatgcccgccgtcagggtgatgcccacgcccatggcggcgttggtgatggtgctcatgatcttgggcagcacgatgtcacacagggtggtcagcgctgcacagaacaggtccagaaacagggtctttttgtactttgccagatagggcagaaaacgccggatcagcgcaccgctgcctgcgtggtgcgccccggggtcgttgattttggtttttgacatggttcctcctgttgtaaaaccctctcaggctcacctcgttcgccagctcccccgagagggggagcctttgcatctttcgggaagctgtacaaaacctccccctttcgggggaggtggcattgcacagcaatgacggagagggttcgttctcttactttttactgtaatcccgctcgccgtagatggcggtgccgatgcgcacaagggtggcaccctcccggatggcgttttcaaagtcgccgctcatgcccatggagagggtctccatggacacgttggaatagccgcgctctccggcctgcacaaacagcttgtacacctcggccagatagcggcggttgcgggtatcgtcgtcgttcacgggcggaatggccatcagccccttgacccggatgtgctcctgtgcggcagcagcatccagcagcggccagagcgcttccggtgccacgccggtcttgctctcctcgccgccgatgttcacctccagcagcacgttctgcacgatgccggccttggctgcttccttctcgatggcgttcagcagatgctcgctgtccacgctttggatgaggctggcacggcccagcacttttttaattttgttcgtctgcagatggccgataaagtggctgggcttgccgcagtaagcacctgcgtcaaagtttgcgcacagctcctgcacatggttctcaccgaacacatcaatgggcagggctgcgcttgcagccacggtctgcgccgtgcgggtcttgcaggcggcgcacagctgcaccgctgccgggtcgcggcctgcttcacgggccgcggctgccatcttttcccggatctctgccacggcctcctgcatctgttccagattcttttctgccataaagctcagtcctcctcggtatacttggcgcgttcgccgccgatgagcttcgggcgggtgcgggcgcacaggatgttcgcttcaccaattttggaaaggctcagccgcaccggcaccgccacccgcttcaggtgcatcccgatcagggtgccgccgatatcaatgcctgcatgggcacggatctcctccacggccaccggctcccggaacttcttccagcaggtagtggcccagctgccgcctgcgtgggggcgcggcaccacgcacacctcttcccagccgtatttttcggcggcttcgcgctcgatgataatagcgcggttcagatgctcacagcactgcgcggccagccagatgccgttttcggccagcactggggcaatgcccgcgtacacggcctgcgcggcttccagactggaatccttgccaatgtgcccgcccacgatctcgctggacgagcagcccaccacgaacacatcgtcctttttcagctttgcttcggccagcagttcggtcactgcctgccgggcctgcgtctcgatctgttttttgaattcttctgtcataaaaaacacctcggtttttatcaaagatcaaagatttgcactgcgcaccttttcgctgcctgcaaggccgagatacagcctgctctccaccgggcacagagctgtcacaccgcctgcacccttgctggagaccgtccgctgccagcttccgtctgcgatatccacagcttccgcgcagggcgcatcggcaggcaggctgaacagcttttcctgcagattccggcctgcacgcagggcaatgccccgcagcagggtgctgtcggcgttcttttccagccagctgctgcgcgcccaccggtagccgatgtacagggtgccgtctgcatccatagcaagcgcaccgggataccccggcaggccggaaacaaagctctggcagtttttaccgcccgccgtcaggtcgcgggcatcggcggcagcgctccacacacagcggttcccaaggtcagccacgaacagcgtgctgccgtcccggctcagggccagcccggaagcaccggccacaccgcccagcaccttctgcaccgtgcgtgctgccgggtcgtatacatacacgcagcccgtgccggtgtgggccagcagttcggtgcgcagagtgctctccagtccgtccgcggcactggcactggcagcaaccgcaaagtagatcctgccgtccggcgcggcttccaccgctgagacagcccccagcggtgcaccgtcgatctgggtcactacctgctccaccgccgtgccccagctgtcgtgggcggcgcggcacaggctgccgccgccgggcgtgaggatgctcagccacaggtccccgctgccgtcaaaggcaaaaccggtcagctcaccgtccacggaaaggatggccgcatcgtgtccgccgtcggtgcgtacaaggtcgctcgtgcgcttttttaaggctgcgccgtcgtatgctgcggcatacacaaggccgtcctgtgtgcggatgcagtccacaccctgatattcgcccagatccagcgttcccttatgatcggtggcaagggccgtctgtgctgcaccggtatcctgccggacatctggcgcggtgtagccttgcggcggtgtatcgatgggccggaacaccagtgcatacaccagcgccagcaggatgcacacgccaaacaccgtgctggccgtgcggaaccgcttgagcagcgcgtcccgctccaccgccatctgggccgcatactcggcacggcggcgggcagcgcgggcattggcgcggtttgcccggcgcatccagcgatccacgaacaatgccacctgcggcccgatggtgagcgacgcaatggcaaggatgagcagaaattcaataagtccgatcctcatagggctttttcctttatcttcagagctttttcaggggggtatccccttatcgtttcagtatagcatctgtggcgcggcagttcaagcacccaactctgtctcccggcttttgccgccgcctgccgcctttttctccatctttcctgccaaagccttttttgccgtgctgaaatatgctatactgattataaatatggcattctgcaccggaatgccgcgtgtcagtgtaaaagaggataacatggaagcattcaaatataatgtgcagccgggccgctaccggcatttcaagggcaacgaatacgaagtgctgggcatggcccgccacagcgagaccgaagaggaaatggtggtgtaccgcgccctgtacggggaacgcgggctttgggtgcgtcctgccgccatgtggtgcgagaccgtggagcgggacggcaaagtgcagccgcgctttgtgcgcattgaggagtgaaccggcagtttttgccgatgggataaaacggagggtgatacttttgtacagtgaacagaaacaggcgcttgccgccgaactgagcttcaagcatccggcagtgctggctgtcagcggttccgcaggcagcggcaagaccgctctgctggccgcgctgctgccggtgctcaagagccgcgggctgaaggtgggcgtgatccgcgaggctgacgatctgcgcctgcccgccgagaccgaccgcctgcatgaggccggtgccgagggtgtggccgtgtttactgccgggcgctatctgcttaccgagcagttccgcctgaacgagcaggacctgctggctttgttcgagcgccacggctacgaccttgtactgctggaaggctttggcgacagcggctgggccaagatcgaggtggtgcgcagctcggtcagcccggtgggcaccgcgttccagcccatggccatcgtgggcgatgtgccgggcgctgattttgcactggacgatcctgctgctctggcagactggatcgagaaccagatgccgtccctgtaacggaggttctgcatgaaactcatccgtaccgaagacgctgtcgggcaggtgctctgccacgacatcacacagatcattcccggccagttcaagggagcacgcttccgcaaagggcacatcgtccagccggaggatatccccgtgttgctctccattggcaaagagaatctctatgtctgggagaagcgccccggcatcctgcacgaggacgaagccgctgcccttttgtacaaggcagcggcgggccgcaacatccacggcactgagccgaaggaaggcaagatcgaactggttgccgactgcgacggtcttttgaagatcgaccgcgccgccctgctggccgtgaaccgcacaccccaaatgatgatcgctaccatccacggcgacctgcccgtgaaaaagggccagaagctggccggcacccgcatcatcccgctggtgatcgagcaggagaagatggatgccatgcaggctgcggcaggcagcgagcccatcctgaacgtgctgccattccacccgaaaaagtttgcggtcatcaccaccggcagcgaggtattcgagggacgcatcgaggacaaattcacccccattctggtgggcaagctggccgaatacggctgcgagatgacctatcacaaaacctgcgacgatgaccccgccgggatcaccgccgccattctggaagcaaaggccgcaggctgcgagctgatctttaccaccggcggcatgagcgtagaccccgacgaccgcacgccgcttgccatcaagaacaccggtgccgagatcatcacctatggcgcaccggtgctgccgggtgccatgttccttgtgagctatctggacggtgtgccggtgtgcggcctgcccggctgcgtgatgtacgccaagcgcaccatttttgacctgctgctgccgcgcctgctggccgacgatcccatcactgccgaggacattgcccggctgggcgagggcgggctgtgcttaggctgcgccgaatgccactggcccaactgcggcttcgggcattgctgaaaccctctcagtcaaagccttacggctttgccagctctcccaaaggggagagctttatcaaggtaaaaattatgagcgaaacaaaactttctcattttgatgcgtccggcagcgccgtgatggtggatgtgagcgaaaagcccgtcactgcacggcaggctgtggcccgcggcatcatcactatgaatgcggcagcctttgccgctgttcgggacggcaccgcccagaagggcgacgtgcttggcgtggcccgcattgcaggcatcatggcggccaagcgcaccagcgagctgatccccctgtgccatccgctgccgctgagcaagctgactgtggattttcaccttctgcccgaacagcaggccgtagaggccgtgtgcaccgccaggaccatcggcgtgaccggcgtggaaatggaagctctgaccggcgtttctgccgcgctgctcaccatctacgatatgtgcaaggccgtggataagggcatggagctgggcgagatccacttggtcgagaagaccggcggcaagagcgggcactatgtgcgggccgagggcggctatgtttgatgcatacggccgcaatattcactatctgcgcctttcggtcaccgacctgtgcaacctgcgctgccgctactgtatgccggacggcgtgccaaagctggcccacgaagatattctgacctatgaggaatttctgcggctggctgcgctgttcgcccagtgcggcatcgacacggtgcgcatcaccggcggtgaaccgctggtgcgccggggcgtggaacaactgacggcgggcctgaaagccattcccggcatccgccgcgttgcccttaccaccaacggcgtgctgctggcccagaagctgcccgccctgctggcggcgggccttgacagcgtgaacatcagcctcgacaccttgcacccggagaccttccggcgcatcaccggcaaagacgagcttgccgccgtgcaaaacggcatccgggcggcccttgccagcggcattccggtcaagctgaactgtgtgccgcagcccggcgtgaacgagggcgagctggaaagccttgctgccctcgcacaggagcatccgctgcaggtgcgctttattgagatgatgcccattggctttggtgccgggctgcccggcctttccagcctggaactgctggagcgcttttaccgccgctggccgcagctgcagccggtgacccgtgcggcctttggcgatgggccggcggtgtattattctgcgcccggctggcgcggcagcatcgggttgatcgctgccgtgcacggcaaattctgcgcttcctgcaaccgggtgcggctgacaagtcagggctttctgcgtccgtgccttgccagcgaatccggcaccgacctgcgcgctctgctgcgcagcggcgcggacgacgcggcccttttgcaggccattcaaaacacgattctggcaaaaccccgggagcatcacttcggccaaggctccatgcccgccacacgagggatgtaccggatcggaggataacacaaatttatgggtaaaattctggctatctgcacaagcccccggcgcggcaccttgaaaacgccggtgccgtccgctgttctcaccccggagtggggtattgtgggcgatgcccacggcggcagctggcaccggcaggtcagcctgctgagcgcggaaaaaattgaagctttccgtcaaaagctctgggtggactacggtgcctttggcgaaaatctggtggtggaagggttcgatcttgccaccctgccggtgcccagcttttttgccattggggatgccgtgctggaaatgacccagatcggcaaggagtgccacagcgactgcgccatccgccggcagaccggcgactgcatcatgccgcgggagggcgtgttcgcacgggtggtaaaaggcggcaccatccacaccggcgacgagatgaagctgctgcccaccccggcagacctgcccctgcgcgcggcagtgatcaccctttccgataagggcagccgcggcgaacgggaggacaaaagcggcccactcattgtggagatgctcaccgccacaggctacaaggtggaggaagcactgcttctgccggacgatgccgcccagctcaaaacccagctgctgcgccttgcggatgcccgtcaggtgaacctgatcctcaccaccggcggcaccggctttgcaccccgggatatcaccccggaggtgactttgagcgtagccgaacgcaacgcgcccggcattgccgaggccatgcggtaccatagccttaccatcacaccgcgcgggatgctcagccgcggtgtcagcgtgctgcgcggcaagaccctgatcgtgaacctgccgggcagccctaaggccgtaaaagaaaacctcgagtacatcctgcccagccttgcgcacggcatccgccttgccgccgggctggacggcgaatgcgcccggaagtaaaaaagtatcccggtgggcggcaccgcatcctgtaccgtatcaaatgcaaagattcattttaaaaacaggagcgcttatcatgaacaacactaaaatttcccgccgcagctttctggctgctgccggtatcgccggtgccgctgcggccctgaccgcctgcggctcctccgcttccagcaccgcatcttccgtggcaggctctgccgctgcttcttctgaagctgccggtggatccgtggagctgatcgtgtttgccgccgcctccctcaccgagaccctcaccgccatcggcgagatctactctgccgagaaccccggcgtgaccttcagcttcaacttcgactcctccggcaccctcaagacccagatccaggaaggcgcggactgcgacctgttcatctccgccggtcagaagcagatgaaccagctggacatcaccgcttccgccgatgtgaacaccgaaggactggacttcgtggacagcgattcccgcgtggacctgctggagaacaaggtcgttctgtgcatgcccgagaatggcgataagggcatcgacagcttcgattctctggccgagcacctcaaggccggggacattctgttctgcatgggcaacagcgatgtgcccgtgggccagtacacccagaagatccttgcctactacgctctggacgaggaagcactggccgcagccggtgtcatcacctacggctccaacgtcaaggaggtcaccacccagatcaccgaagccagcgtggatgccggtgtcgtgtactgcaccgatgcctacagcgcaggcctgacccccgtggatgaggccaccaaggagatgtgcggtcaggtcatctatcctgccgccgtgctgaaggccgcccccaacgccgaggctgccagggagtttctggcctatctgcagaccgaccgcgccgcgaccgtgttcgagagcgtgggcttcaccgcactgtaaatccgttgtttttcagagcttcccctccgggggaagcctttttattcggaggtatcatttatggactggtatcccctttggaacagcctgcgcatcgccctcgtcagctgcgcggcggtgttcttccttggcatttttgccgcctactatattgccaagctgccgcgcactgtcaaaggcgcgctggacgtggtgctcaccctgcccatggtgctgccgcccacggtggtgggctattttctactgcttttgttcggcgcaaagcggccgctgggtgcctttttcatggagcatttcggcgtgaagctggtcatgaactggtacagtgccatctttgcatccatcgtggtggcctttccgctgatgtaccgcacggcgcgcggcgcgtttgaaagctttgacgaaacgctggcatggtcggcgcaaacgctgggccagtcggacgtgtggatcttctggcgggtgcggatgccctgctgccgtcagggcattctggccggcacggtgctggcctttgcccgcgcgctgggcgagtacggtgccaccagcatgatcgcaggctacacccccggcaagaccgccaccattgccaccaccgtgtaccagctgtggcgcaccaacgacgaagccggtgccatgcgctgggtgctggtggatatcgtgatctcggcagtggtgctgctggccgtgaatctgctggagaaaaaacagaaagcaggtggccgcgcatgagtcttgaagtgaacattaccaaaaagctggatggctttatccttcacgccaactttgccgcgcgcagcaccgccacagccattctgggcgcatccggctgcggcaaaagcatgaccctgcgctgcattgccggtatcgtaaagccggatgcgggccgcatcgtactggacggccgggtgctgtttgacagcgcccagcacatcgacctgccgccgcagcagcgcggcgtgggcctgctgttccagaactacgcactgttccccaacatgaccgtggagcagaacgtgctctgcggcctgaaagccgaaaaagacaaggccgcccgcaaggcccgctgcgccgaaatgctgcaggccatgcggctggaatcccttgccaagcgctacccggcccagctttccggcggacagcagcagcgcaccgcgctggcacgcatccttgtgggcaggcccaaaattctgatgctggacgagccgttcagcgcgctggacagctacctgcgcgaagaagtggagggcgaagtgggcagcctgctggccgggtttggcggcacggcgctgctggtcacccacaaccgtgacgaagcctaccgcctgtgccgggatatgatcgtgatggatggcgggcaggtgctgcgcaccggcggcaccaaagaggtgtttgcagacccgcagagcaccaccgcggcacggctgaccggctgcaagaacattctgtcctgcacccgcgtggatgcccacaccgtgcgcctgaccggctgggatgcgccccttcaccttgccgccgaggtgccggaaacctgcaccgccgtgggcatccgcgcccacgactttgccccctgcgcaccagctgcgccgaacgctctgccggtgcagctgaactccaccagcgagaatccctttgactggaacctgatctttaccgcgccggacggcactacccgcctgtggtggaaggtgagcaagacgaacctgaccgctgcgtcgccggaggcaccggcgtttctgggcactgcaccgcagaacatcatgccgttggggtgacggacagcacgccggggattttcttcagcgcttcctgatcggccttgttcaggtccttgaccgcgaaccgcagtcggatcatgcagtgtgccacgctggaaatgttctcggtgccgcccaccagctgaaccacttccgcagcaggttctgcttggcctgctcggtgggcgcgaagttgtattttgccagcacgcccaccgcctgccggttgaactcttccggatagggggaatccagatcgtaggtgcgcagtccggcttccacatggcccaccgggatgcgcaggtaaaaacaggccagcgccgccgcaccttatccacaagctcactattatatgcgccaaactcggaattgtgcaggtcggaaagcaccaccatccggctgggcctgcggtctgccctgcaaactccggctgtgcagggccgtttttctgtggtatactggtactggaagcagcccgccgctgcgggcactttttttgaaaagcattcacgcaaacttcacagcttttttttattcttgctgtatgatattctggtcaagaagtctattattgaggaaggtgtctgtattatggctaagatcctgatcgttgacgatgagccgcgtatccgcgagctgatccgcgaacatttacaatattccggttatatctgtgaagaagccgctgacggcacagctgcgctgacccagctttccggcggagccttcgatctggtcattctggacctgatgatgccgttcatggacggtatgacctgcctgcgggagatgcgcgcccgccacatcaacacaccggtcatcatcctgaccgcccgcggcgaggaatacgacaagctggccggcctggagagcggtgccgacgactacgttgtcaagcccttctctccccgtgagctggtagcccgcgtcaaggccgtgctgaaccgcaccatgcccaagcccgccgctgcctccgacaccatgacctttggtgagctgaccatcgacacggccagccacacggtgcgcgtttccggcgaggaggtggccctgacccccaaggagttcgacctgctggtgttccttgcttccaacaagggcatcgccctcagccgtgaaaagatcctgcagaaggtgtggaactacgactactttggcgaggaccgcaccgtggatacccatgtcaaaatgctgcggggccatctgggcaagtgccgcagctacattgctaccgtgtggggcatcggctacaaattcgaccccgacgcaacgcgctgataaaggagcggaggattcatgcggcaccatcactcccccggcatccgcggccagctgatgtggtttttgtgttgtatctgtctgttcctgctggcactggtgtggtttctgtccacccagctgctggaaccgctgtacaccaagcacattgaaaaacagctgaccactcaggcagaaagcatcaccgccgagctggacaaggctattgcaaacggcgaagccctttcggcatggtcttttggccatcttacggtcaacaccacgttttttgaccggcttgccacccagctgtacgccagcggttcgctgaacagcttctgtgtggatatttccgataccaccatgcgcacgatctataagatcgagaaccagtcctactgcaacctgcacgaaacgctgctctcggattccgccaacaacgatatgatcgtttccaccgctgtggccatgcgcaagaaatgccgcaccaccggcggctttgtgcagaccctgaatccgccgcggctctccggctcggcacagctgctggtagggcgcaacacctccggcggcgagtacaccgttctggtcactaccagccttgtgcatgtggctgaagccggcaaggtgctgagcaccgtgctgcccatggcagcggcgctgatctttgcctttgccatgacggcggcatggctgttcagtgagtggttcacaaagccgctgcgccagctttccagcgctgcccgccagatggccatgggcaactatgccgtgcaggtggatacccgccgcagcgatgagctgggcgatctggcccgggacttcaaccacatggcaagcgaggtgcagcattcttcgcagatgcagcgcgacctgctggccaacgtctcccacgacctgcgcaccccgctgacccttatcaagggctatgccgagacggtgcgcgacattaccggcgacgacaaggcccaccgcgatgagcagatgaacattatcgtggacgagaccgaccgcctgaccgcactggtctccagcgtgatggagctgagcaaggtgaccagcggtgccgacaaatgcgagcgcgtgcactttgatatgggccagctgtgcgacgaggtgagcgaacggtacgatgccatctgcgcccagaacggctggcagctccagctggagctgccggacgaggaactgcccgtttacgcagaccccaacatgatgcagcgcgcactgcataacctgctgggcaacgccatgcaccacatcggcaaagacggcatcttcatcctgcgggcccagcgctgcaccgagggtgtgcggatcgaggtggaggaccacggccccggcatctctgccgacgacctgccctatatctttgatcggtactaccgctcccgttcggatgccggcaagcagggcaccggtctgggcctttccatcaccaaggccatcttccagcagcacggcttccgctttggtgtgcagagtgccatcggcatgggcactacgttctggttcatcatgaacgacctgcccgccaatgcagccgagatggccgggcaggaataatcaggaataattttaaagccgggatgaccgtgtggtcgtcccggcttttgctttttctatagagcatcgtttctgcccgcaatgctgcggccattccaaatgatttactggctggaatctgctgtgcgataaattccgaatgtattatccggtgcgggcatttccacccgggaggcacgatcattcacagcccacatcatccagcccattgcagccagtgccgccagaatgatgatccatttgacaaaattcggcagttttttcatagaagatccttcaaatccgttttatactttattttatactttccgcttttattccggcctgcaaagcttccgtgcacatctgagcagctcttcggcctgctggctgtccagctgcttcacccatgcaccgcgcgctgctgcgccctcgccggtgctgcccgcttcggcaaagcaggcaaggtccgagtcggtgcggctctgccagggcgaaaagccctccggcgcgatgtgtgcgccaaggcggcagtccagcacggccgttttaccggtgggccgccacggcctgcccagaaacaccgtgcccgccgggcagttgtccgagacaaaatcgcaatcccagaacacaaacccgaggccatcggcacggcccgagggagccgtgacgtagcttgcaggcaggtggttattcacggtgcggatggtgcactgctcaaacagagcgtccgcgccaccaaaaataaaatcgatatctcccgcgatctcgcagtgccggtaatactgggccgtcgggcggcggggcgcaaagcggcccgggccaaggaagccatccttctcccgctccttctccggcagaggggcgcagaacagcgtatcctgattgctcagcagccgcacattctcaaagagggtgtgtgagcagtccacataagccgccacggcctgccccacctttgccccggggccggcatcgttttcaatggtcaggtcccgcacccgcagttctatcccccggaaaaacgcggtatagctgcggaaggtgtgggtgggcctgccgtccgggtgcggcagcctgccgccgtcgccccacacgatgcgggtgctttccatgcctgcgccgatcagggtgatatcctgtttttcgcacaccagcttttcgcggtaaacgcccgggccaatgcggatctctgctgcgcaggcataaggtacggccagcaccgcttcggacaccgaagcaaaatcgccgctgccatcctgcgctacggttatggtaagcatatttctgtcctcccgttttgtttctatgcttccatagtataccttctcctccgtcgaaaatcaacgaagtttgtatgaacatcaaacgcatttttccagccgcagcaccgctgccgtaatgtcgtccggcctgccggtcttctgggcgcgcacgcgggccgtttccaccagcgtctttgcaactttttccggcgcatctcctgccgcagcggaaagctccagctgctttgtcacccagcccggaccgtccaccagcagcccgtccgagaccagcaccgcataatcgcccaccgtcaaatgcaccacccggctctggccgttcactccgcccagaatgcccaccggcaggctggtgtcgcccacagcacgcacccgcccgccgtgcacaaggaagcccggtgccgcaccggccttgaacagccttgccgtgccggtgtaaagatccacgctgatgaggtccagcgtggcaccgctctcatcctcacttttcagggcaagggccacgttgaccagccttgccgccagctctgcggtaaagcccgccttgagcagccgggccgtcagctcggctgcaaggttgccatccacggctgcaggcctgccggtgcccatgccgtcgcacaggatcatctgcgctgccgccgggctgcagaactgctgcaccgcatcgccggaaatactgccccgcgccgccgcgctcgccatgccgaacacggcccgcagcacaggcttttcgctgaacagcagggtggtcattcccttgcaggaaagcacctgcggcacttccagcgtgcggcggcagatgcggcccacctccccggccagtgcagacagctcctgcgcggaaaaacgggtgcgcggcagcgtgaccgccgcgtgggtgcggcccaagtcgtccagcgtaacggcacactcctgcggcggagtgccaagctgcgcaaaaaagtccgccacccggccggatttatagggttccgggtcgcccggacggcccagctgttctcccaacacgcccagcgcttcggccacggcgctgtactgctcggtcagggcagtgcgcatggcttcggcatgaaggcgggcctccttgcggctgcgatacagcgcaaaggagcggtttgccgctgcgcacagtgctgccgggtggatgcaccgggataattgcccgggcaattgagccgtttccagcccgccgctgctttccagcagagggcgcagtgcttccatgccctccagcgtggcggcatactcctgcttccagcaggtatcccgccgtccgcagttaaaacaaagggtatcatgtgtgttatcaattacccaatggaaatcctcacgccggtgcggcagcgtttcgtagacatcgttcacggtctctgccagcgatgcaaggctctgggacacctgttccagccgggtggccgctgcactgtactgctgcggctgggcctgccctgcttgcggcttttcttccggctccggcacaagccatgctgcgggcatggccgctacggccgtgatgccgatgcagacgttcagcagatattggaacgcgctcccgggcggctgcacacagagtgcaccggtcacgcagccgcccgcgtaggcggctaccgtttccatgcgccgtccgggtgccagcactgccgctgccaccgtggcacaggcaaggccggatgccgcaaagctgagagccgggtctgccgcgcacagcgcagcgcccagcaccgcgcaggccgcaagcgcggctttggcctgccctttgctgcataaatacagttccagcgccgcgcagacgatcacgcccggcagcagctgccacagctgcacactgcccagcgccgccgctgcggccgcacccaccagaagcatcccggcacccggcttttcgggcgcgaactgccgcagacaaaagcccatggctgcggccagcagggcatctgctgcactgtaaaacaccagctctgccccgccgccgccaaaggcaaagcacagcgccacgcccaccagcgtgccgcagcccgccagtgccgccggggtcagtgttctggcacccatccaccgcgctgccactgcagcacccagtgcgcacagcatacagacactgcgcagcgagagcgcgccaaacccgtgcagcagtacacccagcgccgcacccgccgcacagggggcaaagcagtcctctgcaaaacccagcacaaagcccagaccaaaaggcatcagtgcaccgtacagaacggcccagccgcctgcaaatcccactgccacagccgccagcctgcgcgctgccgggcgcagctctgcccgccgtgccagtgctgcccgctgtctgttctgccgcccgaccgctgccagacccatccgctctgtcataaaaactccccgctttccggcggggcgttgtggttctgttccccgcgctttctgcatatactgtagcgcgggcgcgcggcgatttttggcgcggtgcagtgttctgccgcaaaccggcccaaagacgcaaaaaagccctgcagcgttcaaaaatgctgcagagctttgtggttttatggcaaaaatcagccgttcagcttttcaattgccgcttttacgcgggcaagggtggtttcgcggcccatcatgcaggcaaggtcggtgccgccgccgggggtgcgctgcttgccagaaagggcaatgcccagcgggtacagcagccagccgttcttcttgcccagctcctcagccttggccttgcaggcatcgaagacggcatcgcgattgccaaaatccagtgcttcgtcgctgagcacaggcagcagggcttccagtgcctccttggcggtctccggggtggtcttctgcttcttgttggcgtacatgctcacatcgtactcgggcatcgcatcaaagaaatccagctgctccgggatctcgcccagcacttcgcagcggggctgcaggtttgcgcacagcagcttcttgtcgatggaggtgtgcacggccttgtcgatccacggctccgcctttttctggaactcttccggggacaggcggcggatatattccgcgttgatggcccgcagcttgaggggatcgaagatggccggagacttggagatgccgtccggagaccagatcttgaccagctccggcagggagaagatctcctgctcggcatactcgcccttggggctccagcccagcaggcagatgtagttcagcacggcctcggtcaggtagccctttgccaccagatcctgatagctggcatcgccgttgcgcttggaaagcttattctgcgcatccttcatgaccggcgggcagtggatgtaggtggggatctcccagccgaacgcctgatacagcaggttgtacttgggggtagaggacagatactcgctgccgcggatcacgtgggtgatgcccatgaggtgatcgtccaccacgttggcaaagttgtaggtgggcatgccgtcggtcttgatgaggatctggtcgtccatctcgctgttgttcacctcgatgtggccgtacaccacatcgtcgaagccggtcacgccctcgcgggggatcttctggcggataacatagggttccccggcagcaagacgcttttccacttcgtccttgggcaggtcgcggcagcatccgtcatagtgggtcatctcaccgttggcgcgctgctcagcatgcagggcctccagacgctcctcggtgcagaagcaatagtatgccttgccctctgccaccagctgctcggcatactgtttgaacatgcccatgcgctcgctctgcacataggggcccacggggccgccgatgtccgggccttcgtcccacagcaggccggtctcccgcagggtgttgtagatgacatccacagcgccctccacatagcggccctgatcggtatcctcgatgcgcaggatgaaggtgccatcctcgtgctttgccatcaggtaggtgtacagggcagtgcgcaggttgccaacgtgcatataacccgtaggcgacggcgcaaaacgggtgcggactttattgctcggcatagaaaaacgctcctttattctcatgcaaaaaatttgcggatagctatgttttattgtactgattctgtgcaattttgtcaatgcgggataatatcatgcattcacagctttgctttttttgttcgcaatatgctatacttgattcaacaaatcgaaagttgacaaaggagttgagctg

SEQ ID NO: 1158 - DNA, 7465 bp, Unknown
  gut microbiota DNA sequence
aggacttgaacctccaccgagttgccccgattagaacctgaatctaacgcgtctgccaattccgccatatccgcatattctgttttgttcgcgagctgtgttgctcgggacgatagttattataccagatatggcagaattgtcaagcatttttccaaaaaaactttttccccactacaaaacgtcatactttcgcgaaaaaagccctctgcaggccgattttccggcggtgcagagggtcggagtttctttgtttttttcttcagcaggcagccgttccggaggccagaagatcagactttgccccacaccagccacaggtacgcatagcctgccagcacggcagccagcgtaaagggcacgccgatgcgcaggaagtcgcgggtggtgacggtctcgccgtttttgcgcagaatgccaatggccgcgatattggccgaagcaccgatggggatcaggttgccgcccaacgttgcaccggtgagcaggccgaagtaaaacacatagggttccacgcccacgccatcgttcatcagggcggcgatgctctgcaccaccggcagcatggcggccacgtaagggatgttatcgatgaaggccgaaagcaccaccgacaccaccaccagcagggtgaacagccggaaagggctttcccctgccacggcatggaacagccgggctgctgcgtcgataacacccgccgcgtggatgcccgcgatcacgatgaacaagccaaacaacagcagcagggtatcgcagtccagctcgcccagcacatgcgccagcggctttgccgaccctgcccgcaggcaggcgcgcgccacgccaaacaggcacagccccatgcacacaagaccgctgcgcagctcgtacaccgtgtgcagcggcccggctgcaggctccggcaggaaggatgccgcaatgagcaaacccaccgtgagcagcatcagggcagtgggcacatcgtcctccacctcagtctccaccttggcggcgataggctgggtctcgcggcggaacagccacagcagcactgccagcgaagcaagtgcgcccagctctacgccccagaagatgcccggacggccccgcatccagaagaaatcgaagaaattcatgtcggcaaagctgcccagcaggatgctggtggtgtcgcccaccagcgtggccgcgccctgcaggttggaggacaccgcaatggcaatgagcaccggcaccggcgagatcttcagcttgcgggcaatggcaaggcccaccggtgccaccatgagcaccgtggccacattgtccacaaaagcactgatgacaccggcgaacagcgccagcatacacaccgcccacttgacatccggcacacagacgataagcatttccgccaggcgggcaggcattttgctctcgatgaacagtgccaccgtacccatggtgcccgccatcatgagcagcacattataatccacggcctgcagcgcggcgcggagtgaaaactcgtagacccctgcctcgcccagcacaataaagagcaccgcactgcacagtgccacccacgggcggtactgctgcagccacagcatcaatacataggtagcagcaaacaggatcagtgcaagtatcattcgttgatctccccgctgcgggcatcctcgtcgatcatgcggtagcccacgcccagctcattgaggatataggcattgctgcccggacggctgcccagctttttgcggatattggccatgttcacctgcagctttttggtgctgccgatgtcggtatcgccccagatggccttgacaatggccgcataggtcatcacgcggcccgcgtgctgggaaaggaacgccacgatgttgtattcggtctgggtcagcttgatctcctgctcgtccacgaacaccttacggcggtcatagttgatgcgcattccctgtgcgcggaactcacccgccggggcattgccgccgtgcatggcactgtagcggttcagccgcagggcagcgcgcacgcgggccagcagttcgccggtgctgaagggcttggtgatgtaatcattggcacccagatccagcgcttcgatcttatccatctcgtcggtgcgggccgagagcaccacgatgggggtcatatacttctgccgcacggtgcggatgaattccagcccatcccggtccggcaggcccagatccagaatgaccagatccgggttgtgggaggcgaacagagtcaggcccatggtacaggtatgagccaccagagcctgataatcgttggtggtgagcagcgtttcgataaagctgcagatatttgcctcatcctctacgatcaggaccttgaatttgttattgctcatcttctgcatcctccatttcaatttcttcggtctccagccagaagcggatggtcgttccctcacccagacggctctcggccttgatctcgccgccgtgcgccttgatgatggccgcacataccgaaaggccgatgcccatgccgtgcttgcggctgtctgccggtacatccgggtcggtgccgccggtgcccgagaacagcgttttcagccgttctctggggatgccgcagccatcgtccgtcacctcgaacaccgcacgattgcccaccgtgaacaccttcaaggtcagttttgtcatgccctcggcgtgcagagcggcattttccagcaggttcatcagcacctgctggatcagcatggaatccatggggatcacgataaaggcatccggcgtttccagctccaccgggatctccgggtagcgcttgcggaacttgaccagcaccgtatccagcagttcgtccagcacagtgggggtcttttgcaccgtcaccttctcgctgtcgatgcgggtgacggaaagcagattctccaccatgcgggtcagccactgggcatcactgcaggcttcgccaagcagtttaatggtcttttccttatccagcgagtcataattttcgatcacagtggagcaggcaccgtagatggaggtgagcggggtgcgcagatcgtgagaaaccgcgcgcagaaggtttgcacgcatcttctccttctcgctttccatacgcagctgttcctgctttttgatgcgggtggtgagggtgctggtcatgatggacaccaccagcatcacaaggccggagaacaggttttccgacagggtaaagttgaaggcgaaatacggtgagaggaaggcaaagttcacagccagtacgctgatgagcgaagccgccacgccccacgcataaccttctgtatacatagaggtgacaaataccgccagcataaagatcagcatggctacgccctcaatgcggcccataacggcctgtgtaagcatcaccatggcataggcggcgaacagagccagcagcattacggtggcatcccgcacaagcgtctgttttttcatgcacatttcccttcccaaataatatattccgtttcccgcattataccatagaaaaactaaagatacagtaaaaatcctttgccgtaaagagggacgcgatttgacactccctctcccccgtagtagaatagccctatcaacactttatctcactggatcaggagtaacgatatgctgtatttcgagaacgactactgtgagggtgcacaccctgccatcctgcaaaagctggccgagaccaactttgaaaaggtgcccggctatggcaccgacccctactgcgccagcgccaaagcaaagatctgcgctgcctgcggctgcccggatgcagacgtgaccttcatctccggcggcacccagaccaacgccatcgtcattgcgtccatgctgcagcgctggcagggcgtgatggctgctgccaccggccatgtggctgcacacgaagccggtgccattgagtataccggccacaaggtcattgccctgcccgcccacgagggcaaggtgagcgccgccgatgtgcgcgactggtgcgccaccttctatgccgatgccaaccacgaccacatggtgttccccggcatggtatatatctctcacccgtccgagtacggcaccctgtacaccaaggctgagctggaagagctgcacgctgtgtgtcaggagtaccacatgcccctgttcatggacggcgcacgcctgggctacggtctgatggccaagggcaccgatgttaccctgcaggatatcgcccgcctgaccgatgtgttctacatcggcggcaccaaggtgggcgcgctgtgcggcgaggccgtggtgttcccccacggcgcaccggcccactttatgactatggtcaagcagcagggcgcgctgcttgccaagggccgtctgatgggcctgcagttcgatgtgctgttcaccgatgatctgtacacccgcatcagccggaacgccatcgagaccgccgaccgtctgaaggagggccttgccgccaagggctaccgcttctatatggagtcgcccaccaatcaggtgttccccattctggaaaacagccagctggaagcgctggagccactggcaaagttcggcttctgggagaagtacgacgacacccacaccgtgatgcgcattgccaccagctgggccacccgcatggaggagatcgagcagctgatcgacctgatgtgatgctgccaaagatttttggcggttttatgcgggataccaattgcaatttctttcacaatgtggtatcttttgggtagaccaatgggttggagccggtgggccttgcaggacagcgtttcggccggctggctctatgaaataatcggaaagaaggtattttaacatgggcttttttgataagctgttcggcggcaagaccgagcaggaagagactgtcaaattcttcggtcagagcaagaccgttctgacccccatccgcggcaaggtgctggcacaggccgacatccccgacgagacctttgcacagggcatccttggccccggctgcggcatcgagcccaccggcaagaccgtgtatgctccgtttgacggcaccgtggaacaggtggcttccaccctgcacgccgtgggcctgaccagcgaggacggcatcgagatcctgatccatgttggcatggacactgtggagatgcagggcaagggcttcaaggcactggtcaaggtgggcgataaggtcaaggccggcaccccgctgctgaaggtggatctggacgccatccgcgccgcaggccatcccaccgctaccgccatcatcgtgaccaacggcgatgacatgggcgagctgaagatgctggccgagggcgatgtgctggccggcaccccgctgttcaagttctgatcgtaatcgtaaaaggcgtgagcttccattcggaggcccacgccttttttgttattccttttcttgtttatatttcagcaccttctgggagaaatgtccatcgaagaactggatgaaggggccaaaggcgatgatgataacacccaccaccatgccgatgatgcgccgtgccgagggagcctgccgggtcttgttcatgacctccttctctttctccttctgtttttcaccattctattgtttttgtgttgataatacaggccttgagccgggcttcaatggccgctttgtccagtccttcgccaatgacgatgagcacatcctgcccctgcgggatgggttccagcgttctgccggcagcggtggcgttcagctccagccagccggtggtgccctgcgggtccggtgcaaatcccttcacccgcagcacatggccgcaggcggcatccgcaaacaggtggtcggcagcggcctgcagctgctgcagcgtcaggtgctgctccagaaagcacagagagctgaaggcttcgtgctcgtcaaaatgcagcttttcgcagctggcctgcctgcagccgcaggccgcaatggcggcaaggtcggcatcggtaagccgtgcccagtccttggtgatgatctcttccggcgcaaagcggcgggagcacttgcagccctccagcgcacgggtcaggtgggccacggcggcagcggtctgctgctgcccggccagctgggtacggctgaccagcacccggcccgcgttggccgtctcggatgccagcacgtactcagcctgcggcgaaagcgtttccggcagcatggcatccactatggcgatcacattgccgatgtgataccagcggtccagcgggtcgtcccgcagcacatcaaaaaactcgtccacatcaaagatgccgctgggttccaccaccacccggtcgaacccgcgcatggccatggcaatgagcttggtgcgcatccggcgctggtgggtgtcgcagtcgcatccgccgctgatggtctcaaggtcgcagttcgggccaagaaggtcctgcaccagcattgcatccacattcactgcgccgaagtcgttttccagaatgcagacattgtggccctgtgccaccagataccggacataccgacgcagaaaggtggttttgcctgcgcccagaaagccggtgataaggtctacctgtaccataataaaaaagcacctcctgtgctgttgtttgcccggttccagtataccgcagcaaactgcaatacgccagtggcagatgcaaaaagccccgcatttctgcgggactttttatgttcgtattcagccgttgtcggatgcagagctgtactcggcaatgaccttgcgggcggcaggtgccattttggccggtacggcggcaggttttgcaaggaagtagccctgcagcgcatccgcgcccagctcgatgaccttgcgcagctcggcggcggtctccacgccctcggcaatgatctgcatgctgcgcgggtgggcgaaggtctccagcgatttgaagaaggtcagccgctcgatttcatacagtgcgccctgctcctgcgccagcttcatgatggtagcgggtgagcgcagcgcttccatatcggagcgcatcagggcttcgtaggccatcaccttgcgggcgctgctgccgcagcccacgcagccaagggccagcgccgcggcgcacagcccggacacgaccgctttgagatattttttcatcgattttctcccctgagggcgctcacgcagcaggacgttccggctaccatatcacccgattatacctagtttatcataccatctttttccgggtgcgtaaccaaaatccggcaaaaaccttcacgatcacaagaaagcggaagaactttccacccatcggaacaaaaagcacagccgtcaacagttcatccgcctcggccagctgggcctcggcagcagcatcgtccagcatatccctgcccgcgcagcgctgcaggatgacatggcacaccgggcggcgtgtggcctccagcaccgagtgacggaagccgtagcgggagacgttctttttgccgtacagcaggataaagcccatgctgttgcggctgtccgcccgcaggaagccatgggtgatgtagggcatcttctggccttcgggcatcatgtccagat

SEQ ID NO: 1159 - DNA, 8073 bp, Unknown
  gut microbiota DNA sequence
ccgtcgttgccaaagatgggccagataccgccgaaggggaaggacggacggctgttgatgtcggctgcctgacctgcacgggggcctgcctccatggtagcgcctgcccacatcatcatgcggatgccggagccatcacggcccatggaagaaacgttgttcacatcggtgcgggccttgtgggcagctaccatttcaacggcgagtgggtgtaaatttttgatacagtaagaggggctgctgcactttcggctaaaacgatgtgcagcagccccttcttcgtatcggatacagacaacaaaaaagcgttctgagagatctcagaacgcttggtggttgcgggggccggatttgaaccaacgaccttcgggttatgagcccgacgagctaccagactgctccaccccgcgatatttactttgtgctctcagcggttctcgctgactgctcaagtataataccacaagggcgggcggatgtcaagtacttttttgatttattttttcttctttttccaaaccacgaaccctgcgcaggcggcggctgcgatcaccaccaccggccatgcaccggcaagggcaacgatgacctgctgcaggccacccacaaagttctgccagccagcggaaagggcgctgacaaagcggctgccgaagccctcgctgggcggcgagtaggtgctcacctcgctcaggctcacgtacacggtgcactcttccacctgatcgttgtaccagtccatctggctctgccagctctcgatctggctctgcacatccgtcaggctggactcgatctcaagcaggtcggagaggttgtcggcctgctgctgcagctgctgcaggcgggttcgctggttcttgagattctcaagccgggtctccacgtccatgtactgggcggtcacgtcgtcggcctgctggtttttgtaggtcacgttgcctgcttcggccacggcggcaagaaagttctcgtagttctgctgcggcacccggtaggtcaggctgacactgcggctgtcaccggcatccgagtattcactgctggattccagatagccgcccgcttcagcaagggcagcatccagcgcagcgcgggctgcgtcgtagtccttgctttccaggctcaggttcgcagtgtagatgatctttgcgtggtcggtgctgtgggccgctgctgccgcgtcgtcctccgaataaacagcggtgccgttgtctgcgccgctttccagcgccatggtattcagactgtaatcggctgccatggggctatctacagcggcgcggtccgcgccgcctgccgccatcaccgccgcagtactgtccgcagaataatagaccgccgggctgctgctctttgcgccaaggccgatttgtccggtggcaaaagcaccatagcctaccacacacacagcaaggcaggccgccagtgcgcccacccgctttgcggggaagcggatcagtttcttcttcggctgcaccggggcggactgagccggtaccggtgcggcggttttcatcatgggctgggccttttcttcttcggtcagctggtcggtcatggccagcagctttgccttcagatcgtccggggcgtagaggtcgtccgtctccatcttgtactcataccacctcatcttcgatctcctccttcagcatcgtatgtaactgcgcccgggcacgccgcagccagctcagcaccgtgttggacggtgcgcccatcatccggccgatctccgccgccgtgtacccctcgtagtaatgcagatagatggcattgcggtagttttccggcagggcgcgcactgcgtccagcacactgccgtcctcaaacgcatcgggcgcgggcaggttctcgtccagctcggtgtccttctgatgggctgcgcgggtcaggtcccggcagcggttgatggccacccgcagcagccacgccttgaggtgctcctcactctcaaacgtaccattataatgcaggagcttctcgtagacatcctgcaccacgtcctcggcatcggctgtgcatcggctgttgtgtatggcagcgcggtaaacagcatcgctgtatttctgcactgccagcgtaaatacttcgtttctggtcagctgtcccatagtttcaagctctcctttaccgcctgtacagggctggtggaattcgtgttccacgggggacattcaccctatacacggctgaacgcccccgaagattgcattgctggaaaaatttatgaaaatcaccttttatatactctctgcagcagggccacccgttctgcaaggaaggtctcggccttcggatggtgcagccagcgcttgttcgccgctgtgccagccagctttctgcccagcgcttccgggtcggtatcggcctgcatcacatcctgcatggtcagctgcagcgtcaacgccgcaggagtgtccggcagcggcggcagcgggtcctcccacacaaagggcggcagcagctgcaccgccaccgtggcgcgggtgcactcctcggtgagtagcagggctgcaggcgtgccgtccggctggacgtgcagggtactgtacagcagctgcagactgccctcggccagcaggcggatatccccctcccgcccggtaggcgaaaggctcaaatattcccgcgcctcgtccagatagatgtgccgggccggtgcctgcacgcgggcatacagcgcaggcagcgcaaagcggcccgctttgtccagtgcgtgctgcaaaagcaggtagaactcggtcagtgggtaggccgggtccggctgcggcatcccgaagtccggccgcgaaacatgtcctccacccatggggaacctccttgataaataacgctgatgcggtattctaaacatagaagggggcgctgactgcaagggtcagctttccatcccgtttgtcaaaaagattgaccgcacagtttggaagcagggcggtcaatctttttttgttatcatcttaccatattctacgacgcattacaacacgccctattgtaaaccctgctgcaacttcattgttgaccgtcttccctctgccgcgttatactcgggcacagatgccttgtaaatttttaacagaggggaattctattctatgaaaaacaaaaaactgaccacctatcagatggctgtcactgcgctgatggccgccgcgctgtgcgtgcttggcccgctgagcgtgcccatcggagccattcccatttcgctgtcaaactttgtcatctgcctgaccgcatggctgctggggcccaagttcggcaccctgagcgtggcggtgtacctgctcatcggccttgtgggcgtgccggtgttctccggctacggcgcgggcattgccaagttggcaggccccaccggcggctatctggtgggctacctgctgctggccttcatcggcggtctgttcatcgaaaagagcaagggccagccggtgatctccggcatcggccttgtgctgggcgatgccgcctgctacgtgctgggcaccgcatggttcgtgttccagatgcagtgcgagctgggctatgcgctttcggtgtgcgtgtacccgttcattgcgctggatctcgccaagatcgtggtgagctgcatcgtgggtgcactgctgcgcaagcgtctggtacaggctggcgtgctgaagctgaaggaagcctaacaggaaaagcaaaagggagactgcaaacgcagcctcccttttttatttgtgatccgttattttacatagccaagggtcgcagccatcacggccttgatggtgtgcatccggttctcggcttcgtcgaacacgatgctctgggggccttcaaacacttcatcggtcacttccatggcatcgcggccaaagcgctcgcccatctccttgcccacggtggtcttgtggtcgtggaaggcgggcaggcagtgcatgaacacagcgtgcgggcctgcaatgtccatcagctgctggttgatctggtaggcggcaaggtcgttgatgcgctcagcccacacctccaccggctcacccatggacacccacacatcggtgtacagcacgtcggcacccttggcggccttggcggggtcctcctcaaaggtgagggtggcaccggtctcggcagcgatcttctggcactcggccacgagggcagcgtccggctggtacttcttgggtgcacaggcggtgaagttcaggcccatcttggcgcagcccaccatcaggctgttgcccatgttgtagcgggcatcgccgaagtaaacgaagttgatgcccttcaggtggccaaagtgctcccggatggtgaggaagtcggccaggatctgggtgggatggaactcgttggtcaggccgttccacaccggcacaccggcgtagtgggcaaggtcttccacgatctgctggccatagccgcggtactcgatgccgtcgaacatgcggcccagcacacgggcagtgtcggcgatggactccttcttgccgatctggctgccggacgggtcaaggtaggtcacttccatgcccagatcgtgggcagcgacctcgaagctgcagcgggtgcgggtggaggtcttttcaaagatcagggcgatgttcttgcctgccagctggtcattgtggcggatgccggccttcttttttgccttcaggtctgcggcaaggtccagcagttcttcgatctcggcaggggtgtagtccaatagcttcaaaaagctgcggttcttcagactcattgtatatttccctctctatgcaagcattgttgaatatttattcgagatatagttctattataatgatatcctgtaaaaattgcaataccctgtcggatatgctatactggctgtgctgcccttctccattctggcaacagaagggggtggatatcatggacaccattctaaccaattttctggtggctgtcgcagcacaggtagctgcacacttcctgtgcaagtggcttgagagtcaccgcaagggcaagtaagcacaaaaagagccctctcggagctgcaactctgagagggctcttttttgtgcgtggatacaatggaatgttctaaccaacttcctacccttagtatatgcaatcccacacaaaagtcaagatgctatgaaaaaagttcacagctccagctctgccttccgtccggtggattgataggcagtcagcttcacgccggcctttttgaacatgaaccgcgccgccacgctggaatcgctgtcgtggtacttgtcgccgtagtacaccacctcggcaatgcccgactggatgatggccttggtgcactcgttgcaggggaacagcgtcacgtacacccgcgcacctttcaggttattgtgggcgctgttgaggatggcgttcagctcggcgtggcacacgtacatatacttggtgtccagcggtgcgccctcccgctcccagggcatctcgtcgtcgctgcagccaatgggcataccgttgtagcccaaggacagaattttgttttccgagctgacgatgcacgcgcccacctgactgttggggtccttggagcgcatggccgtgagcagcgcaatgcccatgaaatattcatcccagttgatgtaatccatacgtttcatttcggtatgctccttgtgcctttattctgccttttattatagcgtatcgctgtggattttacaataaactttggcactgccgtgcaacttgcacaaaaccttgccccgaagtttggcgcttgattcgtcagaattttcaaacgaaatatttaaaaatcattttgagtgtggtattatctttgtaaaatatgccacaaaagcggagagaatgctccgtgcggcggaaatgagggaaaaaccgatatgaaatacgcaagcaacaacatccgcaatatcctgattgccggtcatgccggcagcggcaagaccacgctcaccgaggcgctggtctatttttcgggcgctgccgagcgtatgggccgggtcgaggacggcactactgtttcggactttgaccctgaggaagcaaagcgcaaggccagcctgtctgcatcggtcgtccccgtggagtacgagggcatcaagtacaacctgatcgatgcgccgggcctgttcgacttcgaggccggtgagtacgagggcatccgcgcagccgagagcgtgctggtggtggtgtccggccgcagcggcgtgactgtgggtgcggaaaaggcgttccagctggcccgcaagaatggcaaggctaccatggtgttcgtctccaagtgcgatctggagaatgccaactacttcaagatccttgaggatatgaagatcaagttcggctccaccgtctgcccctgcgtggtgcccgccaagctggacgacggcacccccgtgtacatcaacctgttcagccagaaggccttcaagtacgagggcggcaagcagatccaggtggacctgccggacatcggccaccgttttcagggcctgatcgaggccatgagcgaagccattgccgagaccgacgatgagctgatggaaaagttcttcggcggcgaagccttcaccaccgaggagatcgtggaaggcatgcgcaagggcgtcaaggacggcctgatcacccccgtgttctgcggcagcgccgtgaaccagcaggcactggatatgctgctgttcaacatgcacaagctgctgcccagcccggagcacgaagccagcacgctggccgaggatgccgccggcgagccggtggaactgcactgcaccgtggacgagcctaccgccgcctacgtgttcaagaccgtggccgacccgttcgtgggcaagctgagctacctgcgcgtggtcagcggcaaggtgactgcaggcgaacccctcaccaacgcccgcaccggcgatgtggagaagatctccaagcccctcaccgtcattggcaaaaagcaggtggactccgacggcatcattgccggtgacatcggcgcagtggcaaagctggtgagcgccaagaccggcgacaccctgtgcgacgctgagcgcgtggtcaaactgcccgcccccgtgttccccaagcccagcctgttcatggccgtcactgtggccaagaagggcgacgagggcaagatcagcagcgcgctggcccgcctgatggaagaagaccccaccctgagctacgagaacaacgccgagacccatcagcaggtgatcggcggtctgggcgagcagcatctggacgtggtgaaggccaagctcaagaacaagttcggcgtggagatcgggctggaagcaccccgcatcgcctaccgcgagtccatccgcaaggcctgccagaagcagggccgtcataagaagcagaccggcggtcacggccagttcggtgacgttatcatcaacttcgagccctgcgacagcgagcaggtcgtgtttgaggagaaggtgttcggcggcagcgtgcccaagaacttcttcccggctgttgaaaagggcgtgcgccttgccgccgaaaagggcgtgcttgcaggctaccccgtggtgggcctgaaagccaccctgctggacggcagctaccacccggtggacagctccgagatggcctttattatggccgcaaagctggcttacaaggccgctatgccggaggccggcccggtcattctggaacccatccacaccctgaaggctcatgtgccaaacgacaacaccggcgatatcatgggcgatgtgaccaagcgccgcggccgcgtgctgggcatggagccggacgaggacggcctgcagaccatcattgctgaagtgccgctggcagagcttgcaaactttaccaccttcatccggcagatcacgcagggccgcggctggttcaccaccgagtttgcccgctacgaggttctgcccgagatgctggtgcctgccgttgtggagcaggccaagaagctgggcaatctggacgagagcgcagacgattaaacggtaaacgtcaactttcccagtctgctgcgcagccagccccctcaccgagggagctggcaggaccgtcaggttctggctgaaggagttctcaccgaaatacgacatcaccccgacccccgttgacactttccctctgtcagcgggggtttttgcgggc

SEQ ID NO: 1160 - DNA, 699 bp, Unknown
  gut microbiota DNA sequence
tatgggaactctgctacggggaacgccctgttgtacatatcgcttgtctgtggtcttttgcagggtgcgtccacagggcgcaccttgtttttttactatgcttcatcgttttccacacgaagcatccggtatccgacaccaacatgggtctggatcagatgcggcgcatccgggtatcgttccaattttttgcgcagggatgccatataaacacgcaaggaagcaatgtcattttcctgcgtacttccccatatttgctgtgtgatggatgtatgcgtcaacactttgcccacattatgcgccagcacacacagcagtttgtactcgatgggggtcagatgcacttcattctcacccagccagacgcacccggccgagaagtcgatcttcaaaggaccattgacaaaaaccggactgtttatgccgtcagaagccagcagattcaatcggcgctgcgttacacgcaatctcgccagcagctcgtccacggaaaacggctttgtcagataatcgtctgcgccgttgtccagtgcctcgatcttatcagaatcctcgcttcgggcactcaggacgatgatgggcaggttcgaccatgtgcggacgctgcggatgacctcgatgccgtctatatcgggcagcccaagatccagcagcatgatgtccggattgtggctggtagtcatcatgatcgccgtttcc

SEQ ID NO: 1161 - DNA, 4741 bp, Unknown
  gut microbiota DNA sequence
aagaagattttctatcacaaaatcttccaaaagataccattccctttttacagtttcttcatagcttcttaacgaattcaattgtgaaagctgttatacttttgccatgggaagcggggccgcaaccgcttacccaagtaacatgattcctcctcacaccaaggcaatatccaaacaaaacaccctttttcgtgcgccgcaacacggaagagggtgttttgttttgcaaaattccggtaaatcggtggtttagggttgaccccgtttttttgcggcgctataataaaaatgaatatgaaaacttggaggtgaacgcaggaaaatggacccggatcatagtcgaagtagaaccaccggcgcggtggatcagaaaacaaaaacaactgcgttttccccaaccgttcgcctccttcgctgagtcctgcggaaaagcaccgcttcaacggtgcatctttccgcaaaacagagcagaggaaggcgcagctttgtgtgcgcagaatgcggcgtttgcggcattccggcaggcaaggcggcgcgttttttgtttcccgatctgctgcgtcctccggatacaggagctgctcctgttccgtaaaaactgaggaggtacgcccaatggatatggaagaaaagaagctgacggctgatgctgcggaacaggcgctgccggtgcaggagctgcctgctgatatccccgccgaggtccgccagaagctggctgaagatctgaacgaggaagctactgaagacctcaagcaggacatgcgcgaggccgaaaaagaggaagccaacgacgaagaggtcaaggccaaccctgagatgctcaccaagagccgcctgctcaagctgctcatcaagaagcagtacgtcaagctgcgcgaagtcaccgaggaagagcagcccgccgaccttgccgagctgctggaagagctggacgaaaacaaccgccttgtggtgttccgcctgctcaaaaaggaagtggccaccgaggcctttgcctatatgtccgacgaggcccgcgacgatctggtgaacgccttctcagatgtggagctggtgggcgccattgaagagatgagtctggacgatgccgccgacctgctggaggatatgccggcaggcgtggtgaagcgggtgctggaaaaatcctccaagcagacccgtgagagcctgaacaagctgctgaactaccccgaaagctctgccggcagcctgatgacccccgaatatgtccgtctgcgcgaggatatgaccgtggcgcaggcctttgaagccatccgcaagcagggcgaaaacgcagagaccgtgtacacctgctacgtggtggagcgcaaccgcctgaagggtgttgtttctgcccgcagcctgctgctgtcagagccgcatactcccatcaccgagatcatggatgataacgtggtcactgtgaaagtgaccgacgatcaagagtacgtggcccgtgagatgcagcgctacgactttaccgccatgcctgttctggacaacgagggcatgttcgtgggtatcatcaccatcgacgatgcgatcgacgttctgaccgacgagagcaccgaggatatgcagaagatggctgctattctgccggacgacgatgccaccacctacttcggcaccagcgtctggacccacgcaaagcagcgcattccgtggctgctgatcctgatgctttccgccacctttaccggcatggtcaccacccactatgaagaggcctttgtcagcctgcccctgctggtctccttcatgcccatgctgatggataccgccggcaactgcggcaaccagatcagcaccctgatggtgcgtggtctggctctgggcgaggtggagcccagcgactttttgcaggtgctgggcaaggagctgcgggtgtctgccatcgtgggcgcggtgctgggcatcgtgaacggcctgcgcatctacctgatgtacaccttcctgttccccggccagtacgccaacgtgatgggctatgccatcgtggtcagcgtttcgctgttcttcagcgtcattctggcaaagctggtgggcggtatgctgccgctggcagccaagaagctgggtgccgacccggccatcatggctacccccttcatcaccaccatcgtggatgcctgcagcctgatcctgtatttccagatcgcacagctggtgttccacaatatgatgtaaataataaagcaatgccggacggtcttgaagtgactgcccggcatttttataggacgaaccctctcagtcatcgctgcgcgatgccaactccctcagtcaaaacctgacggttttgccagctccctcaaagagggagcctctggcgtgccgcaagcgtcctaaccctctcagcctgctcccgttggtcgcagacagctcccccgaagggggagcttatagcactgccggaagcttttagcattcatccgatacgtttcggttatcgcaaaaaagctcccccttcgggggagctgtcgccgcaggcgactgagagggttcagccgggataaaaacagtgtggaaaactgcatgtttccccgccttttccacacgaaaaaacggcagcggcccggtgttgaaaacttgtgaccggttcattccagattggagaaaaataaatcaccgcccagaaacggtttgtagaatgcaaagaaaatccttcgactttcttttttataaaaggcagaatgcccgcatttttgcccaaaacttaccagaaagctgcggcctgaattacggtgtgtatagggctgatgcccttttgttgtggaaaacccggtggaaaaagtggaaaacctcatggaaaacttgcccttttcttcacaaaaacggtggaaaacccggtggaaaaagtgaaaagttcattccagacaggaaactccatacactttccggttgtgcttttgtgccgcaagatccgcttgacagctgtatttttgggcggaagatgcggcagttttccacactgtggcattgccttgaatgccccggccaatcatggtacaataacagcagaaaaatgcggcaaaactcaccgatatcggaatacaatgcgttggaggcaccctatatgaacaattggctcaaccagctggagcgcaaatacggccgcttcggcatcccgaatctgaccaacattctggtgggcgggcagatccttgtgctggccatcgagctgtttgtcaaccagaccgtcagtgtctggctggcactcagccgctattttctgctgcgcggccagatctggcgcatcatcacctttgcgttcatcccctcttacggcggcagcatcctcagcgcggtgctgggcatctatttcacatggttcatcggcacagcgctggaacaggagtggggcgatttccgctatacggtgtatctgctctccgggatgctgggcactgtgctggcctgcctgctcaccggcgtgaccggcagcacctactgcctgtccctttcgctgctgctggcctttgccatgctgtacccggaagtacaggtgctgctgttctttgtcatccccgtccgggtgaaatactttggcttttttgcggcagcactgtgggtgctcagctttctgggcgcgccgctgccgcaaaagctgagcctgctgctcagcatggcgaacgtctggctgttctttggcccgatggcctatcgttccgtccgcgcgtgggtacgccgtgagcagtggaagcggagaaacagaaggtaaggagaaacaacatgatgctggaccgcatggagggcaatgcagaactgaaaagcagcgtgcagctgatgctggcagcccgccgcctgacccacagcgtgctgctggtgggagaagagggccttggagccggttttgcggcccgctgcattgcggcagattatctttaccctgcaggcggagcgcccgctgaggcccttctgcggggcgaatgctgccgtgctgtgggtaagcctggcgaccgcgacagcggccatgtggagaccggcatcgtgcgtgaagcgatcagcgttgccggtatgggcgcaggcggaaaatatctggtcagtcaggtcaaggctatgcgcagcgagatcttcaacaccagcctttcggccgagggccgtgccgtgctgctctaccatgtggaaaagatgaacgaggaatccgccaatgccctgctgaaggtgatggaagagccgccggagggggtgctgttcctgcttacggcggattcgctggcaggcgtactgcccaccatccgcagccgctgcgtcagctttgcagtggctcctgtctcgccggagcagtgcgcccgctactgcgccgcacagggggtggacaaaaagacggccgcgctgtacagcgaattgttcgacggtcacattggcacggtgcttgccgccgcacaggacgaagcccgcaccgcgcaggtggaaaaggccctgcagctggcaaaggccgctgctgaccgtgacagctatgccgcagcctgcctgctggccgcctacgaaaaggacaaggccggcgccgccgccctgctgacagacttccgcgcggtggccgctgcgggcctgcggcaaagcccccacgcaccggtgcagggcattgccgcccagcgtgccctgcgtctggccgaagccgccatccagcgccttggcgcgcaggtgaaccctaaaatcgtgctcagcgtgtttgcggcaaagttcagagcgttgtaattttaaaaaagatagaaaaattcccggcagatcaaat

SEQ ID NO: 1162 - DNA, 907 bp, Unknown
  gut microbiota DNA sequence
agaatcctctcagggaggacggggagcgcaagacgcggtgacggtatgcttagtggaaacattggcatgagtatgcggtgcggcatcggtagaaaaatagtcgtacagagcatcccgcagagaatggaagcaacgagcatggtagtcgtgcagacggagaaccagaatcttcaaaacatcaacggcggaacagtaaaagtcctccgtgacttctgcgaaactctcatagcaggtcatttcagtatccatactgcacctctcagtcaatgcagatgcagaccatcttctcgcggccagccataagagggacgctgttctcggccagatagcactggatcagatacaggtcactggtggtaagggcaacaaagctgccattggtatcgtagcgaacaaagacaacggcaccggacagataccgcttaccagccagtgtgacgacctgacgagggtcgtaacagagagccagcggcacatcttcgctgatgctgtagcaggaatctgcttcatcgaagcaaggcaggtaactgcgaacgttcgccagcggagtgatagtcagttcgatctccggggcaatcacggcggcgtaaacttcatcatcaccgaactgccgctccagcacatcgctcatcttattgaagaagtcggtcacagcattgtccatgtggttgattttctggttcatagcttcgatggtctttgcggtcttgagatcaatggtagtattcatagtgggtttcctccaaatttttgcaaaaaagaaagacccggtcgggtcttacgttcaaaaggtgtatcagcgttcgttctgccgctgctgtttgcgctgccactgttccagcagcttgatgatggtgtcctccatctgtttcggggtgtagctgcgaggaaagtatttccgcagggt

SEQ ID NO: 1163 - DNA, 15099 bp, Unknown
  gut microbiota DNA sequence
gccaaggcctcccactttgggggaggtggcagcgcgtgagcgctgacggagagggcgaggacgctagataaattttagaatcataagggggaacctacccaatggtctatcgtatttatgtggaaaaaaagcccggctttgatgtggaagccaccggcctgaaaaatgagctgaccagcctgctgggcatccagtcgcttaccggtctgcgtctgctgaaccgctacgatgtggaaggcatcgacgaagaactgttcaaccagtgtgcaaacaccgtgttcagtgagccgccggtggataacacctatgccgagctgcccgccagcgacggcgtgtcctttgcagtggagtatctgcccggccagttcgaccagcgcgcagactctgctgccgagtgcatccagctcatcagtcagggcgagcgcccgctggtgcgctctgcccgcgtctatctgctggaaggcaccctgactgacgagcaggtggccgagatcaagaaatacgtcatcaacccggtggaggcccgcgaggcttcgctggacaccaagcagaccctgaaaatggagtaccccgtgcccgccccggtcaaggtgctggagggcttcaaccagctggacgaagagcagctgaaaaagttcattgcggacaacggtcttgccatggatcttggcgatatcgagttctgccagaagtatttccgctcggagcaccgcgaccccaccatcaccgagatcaagatgatcgacacctactggtccgatcactgccgccacaccaccttcggcaccattctggacgatgtgcagatcgacgatgccgtggtgcagaaggcctttgaccgctacatggccatgcgcgccgatctgggccgcgagaacaagccccgctgcatgatggatcttgccaccatcggcgccaaggagctgaagaagcagggcatcctgaaaaatctggacgagtccgacgagatcaacgcctgcaccgtcaagatcaagtgcgatgtgaacggtaaggatgaggactggctgttcctgttcaagaacgagacccacaatcaccccaccgagatcgagcccttcggcggtgcagctacctgcatcggcggtgccatccgtgacccgctgtccggccgcagctacgtctatcaggccatgcgcgttaccggcgcaggcgacccgctcaagccggtcagtgagacgttgcccggcaagctgccccagcgcaagctggtgaccactgctgccgcaggctattcctcctacggcaaccagatcggccttgctaccggtcaggtggacgagatctatcatcccggctatgtggcaaagcgcatggagatcggtgccgttgtaggcgctacccccgcttcccacgtccgccgcgagtgccccgcccccggcgatgtcatcgttctgctgggcggccgcaccggccgtgatggtgtgggcggtgctaccggctcctccaaggcccacaagctggacagccttgagcactgcggtgccgaggtgcagaagggcaatgctcccatcgagcgcaagctgcagcgcctgttccgccgcgaggatgcctgcaggatgatcaagcgctgcaacgactttggtgcaggcggtgtgtccgttgccatcggtgagctggccgacggcctgtacatcgacctgaacaaggtcaccaagaagtacgagggtctggacggcaccgagctggccatcagcgagagccaggagcgcatggctgtggcgctggcccccgaggacgtggacaagttcattgctctcgccaacgaagagaaccttgaggccactccggtggcaaaggtgacggctgagccccgcctgaacatggtgtggaacggcatgtccatcgtgaacatcagccgcgagttcctgaactccaacggtgccgagaagcaccagaaggtccatgtggaaaaggccacggtctggcagccccagtgggagggcctgaccttcagccagaagatgaagaacatggtgggcgatttgaacgtctgcagcaagaagggcctgtctgagcggttcgactccaccattggtgccgccaccgtgctcatgccctttggcggtgcctatcagctgaccccgcagaacgccatggtggcaaagctgccggtggacggcgagaccagcacctgctccggcatggcatggggcttcaaccccttcctgatgagcgcagaccagtacaagggcgctcagatggctgtcatcgagagcgttaccaagctggtggcctccggcttccgctatgaggatgcttacctcaccttccaggaatatttcgagcgtctgggcaccgccccggagcgctggggcaagccgctggccgctctgctgggtgcactggatgctcagatgggtctgggcattgcatccatcggcggcaaggacagtatgtccggctcctttgaaaagctggatgtgcctcccacgctggtctcctttgcaaccgccatcggcaaggcaaacaaggtggtgtccaccgaattcaagaagccggagagcacggtggtgctggtgcggcccatcatcgaccccgagaccggctgccccaacttcttctccctgaaggccaactacaagatcgtggaggacatgatcgaagagggcatggtggcatccgcctgctctgtgggctacggcggcattgccgaggctctgttcaagatgggccttggcaaccacatcggcttcaagatgcgtgcggataagaccacccatgagatgttccagcctatgtacggctctatcgttctggaaatggtgtccgattcgcccgccggtgagatcctgggcgagaccaccaaggaatacgtctttgaagcctgcggcgaaaagctggatatggcccagctgcaggagatctgggaaggcaagctggagccggtgtacccctaccgcaaggcaggccccaccgtggaaaaaatcaacggcaagctgaccgcacccgccgcacccaagatcggtgtggcaaagcccaaggtcatcattccggtgttcccgggcaccaactgcgagtacgacaccgccaaggcctttgcccgcgccggtgccgacccggagatcttggtcatccgcaacctgacccccgccgacgtggccgagagctgcaaggcactggtcaaggccatcgataacagccagatcgtcatgctgcccggcggcttctccggcggcgacgagccggacggcagtgcaaagttcattgcttccttcttccgcaatccggaggtcaccgaggcggtgcgccgtctgctgcagcagcgcgacggcctgatgctgggcatctgcaacggcttccaggccctcatcaagctgggtctggtcccctacggcgatatccgccccatcaccgcttacgatcccaccctgaccttcaacaccatcggccgccaccagagcatgctggtgcgcacccgcattgcatccaccggcagcccgtggctgtccaagtgcgaggtgggcgaacagtttaccgttgccatcagccacggcgagggccgcttcgtggctccgcaggaagtgctggacaccctcatgaagaatggccagatcgccacccagtatgtggacatcgagggcgatcccaccatggaccagcgctataaccccaacggctctgtgctggcgatcgaaggcatcaccagcccggatggtcgtgtgttcggcaagatgggccactcggagcgcagcggcgagtacctgtacaagaacgttaccggtgacaaatatcagccgatctttgagggcggcgtggactatttcaagatttgatggtagaatagagaaaaactccttccgtcatcgctgatgcgatgccacccccctcggagagggaggctgaaaggccccctccccgagggggctgtcgccggaaggcgactgggggagtcactttcaggaggaaacaatcaatgtctcagcatgatcgttatatcagccccttttccacccgctattcctcggacgagatgcagtatatcttctcggacgataacaagttccgcacatggcgccgcctgtgggtggcgctggcccgggccgaaatggagcagggcctgaccaacatcacccccgatatggtggctgagctggaagcccatgtggacgatatcaactatgaagtggccatcgagcgcgaaaagctggtgcgccacgacgtgatgagccatgtgtacgcctacggccagcagtgccccaaggctgccggcatcatccatctgggtgccaccagctgctatgtgggcgacaacaccgacatcatcgtgatgcgtcagggtctggaactggtgcgcaaaaagctgatcggtgtgttggcaaagctgggccgcttcgccgaggaatacaaggacatgccctgcatggcctacactcactgccagcccgctcagcccaccactgtgggcaagcgcgccaccctgtgggccaacgagctggtgatggacctgcaggagatcgaccaccgtcttgctgttctgcagctgcgcggtgtcaagggtaccaccggcacgcaggcttcctttatggagctgttcaagggcgatgccgataagatccgcgccgtggatgcttccatcgccaaggagatgggctttgcgcccgaagcggtcatccccgtgtccggccagacctacagccgcaaggtggatgccttcatcctgaacgcccttgccggcattggccagagctgcatgaagtttgccaccgacctgcgtctgctggctaacttcaaggagatggaagagccgtttgaaaagaaccagatcggttcctccgccatgccttacaagcgcaaccccatgcgctgcgagcgtatctgcgcactgagccgctacctgatggtagatgtgctgaaccccagcttcaccaccggcacccagtggtttgagcgcacgctggacgacagcgccaacaagcgtgtcgccatggctgagggcttccttgccaccgacgctatcctgaacatcatgctcaacgtcaccgacggcatcgtggtgtatcccaaggtggtgcgcagccgtctgatggcagagctgcccttcatggccagcgagaacatcatgatgcaggctgtggaaaagggcggcaaccgtcaggagctgcacgagcgtctgcgccagcacgccatcgccgccggcaagcaggtcaaggaagagggcctgcccaacgatatggtggaccgtattgctgccgaccctgcctttggcctgacccgcgaggagatcgtggcgggccttgtgccggagaactttgtgggccgtgcaccgcagcaggtggaggagttcatcgccaatgtgctcaagcccatcttcgatgctaaccccgatgccgtggagcagcacgcatctttgagtgtttgattttaaatgctctccgcttacgctctgagcataaacagcggaagttacagtttgttttgcaagaaggagaagcctgcgggcttctccttcttgctttttcacgaaaaggaccggaaagaaaaactccttcagctgaacttcgtgcgtcagccgttcccctttttgtcacctttcggtgacatcttcccccgaccgggggaagtctttctcaaagagggagcctctgacgaagaggaagagtttaccgtacggccaaagcctccctaataaaggaaggtggcattgcgcagcgatgacggaaggagttctcttgcgcaaatcattttatcatgttacactaaaactccaaacctatgtaaaaggagaaccgcgtatgcgattggataaatacttagccgagacggcccagtgcacccgcagcgaagctaaggcgatgctttcaaagggccgcgtgcaggtgaacggtgctgtctgcaaaaaaggggacacccagctcaaagaaagtgacactgtggctgtggatggcagggcgctcagctatcagcagttcgtgtacatcatgctcaacaagcccgagggcgtggtgagcgcttccaccgacaagcgtgacaccaccgtggtggatctggtgggggatgcctatccccggcggcagctgttcccggcgggaaggctggacaagaccagcaccggctttgtgctgctgaccgatgacggcacctttgcccacgacatccttgctccaaagcggcacgtctccaagacctataccgtggtgttggacacgcctctgaccgagcagatgcgcaccggctttgccgctggggtcacgctggcggacggcaccgcactttcgcctgcggaggtgacggccctttctgccgatggctgcactgtgcgggtggtgctcaagcagggcgtctaccaccagatcaagcggatgttcggcgtgtacggcgcaggcgtgaagggcctgcaccgggatgccatcggcggccttgcactcgacccggcccttgcaccgggccagtggcgggagctttctgccgaagaagtgtcaaaaatttccagctgacagggtcggcttttcacccgaatttcaaaaaagcaacacatttttccggtagaatagggggcagaaccacgcaaaaaggcacttttttggttcagaatggcccctaaagataatattcacaagaaaaaactatcttttttgttgaaatatgttgcaaaagtaaattcttttgtgtaaaatataaaatgtaatgcagctaaattgttaaaaatcacgaccggctgccgctgcggtttgcacaaacgaggaaaaggggtatccattatggccaatagagtatttcaaagcgtgatctaccagatgaaagacgcgatcaaccgggtggtcggcgtggtggatgagaccggcgctgttatttcctgctcggagctgaacctgatcggcgaggtgcgcgagggtttcatggcggagcgtctgaccgcaggcgaccgctttgtgcgcgatggctacacctatcagcagttctccagcgccaagcataacgattatgcagtattcgtggaaggcgtggacgagacggctggtcagtttgctgccatgctgtccatcagcctgcagagcatcaagcagtaccacgacgaaaagtttgataagtccaactttatcaagaatgtggtgctggataacatcctgcccggcgatatctatgccaaggcccgtgagctgcactttgccaccgatgtttcccgcgtggtgttcatcgtgcgtgttaccagcggcggcgatatctccgcctacgatgtggtcagcagcctgttccccgacaagcagaaagactttgtgttcaatatcagcgagacggataccgtgctggtcaaggagatccgcaagggcatcgaccgcaccgatatggaaaagctggctgccagcatcgtggataccctgtccggcgagcattacatcaaggctgtggtgggcatcggcacccccatctccaacgtgaaggatctggctacctcctttaaggaagcgcagatcgccatggaagtgagcaaggtgttcgacaccgaaaagcagatcatccgctacgataatctgggcattgcacgcctgatctatcagctgcccaccaccgtgtgcgagatgttcctgcgcgaggtgttcaagcagggcagcatcgaaagcttggatcaggagaccctgttcaccatccagcgcttcttcgagaataacctgaatgtgtctgaaaccagccgcggcctgtttgtgcaccgcaacacgctggtgtatcgtctggaaaagatcaaaaagctgactggcctggatctgcgtgagttcgacgatgctatcgtctttaaggtagcactgatggtcaagaagtacctgtccaacaatccggccaaatactaataagctgcaggctctgcctgcagtgcagaaccggccgctcgaaaccgatgctggccggttctttttgctgtgaaaacagattttaatgtcaggagctaatattaccctatgatcgatttagaacacgtttccaaggaatataaacggggcggaccgctggcactggacgatatcaatctccatgtggacgacggcgagttcgtgttcctgctgggccattccggcgcaggcaaatccaccctgctcaagctgctgctgcgcgaagagctgcccagtgagggcaaggtgaccgtgctgggcaaggatgttgccagcctgcaccgccatcaggtgccgtatctgcgccgtcagatgggcattatctttcaggatttccggctgatccccaccatgactgtgtacgagaacatcgcctttgccatgcatgtgaccaacgtcaagagccgggagatcagcgaccgtgtggagtacatgctggagctggtgcatctggaggataaggccaaggcctatccggacaccctttccggcggtgaacagcagcgcgtggctgtggcccgcgcccttgcccacggccccaagctggtcattgcggacgagcccaccggcaacatcgacccggaattgagcctggaaatgatggagctgctggagcgggtgagcgaaacgggcatcaccgtggtggtcgttacccatgagcacgagctggtgcgccagttccaccagcgcgtcgtcaccctgaaaaagggccgcatcatttcggatgtgcctgccgacaaggaagccatccgcgcacgcgcagagcgcaaagaacgcctgttcgagaccgagctggaacctgctgacaccgcagaaaaggaggcggccaccgtatgatgagaccttctaccttcttttttctgatccggcgcggtatccgcaatctgggcaagcactgggccatgacctttgtgtgcatcctgtccctcagtgtctgtatgaccctgaacacctttgcaagccttgccgaggtgaacgtggacagcatggtgaactatctgggcagccagaacgagaccgtggtctatctggacccggagtgtgatgatgccactgcgcaggccgtgggcgaaaagctggcggcaatgcccggcgtgaccaatgtgcagttcgtctccaagcaggacgtgctgaacacctaccgcaattacatggaagattactcctccctgtgggatgagtttgaaaatgacaaccccttcaaggccaactaccgcgtttccatcgcggatctgagccagatggagagcatgagcaagcagatgcaggccattcagggcgtgtacagcgttaccgccccggtggaaatgaccaacgtctttgtgcaggtgcagcgctctgttaccaaagtgggccgcggtatcgtgctggtgctgatggtcgtcagcatcatcacggtgggcagcaccatccgcctgagcgtgtttgcgcgccgccgcgaaattgagatcatgaagtacgtgggcgccaccaacggtctggtcactctgcccttcgttgtggaaggtctggccatgggcctgatctccggcgtgctcactgcagcgatcagtctgggcggctactcctacatggtgcaggcctccgacggtctgggcggcgtgtgggaaatgatcatgggtcaggcactggtgccggtgagcgccgtctggtccactatcatcccgtacagcctcatcggcggtgccgttgtgggtggtctgggcagtatgttctccatccgcaagcacctgaacgtgtgatcgaaaggagccgcacatgaaaaaagcacttcatgcaaagcccttccgcctgcagatgcccggccatacgccgcgccatgcacggccggagcctgcccgcagcaagctgctgcgcggcgtgagtctgtgcctggcggcggtatgtcttgcggcaagcgtcagcttccagccggctacggcagccaccagcatggccagcctgcagaacaagctgaacagcctttccaaatccatcgaccagcacaagaaggagctttcggacgcaaagaaaaaggaagctgctgcaaaagcgctggaaagtgagctgaaggagcgcgtgggggtcattcaggatcagatcagcgtgctgagcacccagatcgctgctgtgcagaacaacattggccagaccgagcagaagatcaccgccaaggaaggcgaaatcacccagaagcaggccgagatcgacagccagtggggcgattttaaaaagcacatggctgccatgcaagagctgcgcgacggcggcagcgtggccatgctgagcgcagtgaacgacctgtatgagctgctcaccttcaacgaggtcatgcaggatatctccatcaaagataccgagatcatggacaatatgaaggccgccaagagcgctctggaagcagataaggtggagctggaagcccagcgcaaggagctgacgagccagaaggcggagctggatacccagaactaccagatgaaggcaaagcagagcgagctgaacagcagcatttctgcggcgcagctttctgcacaggatgcccagaaggctcagcagacggcacaggccgctattgaatcggacgagctgaactatgaggccgtcaagaaagagatccagaagctgatcgcggcggctgcatccagtaagccgcagctgagctttaccggctttgcctgcccgctgaagagctatacccgcgtttccagcgagtacggctggcgcaagaacccggtgtccggcgtgaacaggctgcatgccggcatcgatctggcggccccgggcggtacccccatctacgcagccgcaagcggctatgtgcaggtggcgggctggtccagcggcggctatggcaactatgtcatcatctaccacggaagcatgtcggacggcaacgcctacagtaccttgtacggccacatgaggtcggtcgccaccagcgcaggcaagtatgtcaagcagggcgagttgatcggctacgttggctctaccggcaactctaccggcaaccatctgcatctggaggtctggaagggcggcaaaaaggccaatgcggtcaatccgcgcggttatatcccgttcccgcacaactgagtgtgtttataaggagtctggtattctatgaacgaacaaaaacacaagcgctggctgcgtatcggctgccttgttctggcaggcgtgtttgcactctcgctgctgagcagtgtgatcatgatgctgctgtattaacagggaggggcaagcatgaaccgtaagatctctgtgggcatgactgtcaccattgtgatccttgccatgaccgtgaccttttccattaccatgctcattgccatgcgtctgtttgacagcacggtgagcagcgtgaaggaaaaggaaagcatgtacaacaaagtggccgaggtggaccgctatgtgcgcagcaacgactactacaccattgatgaaacggtgctgtacgaccgcctgaccgcaggctatctgctgggtaccggcgacaagtacgcccgttactacaccgccaacgcctacaccgagctgatgaaccagcagagcggcaaggtgatgggcattggcgtggaacttggcatggaccagaccggctatgccagagtgaccagggtgtatgaggactcgcctgcgcaggaagccggtatcgtggtgggcgattacatcactgctattgacggcaccgatgtgaagagcctttccggggtggatgccgtgcagtcccgcctgcagggcgaagccggtaccatcgtcaatgttacatggctcgacagcaaggctgcttcccggacgacggacctgacccactccggctacaccagcaccaccgtggactaccagatgctggacagcgtgggttacatcaagatccgccagttcgacggcagcacgcccagcgagctggactatgccatccggtctctcactaccagcggtgcccagagccttgtgttcgacctgcgcgataacggcggcggcgtgttggatgatgccatcagctgcatcgacctgatcgccccggaaggcactgtggcctatgccgaggataagaacggaaaccgcaccatcattggcagcagcgacgatgagagcaaggtggaactgcccatcgtctgtctggtcaacggtaacaccgccagcgcagcagagctgtttgctgccagcctgcgcaccatgaacggcgcacgtctggtgggcaccaccaccatgggcaagggaaccatccagagcagcccgcagcgcctttcggatggcagcgccgtgagcatcacggtggcaaagctcatctgcggcgacggctcctgctttgatggcaccggcctgagtgtggatgtggagcgtgccctcagtgccgaagagaccacgaatttctacgattatacccccgaggatgacccgcagatccagcgtgcggtcagcgcagcacagcagctgagcggtaccacgactctgggcggtgtcaacgaagcagcttcttcggctgctgcttccgaagaagccgacagcgctgccactgagccggagaacgcttcctctgaggaaacggcttcctccaccgaagcagaagccggcggcgaagcagcatccagcgcagaataaagggtaaaaccggcagaaatgctgcatgggcttcttcttgtaaaaagggacccggtttattgcggtgctgtttgccgtactgatcccttctcgtgaaaatgcaacccagccagacccgcaggtctggctgggttgccatattataataatatttccgctgaatatgcccaaagcgacgcggagggcattcaaatcgtactatgaaaaaggatggaatctatgcccgaactgaccgacctctcggtgatccgcgccctgtgtgaaaaatacgattttgcactctccaagggttttggacagaactttatcatcaacccgggtctgccgcccaagatcgtggatgccagcggcgtggataagcgctatggtgtcattgagatcggccccggcatcggtgtgctgactcgggaactggcaaagcgcgccgccaaggtggtgtccattgaagtggacgaacgcctgccgccgctgctggccgaaacgatggccggagtggacaattttaaactggtattacaggatgtactgaaagttgacctgaaggctcttattgcggaagagttccccggtatgccggtggctgtgtgcgctaacctgccctactacatcaccagtcccatcgtcatgaaactgctgggcgaccgcctgcccattaaaagcctgaccgtcatggtacagaaggaagctgccgaccgtctggctgctgcgcccggcacccgtgcatccagcgccatcagctgcgcggtgagctactatgccacctccaaaatgatgttcaccgctgcgcccggcagtttttacccggcccccaaggtgaccagcgccgtggtgcgcatggagatccgtccgcagcccgctgtgcaggtggaggacgaagaaggctattttgcgctggtgcgtgccgccttcggacagcgccgcaaaacggctgcaaacgccattgccagcggctttgggatgcccaaggacgcggtgacagccgccattgaagccgccggttttgatgcccgcatccgcccggaagccctcacactggaggattttgcaaagatccagcaggcccttgcccgctgaagcagcccgctgctcaaaaaagaatacaacagactttgaaccccacaggagccgtccgcggttcctgtggggtttttatgataatagaatcgaatggttcgattttattatcgatgtattgcgttgaaaattcctggtatcaaaacgtgatacaacagaaaagaatgctaaaagcagacgaaagcatgaactgatggcaatggcacctcatttgttaaacggtatagtatactgtttggggaatgggttgtttttttgcgcgccaagaagatattgacaagccgcgcgttttttggtattctatcaaaagaccgcttgatccatgctggtgtggcgcaatggcagcgcaactgatttgtaatcagtgggttgcaggttcaactcctgtcaccagctccaaaaagccgctcaggaacgttgatttctgggcggcttttgcttttgtgtttttgctttcggcacaaaaatccaaaaattccgcaaaagatgttgacaaactatcatccgggtggtaatatatacaggcaatccatggactgcaaaactgaatatgggcgtgttcccgagtggccaatggggacagactgtaaatctgctgctttcagcttcggtggttcgaatccacccgcgcccaccaaacaagaaaaatccgaacctatttccgattggagaagggttcggatttttcgttttcttcgggtttgagaatgaaggctcccgtggacggcgtaaaactccgataccttgtcatagaccgtaagccaataacaagatttggagggtatgattatgaagtacgatgaaagaacctgcaaattcaacatggacaccggctgcgtggaactgctgctccgggatgggagaatgatctccattgactgcactggggtcgaggatgaattggacgtgaccatggcgcagaggacggaactggactacctcatctacaacgatccgctgggctatgcggatttgattctgaacggtgacccggagaaatatttgaagaatgtggctggaagccatgggctagaagattaagggcaaaacaaaaaacagggtgcgcccctgaataggacgcaccctgccaaaagccacagacgatagcgatatgtacaacagggagttccccagtgggaacttcctgtttttcgttgtttgcatgatgagcctgctctgcctgccacgcggcaaactccctctggccttcctcgctgttccagcaggcaaggatggccgggtagaatgcccgcgccagacggtcaatgacttcatcgggataaggggaagtatttgtggactttttctttttgttcaaacgcacgctcctttgatcgtcctaccgtggcaaagtcgggcgagaaaatcaaagttccaatttttatcaggcgcaagggcgcggatgctttccgccctgcacttgcggctgggggctcgttgatggcttacaggtgtctgctgttatgcggtcttttcttcttcaagggcttctgcaagagccttttccagataggtttcgatttcagtcaggtagttagcaggtctctgcattgcgaagcggagaaccttttgcttttccgggtcagtgaaatag

SEQ ID NO: 1164 - DNA, 850 bp, Unknown
  gut microbiota DNA sequence
ccacgctgttcgctcatgctctacagcgaaaagcccttctggtacgacctcaacgccgtcagcagcgtgctgggcgggtacgaaaaggcgttccgctttcctgtctgctacgacagccacatctacggcatcaaacgggacggcacggcggcagtgctgcgcaacgagggcagcctgccggtgcccttcacggccaccctgcggtgcgacatgccggtgacgcatcccaaggtggtggacctgcagaccggggccttcatcggctttgacctgaccctgcagccggacgagacgctggaaatctaccgcagcacctctgaccggctggcctgcaccctgacccgggcaggcgtgaccgagaacatcttctccaagctggacgaggacagcaccctcaccgagctgcagcccggcgataacatgctctccatgcaggccgagaacggctccggctacctgcaggcatccgtcagcttttacccgatggaggcgggcatcctgcccgaaccgttatgagactggacgttttggacgcagacacccttgcccgcgtgggctgggtggacgtgtgggtgtccctctattgggacagtccctattactccgagggcagctttacccttgaggtgcgccccaccaccgagaacctgcagcttttgcaggagggccgctggctggtgcgcagcgacgagaacccccgcatccccatgcgcatctgcgcccgcgccaaccagaacgaggacgcgaaccttgtggtgtccggctacccggcaacatggctgctgacaaagcgcgtctctgctgtgacggtgaagaaccagaacgcggaatccgccatgcgcagccttgt

SEQ ID NO: 1165 - DNA, 7184 bp, Unknown
  gut microbiota DNA sequence
attcaagtggtagggttccgtctctttctgcgcactcacgccattttcttgttctgccgcccccggctccgccgcaaacgcgcccaccggcagaaccgacagcatcatgcacaccgcaagtgctgcactgagaagtctcgtactcttttttctcatgttctcttcctcttttcgtttgttattttgcaggcacccaccccaaaaggcaccgtctgctctttaagtttacccccccatacaacatatcaagaggcattttgctagaaaataggttcgagttttttagtggaattgttgaaatgtttacggcttggcctgatattcccgggaacattcagaagcaatgaaaatgccacgcaaaaaaagccctctcccattgctgggaaagggcttttgaacactgtatcaaacagtcagagcagatcagacgagctccagaactgccatctcagcagcgtcgccgcggcgagcgccgatcttgatgatgcgggtgtagccgccgttgcggtcagcgtacttggggctgatctcatcaaacagcttctttgcaacatcttccttggtgatgtaggcataaacctgacgcttggtgtgcaggtcgcttgccttgccaaggctgatcatcttctcggccatggaacgaacgtccttagcgcgagtgacagtggtctcaatcttgccattctctaacaggtaggtaaccatagcgcgcatcatagcgttgcggctgtcgctggttctaccgagctttctggtaccgggcatcccgtttcactccttaattatttttagttatcgtcatccgtgttcagcttgaagcccagagaatccagctttgccatgacctcttccaggctcttgcgaccgaggttgcggaccttcatcatctcgtcctcgctcttgctgaccagatcttccaccgtgttgatgcctgcgcgcttcaggcagttgaaggaacgcacgctcagatccagctcttcaatggtcatttccagagccttttccttgtcgtcgttggtcttctccaccatgatctcagcgccggctgcctcatcggacaggttgacgaacaggttcaggtgctcggtcagcacacgggcagccagagaaacggcttcctgcgcattgatcgtgccatcggtccaaacctcaatggtcagcttgtcataatcgatcgcctggccaacacgggtgctctcgacgttgtagttcaccttgagcacaggggtgtaaatgctgtcaacgggaagagtgttgatatcgttcttctcgatgatagcctgtttgttgcgctctgcgggcacatagccgcggcccttatcgaaggtcagctccatgacgagcttgccgccctcgcccagggttgcgatgtgccactcagggttcagaatttcgatgtcgtcgccctgcttgatgttgtcagcggtgacctcacaggggccgactgcctcaacacgcactgtcttcggaccatcggtgtacagctttgcagcaatacccttcaggttcaggacaatttcggtaacgtcttccttgacgccctcaatggtggagaactcgtgaaccacgccatcaatcttgacgctggtcacggcgacaccgggcagagaggaaagaagcacacgacgcaggctattgcccagtgtgatgccaaagccacgctccagcggttctgccacgaatttgccgtagcggccgtccggggacaggcttgccgtttcgattttgggacgttcaatctccatcatatctatgccctccttgtcaaaccggcgctgccgccggcccattattaaattctttcaaagaaaagaatgcgaaagtgagccgtccacggggaaggcccagccttcttaatggattacttggagtacagctcgacgatgaggtgctctgcgacttcgtagtcgatatcgctgcgctcgggcagctttgcgacaacacccttcagagaaccggtctcacggttcagccatgcgggcagagcaacaacgggagcctcggggccggtcagctttgcaaactttgcagagctgcggctggactcgcgcacttcgatcacgtcgccagccttcacctgataagaaggaatgttgaccttcttgccgttgacggtgaagtgagcgtgggacaccagctgacgagcgtcgcggcgggtctgagcaaagcccagacggaacacgacgttgtccagacggcactccatgatctgcagcaggttctcaccagtcttgccggggcgggcctcagcacgcaggtaagcattgtggaactgcttttccagaacgccgtagataaacttgaccttctgcttctccttcagctgagatgcgtactcagactgcttcttgcgcatgttgccattggagttgcgggtggtattcttctttgcatagcccatgaccgcaggagaaatgcccagggccttgcaacgctttgcgataggctgcgtattctttgccataattcaatttcctccttcgatcagacacgacggcgcttcgggggacggcagccattgtgggggatgggagtcacgtccttgatcagggtgacttccaggccggtagcctgcagcgcacgaatagcggactcacggccagcgccggggcccttgacgtagacctcaacggtcttcatgccatgctcgatagcaaccttggctgcggtctcagcagcagactgggctgcgaacggagtgctcttacggctgccgcggaagttcagggagccggaggagcaccaagacactgcattaccctgcaggtcggtgatggtgacaacagtattgttgaaggtagactggatatgagcctgaccagcagcaatgttcttgcgctctttgcgcttcatgcggacattagcgcccttcttggcattatttgcacttgccatttctcaaatcctccttacttcttcttgttagcgacagtgcgcttgggacccttgcaggtacgtgcattggtcttggtacgctggccgcggcagggcagattcttgcgatggcgggtgccacggaaggactggatctcaaccaggcgcttgatgtccagagcaacgttgcggcgcaggtcgccttcaacgatgatgttagcctgatcgatgtagtcacggatcttagcctcttcttccagagtcaggtccttgacgcgggtatcggggttgatgccagttgcttccaggatcttgttagcagtggtctggccgataccataaacgtaggtgagacccacctgaacgcgcttctcgcggggcaggtcaacgccggcaatacgtgccatagtagtttcctccaaaaatcatcccatgtcagtgtcggggtctgcgccgggactctacgcacttgacccccaggcgcccgaattagccctggcgctgcttatgcttggggttctggcagatgaccatcacgcggcctttgcggcggatgaccttgcacttttcgcagatgggtttcacggaaggcttgaccttcatgatgttgaacctccttttggttgataccctggtgcttatttggagcgccaggtgatgcggcccttagaaagatcatagggcgacatttccacggtaaccttgtccccgggcaggatacggatgaaattggtccgcagcttgccggagatgtgcgctaagaggatgtgaccgctgggagtgagcttcccggtgttcttatcctcgctcaacatttccaccttaaagatggcgttgggcatggcttcacgcacaatgccttcgatctcgataacgtcttccttagacaagctatttgcctcctcattggatctgctcagtttgtcgttgaacctgaaccggtgcctttgccttggaaccctgaaagcgccgcggttttcacgtgcctgcgcccgtttgaccgcagcttgccgcttcagcgttctccagttccagtgccggtccacagacggacaggcggcgatgatcgccacatacttcatctttcgcggcacaaaatccgcaaaacgggcagaaaatccctgtccgccgaggaagtatctggcttccacagccatttatagattatacaccttttgttgtcaatttgcaagaggttttttccgtatttccgataaaaaattctcgaaattcaaaagctgtcctttctctccccggtcttggtttttctccaccgcaaagatgaaactttttcaccaaaagttgtcataattgcacaaacagcaggtctgtccctgcaaaaacgccgcctgcgggggagcatttctgctcttcacaggcggcgcttctcatatttcagggatcagcttacttcaggctgaacttttccgggtcaaaatccgggtcatcccagaagcgggtcatgatctcagtgtgatccttcaggatcgcattggagtgctcaaagtgcgcagccagaccaccgtccttggtcttgacggtccagccgtccttggactgggtgatcttgcagtcgtactggcagatcatgggttcaatggcaatggtcatgccgggcacaaggcgcgggccgcggccctgatggccgtagttgggcacttccgggtcctcgtgcagctcacggccggtgccgtggcccacgaactcgcggacgaccgagaaaccggcatcctcgcagtagctctgcacggcatagccaatgtcgccgatgcggttgccggccacagcctgctcgatgcccttatacagagcagccttggtcacatccagcaggcgctgtgcttccagatcgaccttgcccaccgcataggtgcaggcattgtcgccgttgaagccatcgatctttgcgccagtgtcgatgctgacgatatcaccgggacgaatgacgatgtcatgcgaagggataccatggatgatggtatcgttcaggctgatgcaggccgtgcccggaaagccatacagacccttgaaattgggggtgccgccgtgcttcacgatgaagtcgtagatcagcttatccaattcccatgtggtcatacctgcttcgatatgctcaccgccgtacttcagggcagctgcgctcagggcatttgccttgcgcatgccgtccagctctttcgcatttttgatctgaatcacgattatgcctccaaagccttcatgacttcagccgtggtctccccgatggaggggcagaacttgatctctgccagcttgccgcgggtacggtagaactccaccagcggctcggtctgctcatgatatgctttcaggcgatccagcacggtggcaggctggtcgtccttgcggatgacggtcttgccgccgcacaggtcgcacacaccctcgaccttgctcttcttgttgacgatgtggtagcttgcgccgcacttctcgcagacgcggcggccgctcatgcggtcaacgatcacattgtcctcgacctgcagctccagtaccttgtcgatgcggatgcccatggtctcgatggcctcggcctgagcgatggtgcggggcacaccgtccaggataaagccgtttgcgcagtccggctgagccagacgctctttcaggatgccgatgatgacctcatcgggcaccagagcgccagcgtccataaagctctttgccttcaggcccatctcggtgccttccttgacagcagcgcgcagaatgttgccggtgctgatggaggggatgttcagcttggcgcagatgatctcggcctgagtgcccttaccagcaccaggtgcgcccaacaggatcagattcataggatcattcctttcctttgctagaggatgtaaactccaaaaaagtaaaaaagcactgaaaagttcgagcgtactctcctttccagtgctttctcacatcttaattattgtggatcaaccaaggaagcccttgtggttgcgcatcgtcatgaagctgtcgaggctgcgggtggtatcaagtgccacaccaaccacgatcagcaggctggtaccgcccagctggatgctcataccggtcaggttgcccagaatgatcggcagcacagccaccgcagccaggaagatggcaccgatgagggtgatcttgttcagggtgcgggtgatgaaatcgctggtcggcttgccaggacggaagccggggatcgagccgttgttgcggcgcagattgttggcgatctcaacggggttgtactggatggccacatagaagtagttgaatgccagaatcagcagcaggtagatcacaacgtacagccatgaggtgtagttgaaggtgtggaagaatgcataccacaccgggtgtgcctgctggtcgatctgcaggaagctgccgatggtgcccgggatggacaccagagccgaagcgaagatgatgggcataacgccgctcatgttcagcttcaggggcagatagctgttctgaccgcccatctgcttgcggcctaccacgcgctttgcgtactgaatggtgatgcggcgctctgcgttggtcatgacgaccacgaagaccacagccaccagtgccagcacgatcagcagcggcaggaagaagtagtactggggcttgccggacgctgcctgagtcagcagacccttgacagaggtgtacagcgaagaccagttggagacgatcgaagcaaagatgatgagcgagacaccgttgccgatgcccttgtcatcgatctgctcaccgcaccatgtgatcagctgtgcgccagccacaaaggttgcgatgatgacgatggcggcaaagatgccggcaccgccggaaacgtacttcagtgcgcccatattgcggatcacgaagtagtagccgatgctcatgatcagagcgaccacagcacctgcgtaccggttgatctgctgcagcttctgctggccgtcggcttcctttgccagattttccagcgcgggaattgccacggtgagcagctgcacaataatggaggcgttgatatagggtgtcacacctaacgcgaagagcgtgcaacgggccagagcaccaccgctcatcatgttcagataggagagcatgtcgccgtttgcgaacatctgcgtcagcgcagagccggaaacgaacggaacggggatggcacagcccagacggtacaccacgaggatcgccagcgtgaacaggagacgatttttaagctcggggatcttccatgcgttacggaatgtctggaacaccttacatcacctcagcctttccgcctgccttctcgattttctctttggcagaagcggaataggctg

SEQ ID NO: 1166 - DNA, 10385 bp, Unknown
  gut microbiota DNA sequence
acaatattaaaacttgcttctttctatagaaagtggggtattattatgggaaaatactttggaaccgatggcgtgcgcggtgtagcgggcgcagacctgacctgtgaactggctatgaagatcggccgcggcgcggctgcggtgctgaccggcagcaccggccaccgtccgcgcatcctgatcggcaaggacactcgccagtccggcgatatgctggaagcagccctgaccgccggtctgtgcagcgtgggtgcggatgtggaaagtctgggcgttctgccaacgcccgctgtggcctatctggtgggcaagtacaatgccgatgccggcatcgtgatctctgcctcccacaatccgatggagttcaacggcatcaagatctttgccggtaccggctataagctgccggacgaggtggagaacgagatcgaggtctacattgacaacgactgcgcgggcattgagctgaagaccggtgccgaggtgggccgtgtgtaccgccgcgatgacggcctgcaggactatgtggatcacctgtacgagtccatccacggcgacctgaccggcctgaacgtctgcatcgactgtgcaaacggcgcatccgcagcagtggcacagaagctgttcccccgtctgggcgcaaagtgcacctttatcggcattgagcctgacggccagaacatcaacaagggcgtgggcagcacccacctcgacaatttggaaaaggctgttgtagagggcggcttcgactgtggcattgcctttgacggtgatgccgaccgctgccttggctgcgacgaaaagggtcacgagatggacggcgacaagatcattgccctgctggccatgaccatgaagaaaaaaggccgtctggacggcgacaccgccgtggttacggtcatgtccaatctgggcttcatcaaatatatggagagtcagggcatcaacaccgaaaagaccgccgtgggcgaccgctacgtgctggaaaacatgcgcgagaacggctttgccatcggcggcgagcagagcggccatgtgatcctgctgcaccatgccaccaccggcgacggtgagctgaccgccggcaagctgctcaagctgctggctgagagcggcaagaagatgagcgagctgaactgcatctacgcccagtatccgcaggtgctggtgaatgtgaccgccaacgccgcccagaaaaaagcctacaaagaggacgaagttctggccggtttcattgagaacgagcagcagaagctcatgggcatgggccgcgtgctggtgcgggtgtccggcaccgagccgaagatccgcgtgatggtggagggccaggatctggacgccatccaccgctgcgccgaccgcatcgtggataagatcaacaagcgcattctgggccagtaagaaacggataaaagagaagggaggacgctatgcgccctgcagatacctggaaagactatgaactgctggatgccaccgacggcaaccgtctggagcgctggggtgagaccatcctcatccgcccggacccgcaggtggtgtggaaaacgcccaagcaaagcccgctgtgggcaaaggcagatgctgtttatcaccgctccaatcagggcggcggcgagtgggagtacaagcgccgtctgcccgaaaagtggaagatcagctgcggcgagggcgaggataagctcaccctcatcgtcagccccaccggcttcaagcacaccggcgtgttcccggagcaggctgtcaactgggcatggtacgccaaaaagatccgtgccgcaggccgcccggtaaaggtgctgaacctgttcggctacaccggcggtgccacgctggcctgtgcggcggcaggtgccaccgtctgccatgtggatgcctccaagggcatcgtggcgtggggcaaggacaatgctgcggcaagcggccttgccgaccggcccatccgctggctggtggacgactgtgccaagttcgttgcccgcgaaaaacgccgcggcaacacctacgacggcatcatcatggacccgcccagctacgggcgcggccccggcggtgagatctggaagctggaggactgcatctacgacctcatcagccagtgcgaagaggtgctgagcgatacaccgctgttttttgcagtgaacagctacaccacaggcctgtccccggcggtcatggaatatatgctcaagaccacgctggtgccccgctttggcggcgagactagctgcgacgagatcggcctgccggtctctgccaccggcggcgtggtgccctgcggcgcaaccgccatctgggaagaataaatactccttccgtcatcgcttcgcgatgccacctccctcagggagggaggctttctgacggcagaaaaccaaaaggctccctctttgagggggctgccgccgcaggtggctgggggagtttataaaataatctgagatttggggtacagcccctttcagaggggcgcaccaccagaaagagaaacacaaatggaagagacgattttaacagcacaaaatctgaaattccgctacgacagcgaccagccgatttacgcactggacggtgtctcaacggaagtaaagcgcggcgaattcgtggccgtgctgggtgccaacggctgcggcaagtccacgctggcaaagcacttcaacgctatcctgctgccggagagcggcaaggtctacgtggagggcatggacaccgcagacgacaacaagctctatgatatccgccagaccgtgggcatggtgttccagaacccggacaatcagatcgttgccaccgtggtggaggaagacgttgcctttgcactggaaaacctcggtgtgccgcccgaagagatgcgccgccgcgtggacgactccatgaagatggccggcatctatgagtaccgcgagcgcgcaccccacaacctttccggcggccagaagcagcgcgttgccattgcaggcgttgttgccatgcggccggactgcctgatattagacgaagccaccgccatgctggacccccggggccgtgagcaggtgatgcagaccatccactacctgaacaggaatatgggcatcaccgtggtgtccatcacccactacatggaggaagctgcgcaggcagaccgtgtgctggtgatgagcaagggccatgtggtgatggagggcacccccaaagaggtgttcagccagaccgagaaggtgcgctccctgcatctggatgtgccgcaggctgcagagctgagggacgagctggtgaaggccggcatcccgatgccggagggcatcatcgacaccggcgaatgcgcacaggctctgtacgagcttttgcagtaaggggggcagacgcaaatggcagatatcatcaaagtagaacatctgagctacgtctacaaccccggcatgcccaatgcggtcactgcgctggacgatgtgagctttacggtggaagagggcgactttgtgggcatcatcggggccaccggctccggcaagagcaccctcattacccacatgaacggcctgaacaagcctaccagcggcaaaatttatatcgatggccgcgacctgtgggaagatccggagaagatccgggacttccgcttcctcaccggtctggtgttccagtacccggagtaccagctgttcgaggagacctgttataaagatatcgcgttcggccccaagaacatgggtctggacgaagccgagatcgaacgccgcgtgcatgaagccgccgatttcgtgggccttgacccggccctgctggagcgcagtccctttgagctttccggcggccagaagcgccgggtggccgtggcgggcgttatggccatgaagccccgcattctggtgctggacgagcctgctgcgggccttgacccggagggacgggacgacatcctcagcgaggtgaaggagtaccacaaaaagaccggcaccactgtgctgctggtgtctcatagcatggaggacattgccaagtacgccaaccgcgttctggtgatgagcaacaagaaaattgccatgtacgacaccgtggaaaaagtctttgcccgcgctccggagctgctggagctggggctttccgtgccgcaggtgacgaagatcttcctcaagctgcgggagatgggtgtggatgtgcccgctgatgtgtacaccatcccctatgcagtcaagatgatcctggaggccaagcgccgccgggaggcaggcgagagccttgtgctcccgcgggaagcaaagaaggaaggaggcgctgccggatgctgagagatatcaccattggccagcacttcccgggcaacagtctggtgcaccggttcgacccgcgcctgaaactggtgctgaccatcgcctatatcgtgctgctgtttgcagcttccaatccgctgggccttgccctttccattctgttccttgcagcaatgtacaaggtggcaaaaattcccggcaaaatgatcctgaagagcttaaagcccatcctgcccattgtgatcttcacagcggtgctgaacctgttctttgtgtcaggcgagggcgaaccgctggtgcacatctggtttttgaccatttatgccgagggtgtgcgctatgctgtgctgatggcagtgcgcgtcatggcactcatcgcgggcaccagcctgctcacctacaccaccagccccatcgtgctcacggatgccatcgagcagctgctcaagcccttgggcaaactgcacttcccggtgcacgagctggcgatgatgatgagcattgccctgcgcttcatccccaccctcattgaggagacggacaaaattatgaacgcccagaaagcccgcggtgcccagctggacaccggcaagatgaccgaccgggtcaaggcactggtgccggtgctcatcccgctgttcatttcggccttccgccgcgcggacgagctggccatggccatggaatgccgctgctaccggggcggcgacggccgcacccgcctgaaggtgctgcgctgcgaaaagcaggattatatcgaccttgccgtgtgcatcgcctgctttgcagtgatccttgcctcccggctggtgttcccgaatttttaaaactcccccagtcgccttcggcgacagccccctcgaggagggggccttatagcctccctctttgagggaggtggcacggcaaagccgtgacggaaggagttccatgcagaactttttacttacccttgcctacgacggcacgaactactgcggctttcaggtgcagcccaatggccgcagtgtggcccaaacctttcaggacgcgctgcaggccgtgctgggcagccgccccgatatcaagggctgcagccgcaccgatgcaggggtgcacgcgctgggcttcaagctcaacttccacgccgatacccgcatcccggcggcaaagctcccgctggcgctcaaccaacatctgccgccagacatccgggtgctggacgcgcaggtggtgccggaagacttccacgcccggtacgcggcccataccaaaacctatctctaccgcatccacaaccaccccatcgactcaccttttgacgcggcttattacacccgggtgccccggcatctggacgaagccagaatgcaggcggcggcgcagcagttcgtgggcaggtacgattttctggccctgtgcgcggcgggctcttccgctgcagcccatggcgataccgtgcgcaccatcacggactgtcatgttacccgcaagggagacgagatcgacattgaagtgaccgccgacggctacctgtacaacatggtgcgcattctggcaggcactttgtgcgaagcgggcgcaggccggctggacccggcggaaattcccgccattctggaaagccgtgaccgcagccgcgccgggccgaccctgcccgccaagggcctgtttttgaagtgtgtggagtatgatctgtaaggagaaccattcatgagcaaaattcgccgcggcggacattccgccgaaggagagccgctttctgccggacgcgtcgaatatctggaagccgcccgggcccgggtgcgcacacggcgcatccgccgcactgtcatcatcgtagcggtgctgaccatccttgtcctgtttgccaccggcgcagtggggtcttccattgcgcgcgcaaaagaccttgtggatactgccgtcatcgcgctggcaccagccgcaggctggccgcagcagaccggcatcaccgacccggatgcggtggcgcagatgtctggcagctttgtggagatgggcggcgacagctgcgtggtatacagtcttggcggcacccgcctgaacagcatccagagtggctatgcccgcccggccattgctgcaggcaagacccgctttgtgctgtacaaccgctccggcaatgagcttcgggtggaaagccgcacccagaacctttataccaaaaccatggacagcaccatctcgctgtgcgccgtggcagatgccggacaggtggctgttgtgaccgacagcaccgacagcgtggcaaagctgaccgtttacaattccagtatgcagcagcagctggtgtggaacctgaccagtgagcagggcaccccgctgcgcatggcctttgcgccggacagccgccgccttgccgtggctgctgtatcggcggtgggcggccagctgaccacgaacctttatgtactgcccctctcgcagggcgacccggtatgcattggctccgagaacagtgtgccccagtggatgggctggatgtccaacggctttttgctggtgctttatgagaaccgcgccgtgttgtacaacacgagcggcggcagcgcaggcgaacgcgccagctacgattttggcggcggcaccctcgtcagtgtgtccaacaccagtaacggtgcggccctgctgctgagcaatggccagaccagcacggcggtgctgctggacggggagctgaccgtgggttacagcggcagcgtgctctcggccagccagatcatccgggcaaagaacgacggcttctacctgctcaccgacagcacagtggagcgcttcaacagtgtgggcgagttccagtggagccagccgctttcggcccggccccgggcgctgatcgagggtaggcagatcatggtgctcagcggcaacacggtgcaggtggtcacaccgccggagcagacagcttccagcggacagtgatttttgggtgagaagatcatgcgtaaatagcactcttgcggggaaagtgataaaaataacagggaaaacaaggtatgttcaagaatccgtcatttctttttgatatcatatgcacggcagcatggatcattctggtggtgcgctatgcgcgcaagggctttctttcgtccattgtgcagctggtgggcaacctgttcagtctgctgggggccaaggagctttccgctgcctgcgccggctgggtgttcgagcacatgctggcaggcggcttccgcacccagatcgcagcaaacattgctgcgggcggtgcggtagacctttccggcattgcggaaaagtatgcgggtttcctgcctgcttctttccgcgcttccatcgtggcagcctgcgagcgctccattggcgctgtgctggccgataacgcggtggtgctggccgattccattgtggaaaacgtgctgcagccgctgctcacaccggtgatcacgctggtgctgttcttcttgttctacgcgcttttgcgcctgctggtcagtatgctggtcacggtgctgggccttgtgaacaagctgccggtcattggcacggtaaaccgcggccttggctggcttgtgggcggtgccacggcgctgatggatatctatttggtgctgtgcatcctgtggggcatcatcgtcatcacaggcggaaacctgaatgtgctcaacgatacggtgatgagcagcagtctttactacaaaatcttcaatctcttcaaccctttcctgtaaagggttttgcataaaggaggaactatggtctgtattcgatgccagaaacgtccggcgatcatcttcatccagcggatggacaatggtcagatgaagcaggagggctactgcctgcactgcgcccgtgagctgcacatcaagccggtggacgatctgatgaagcagttcggcatgtcggatcaggatcttgataacatggagaaccgcatggaaagcatgatggaggagatgggcgatgcaaacccgctctccatgatgatgaacatggcgaacggcggcgaggatgctgacccggacagcatggacgaagatctgatccccggcagcaatgccaccttcccgctgggctttaccagcagcgagaagaaggatggcgataaaaaggccgaccgcaaaaacggcaaaaagccgcctaagcgcaaatttctggatacctattgcgagaatctgacccgcaaggcccgggaaggcaagctggacgatatcattggccgcgaccgcgaaatttaccgcaccatccagattttgagccgccgccagaagaacaacccctgcctcatcggcgaagccggtgtgggcaagaccgccattgccgagggcattgcggagcgcattgccaaggggaatgtgcccatcggcctgaaggataaggagatctatctgctggacctcaccagccttgtggcaggcacccagttccgcggccagttcgagcagcgggtcaagggcctgctgagcgaggtgaaggccgcaggcaatgtgatcctgttcatcgacgagatccacaccatcacctctgccggtgagagcgagggtgccatgaacgcgggcaatatcctgaaacccgccctctcccgtggtgaaattcaggtcatcggtgccaccaccttcaatgagtaccgcaagtatatcgagaaggatcaggcgctggaacgccgtttccagcccgtgcgggtggaagaacccagcgtggccgatacccttgctgtgatgaacggcatcaagcactactacgagcagcaccatcatgtgcaggtgcctgccgatgtgctttctgccactgtcaccctgagtgagcgctatatcaccgaccgcttcctgcccgataaggccattgacctgctggacgaagcctgcgcctgctgcaatctggcccacccggtcatttccgagtatcttgggatgcagaaggagctggatgccctcaagcaggaagaagccgagatggagaatgcggatgtgaacgagcccatcgactacgagcgcgtggccgagcgcaagacccgcattgcaaagctcgaagccgacctgcccgcaaagcaggctgctgccagcgagattcaggtgaccatggacgatgtggccaaggtcatcgagctgtggaccggcattccggcggtcaaaattcgggagaccgagttcgcaaagctggcaaaccttgagggcgagctgaaaaagaagatcatcgggcaggacgaggccgtgcatctggtggcgcaggccatcaagcgcagccgcgccgacctttcgggccgccgccgtcccgccagcttcatctttgtgggccccaccggcgtgggcaagaccgagctggtcaagcagctggcaaatcagctgttcgacggcccggacccgctcatccgtctggacatgagcgagtatatggaaaaatacgcggtgtcccgcatgatcggttcgcctccgggctatgtgggctacgaggaggccggtcagctcaccgagaaggtgcgccgccgcccctacagcgtggtgctgttcgatgagatcgaaaaggcgcacccggacgtgatgaacattctgctgcagattctggacgagggcaagatcaacgatgcgcagggccgcacggtggatttttccaacacggtcatctgcatgacctccaacgccggcagcagcgaccagagtaccggtgggcttggcttcaataagagcgaggaacagctcagcgaggaaaagacccgcaaggcgctggcgcagttcctgcgtccggagttccttggccgcgtggatgaagtgatcgccttcaagccgctgagccagcagacgctggagggcatcgcggctctgatgctggacgagtacaagcccggcatggaagccaagggcatcgcatacagctataccccggcagcgctcaaggcactggtgcaaaagagtcagggcggcaagtttggtgcgcgcgatttgcgccgcgtcattcgcaaagccgtggaagaccccgccgcagagcgcctgatcgacggcagccttgcttccggcggcacccttgtggtggatgccgatgaaaacggcgagatcatcttgaagtaaacaaaaaagcccctgcatccgtttttggaatgcaggggcttttccgctgtttggcgctgtacggcaaactggaatttttgttattctacgataccttcaatat

SEQ ID NO: 1167 - DNA, 1274 bp, Unknown
  gut microbiota DNA sequence
ggatcttcctcgttgcttttttcacactgcatcggttctgcccctttccctgtgaaaaaaacaaccccggggcgcttgcggtcaccccggggttgttacaagaatgatctactttttcaggagatcaggctcttttccttggccttatcccagacaaggcaggtttggagcttggtcacatagcgataggggcggaactcgttttccttcacatcgtccatcagaccctgctcttccatccagctggcagcctgccgcagatgaaggtcggcatcatcgatgtcgctgaagctcttcaccgtctgcggttccgggcagccggccttttcccagatcagggtcgccagaccggcgcggttggagggcatggggacgccgggcatattcagcacgcgatagatgccggttccggtttcgtaaatgccccacacggctgcaccggtcagcgcaacagccgcaatgccggccaccacatcgctgctgccgccgctgctcgggttgtcgatgtcaccatttccaccctgatacagcgcttcgacggtcacgttgcaaccgggcatcttaaagtgtgcggtctgatcatcgcccagcttcagcgcaatgccgtcagcacgcacggcgctccagccgaggaactctgcgccctccgggatgtttgccgtcacggtcacgggggtgttttccggcacaacggtggcagtatccagctcctgctccccggcaccgaggttagcggttgccttcgcatttacagcgttgacgatgttgccgttggcatctgccagatagcggtattccacgccgttggcatcgcgcttatagccgatgatgtagccagaattcatgctgaagagtttcagcttgttctgatagctgagatcctcgttgtccgttgtgatctgacggccccgcgcagggtcatccacccggatctttgccgtgccggcaaagctttttttgatgttgatctgctggtctttgcccagactaatatcatcagtattattctcaaaggtcacagccttcaggtcgatctccgaatcgcctgcatcggccacacggacaccggtgacgctgttgcggatggtgccgctgttcagctgcacatcgccgctttcgcccgaaatgtcaatggcggtgcccttcggcgcttcgaccgtgccgccattaaggcgcagacctccgcagtttttgacagcaatatcggcgtccgtagtaaagctgccgccgttgatccgtacctgaccccagctgttgttgatgcagctggcacc

SEQ ID NO: 1168 - DNA, 3969 bp, Unknown
  gut microbiota DNA sequence
cgggcttgtattttcacaaaaagagtttgcacaaaaatacgccccggtcaccttgcggtgaacggggcgctaaaacgaagctcgttttttactgcggcaagatccctgcaaagcaggtcttatgcagcaggcggagcaaggtatctgcaagcagaccttatgctcctgacacacgcggggtgtgctttcaaggaccctcgcgggcgctttggtatctcatatcccgctgcggtgcttcgcacggaacaaagcaccgcccgggaagtgaaatcagatagaactcgtatggcgaatgctgtacttcagcacatcacctgcatggatggatgcgtttctccgcttcgtaccgctgcattgcgcagtaaccgccggtacggggcagccgccctcttgcattgtggggctaaggtgccgcaaatatctgcatccaaagcgcagaagaatgcttacttgtacaggtcgaccagacgggtcaggtgctcgtagcggtcgtttgcaacttcctggttgcgtgcgaacagctccttagcacggtcggggaatgcacgagtcaggcggctgtaacgggtctcgttagccagcagtgcctgatacttctcgttatccacagccttggaggtcagggtgaacggattcttgccctgagccttgtttgccgggttgaaggtgaacaggttccagtaaccggcctcaactgccttcttcatctcgttctggcagttggtcatgccgcccttgacaccgtgcagctcgcagggagcgtagccgatgatcagagacgggccggggtaagcctcagcctcagcgatggccttgacagcctgagccgggttagcacccagtgcgatctgagcaacatagatgtaaccgtaggtcatagcgatctcggacaggctcttcttgctgatttccttaccagcagcagcgaactggcagacttcaccaatgttggaagccttggatgcctgtccaccggtgttggagtacatctcagtatcgaagaccatcacgttgacatcctcgccggaagccagaacgtggtccagaccaccgaagccgatgtcgtatgcccagccgtcgccgccgaagatccagacggacttcttggcgatgaactgcttgctcttcaggatctctgcagacttctcgcagccggcagcagcagccttctccagctcagcgatcagggcctttgcgggctcgtcgttggccttggtgttgttcttggtctccaggaacttctcaaaggcagccttcagctcagcagaagccttgtcggaaccagcaacctctgcgatctccttgatcaggttctcgcggacggtcttctggccgatgtacaggcccagaccatgctctgcattatcctcgaacagggagttgcaccatgcaggaccatggccgctgtccttgttgacggtgtacggagagatggaagcggtgccgccccagatggaggagcagccggtagcgttggagatgtacatcttctcgccgaacagctgagtgatcaggcgagcgtaagaagtctcggcacagcctgcgcaggagccagagaactccagcagcggctggttgaactgagaaccgatgacggtatcgtcagcaaacttggaaggcttcttggagatgttggccacgcagtagtcgaacactgcctgctgatcggcctggctgtcctgcggcaccatggtgatagccttggtggggcagacggtgacgcactcgccgcagcccatgcagtccagaggagacacagccataacaaacttgtactcgtttgcgggcttgttgtcgcggctcttggtctgtgcaggagcagctgccagctcgtcggcggtcagctggaagggacggatggtagcatgagagcagacgaatgcacactggttacagccaacgcactttgcagcatcccactcggggacgttgacagcggtgccgcgcttctcgtatgcagaagcgccctgctcccactcgccgtttgcatttgccacgaaggaagagacaggcaggctgtcgccgtccatacgggcaatgggctccatgacatcgcggatctgcttgaccagctccggacggccggtgagagccttgggtgcaggatcagcctcggggttggaccaggatgcgggcacgtccaccttgtggatggcgtcaacgcctgcatcgatagccttccagttcatctcaacgacgtcctggcccttcttgccgtagctcttctgagctgcctgcttcatgaagttgacggcatcctcgatgggcatgacgtcagccagcttgaagaatgcagactgcaggatggtgttggtgcgcttgcccatgccgatctcgatagccttatcgatagcattgatggtatacagctggatgttgttgtcagcgatatacttctttgcctcggcgttcaggtgctggcccagctcctcatcggaccactggcagttgatcatgaacacgccgccgggcttaacatcctggaccatcttcatgcccatgtggatgtaagcggggttgtggcaggccacgaagtcagcctggttgatgtagtaggggctgcggatgggcttgtcgccgaaacgcagatggctgatggtcacgccgccggtcttcttggagtcatactggaagtatgcctgaacatacttgtcggtatggtcgccgatgatcttgacggagttcttgttagcaccgacagtaccgtcgccgcccagaccccagaacttgcactccttggtgccagcggctgcggtgatgggagcgggcttgacttccggcagagacaggaaggtgacatcatcggtgatacccagagtgaagcgctccttgggctgatccttctccagctccttgaacagagcaaagatggaggacggcggggtatccttgctgcccagaccgtaacggccgccggtcagaatgacatcgttcaggccagcctcacgcagggtagcggcaacatccaggtacaggggctcgcccagagagccgggctccttggtgcggtccagcacagccaccttcttggcggtcttgggcaggaccttcagcagggaagcggagacccagggacggtacaggcggaccttgacgataccgaccttctcgcccttggcgttcaggtagtcgatgacctcatcagcaacgtcgcagatggagcccatagccacgatcacacggtcagcatcgggtgcgccgtagtagttgaacagatcgtagttggtgcccagctttgcgttgatcttggccatgtacttctcaacaacagcaggcagagcgttgtaaacgctgttgcatgcctcacgatgctggaagaacacgtcgccgttctcgtgggaaccgcgcatcttggggtgttcggggttcagagccttcttacggaactcctccacagcctccatgttgcacatttccttcagatcggcgtaatcccacttctcgatcttctggtactcatgagaagtacggaagccatcgaagaagttcaggaagggaaccttgccctcgatggcgcacagatgtgcgacaggggacagatccatgacttcctgcacgctgctctcgaccagcattgcaaagccggtctgacggcatgccataacgtcgctgtgatcaccaaagatgttcagggactgggtagcaacggtacgtgcagaaacatcgaacacgcagggcagctgctcagcagcgatcttgtacatgttggggatcatcagcagcaggccctgagaagcggtgaaggtggtggtaacagcacctgcacccagagagccgtgcacagcgccagcagcgccggcctcagattccatctcgacgaccttgacctgattgccgaagatgttcttctggccagctgcggaccactggtccacagagtcagccatcggagaagacggggtaatggggtagatggcagccacgtccgtgtaggcatacgctacatgggcggcagcggtattgccatcc

SEQ ID NO: 1169 - DNA, 11210 bp, Unknown
  gut microbiota DNA sequence
ggagctgcaaattaaagataaattatcctctgaatatgcccagagcgaagcggagggcatttcaaatcgtcaggctttttctttcttcccgccgttcagcttccagagcagccatgcatagaagtaattcatcagcaggatggcgatgcaccacagcaccgacgcctgcacgctctggtcatacaccttcatgaagggatatggcccatctaccacgcgctggatgttcagccacaaaatgatgccgccgtacagcaccgtgggcagcagcgcccacttgaccgtactgcggggcaggcgcggtgagcgctccagcagcacaaaggagaagatggccgccagcgggttgagcagatgatggtacaacatggagctggtgcacagcatgatgtaccagccgttgccgtcctcatacatgggacccagcacgaacaccaccgtgagaaaggtcatggtcaggcagcaggtggcaatgtacttgagggtgtgcagccagcggggcagctcttttccggtaaagatgcacaccagctggcccaccgccaccatggcgcagatgcaggccgaaaggatgttggaatcctcggtgtaaaaaatgaacatctgctctttgccccaatcccagctcatgggcagggcaatgggctccgcccagacgatgaacaggttcagtgcgatggagagcaggcggcgcactgtatcagcaaattttttcatggaaagcctttccgtcttgtaatatttcctcgaaaatttgaaaaagggcaggtctccctgccctttttcaaaaaacgctttattttgcggtgttgatgaagctacggttgtcccacaggtacttgatgccggaaatggccgtcacggcagccaccagccagcacagcaccatggaaatgctgattaccaggatctgccgcacgccctgctctgcgccggcagccgacatgcttgcaatggacatgccaaagaagtagaagatgatgctcagcatctgcagcacggtcttcaccttgccccacatattggcggcgatcaccttgccgtccttggcaccggctgccaccatgcgcagaccggacaccgcgaactcgcgggccagaatgatgcacagcaccaccgggctgcatacgccgtcccgcatcatgtagatgaaggccacggtggtcagcagtttgtcggccagcgggtcggcaaacttgccgaagtccgttaccatgttccacttgcgggccagatggccgtccagaaaatcagtaaagctggcaacagcaaagacgatgcctgcgatcaggtaatacgtcggctggaaggagccagccgcgatgccgctcaggctggtgagggacacaaagaccatgaacaccggcaccagcaggatgcgggtcaaagtgagtttattgggcagattcatacagattcctccaatttgttattttgcaacagtaccatacagatcgtaaaggtcgctgtcgtccaccagaacatcgtagaactggccggggtacagcggctcctcgctggaaacgcacacattgccgtccacctcaggagcatcgccggtggtgcggcacagatacaggccgctctcctcgtcgataccgtcgcaaagcacatgcacggtctggcccaccttttcggcctgcttctgagccatgatgccggtctggatctgcatcaccagttcggcgcgcttgtccttggtctcctgatcgatctggccgtccatcttggcagcaacggtgttctcctcggcagagtaggcaaagcagcccagacggtcaaactttacttccttgacaaaattgcacagatcttcgaactgctcctcggtctcgccggggaagcctgcgatcagagtggtgcgcagggtgatgccggggatctcgcggcgcagcttgccgatcacctccagcagctcggcgcggttggagcggcggttcatattcttgaggatggtgtcattgcagtgctggatgggcagatcgaggtagggcaccaccttctcattgcgcttcatggcggcaatgaactcatccgtgatgcgctccgggtaagcgtacataatgcggatccactcgaggcccggcaccttgttcagcttatccagcagctcgcagatgctgccgggcttgccccagtcctcgccgtaagcggtggggtcctgtgcgaccacgatcagctctttcacgccctcaccggccagccagcgggcttcggccacgcagtcggccatatcgcggctgtgcagcgggccgcggatgccggggatggcgcagtagtggcagcggttgttgcagccttcagcgatctttaagtacgcatagtgggcaggcgtgccgatgacacgcttgccgcccagcggaaagtcctttttggcaccgtagctttccagatggtcctcaccatggaacaggcgggccacgatggtgtcgatggccttgttggaggcacagcccaccaccgcgtccacctcagggatctcttcctcgatctggctgcggtagcgctcggcaagacagccggtgacgatgaccttcagctccgggttctgctgcttgtaggagcaggcttccagaatgttttcaatggcttcggtcttggcgctctcgatgaagccgcaggtgttcacaaggatcacatctgcttcggccagatcggccacggtctcgtggccggcagacagcaggatgtgcaccatcacatccagatcgacctgattcttggggcagccaagggaaatacacgcaattttcataggggatgatactctctttctcttttgaggggtgctttttattcttcttccgctctttttatcgcttcttttatgaccgaatacgcaaaaccgcggcgctgcagggcggccaccacaaggtcgcggcggccatcggccagctttttcatgtagcggctgcgcaccagagcggcggcagcttccagctccgggctttcgccgtctgcgtccggggcatagacgctttccagcgcctgctcgatctgtgcgccggaaaggcccttctgccgcaggttctgagccgccgcacggcggctcttgcgggcggcaagcaggctgtgtgcccgggcttcggcatagcggtcatcgtttacgtaatccagctccaccatctcagccacagcagccgctgcagcctgctcggtaaagccatagcacagccgttcatacagctgtgccgaggacatctcgcgcgaggccagcgcatccagtgcgcgggcgcgggccttggccgggtcggcgcacttttcttcttcctgcttcgggcggcggcgtttataaaaggacatttagtcctccaccatgatatccagttcgctctcgctgctgcgggcaggagccttgaccactggctccttggcatctgcagccttggcgggttcctcggccttggccgcagcgcccttgcctgccgggcggcgggatgcgtacagcttatcggcattggcgcggatctggccctcgatgtcgtttgcgatctcgggattgtccttcagaaactgctttgcgttgtcgcggccctgacccagacggatatcgccatagttgaaccatgcgccgctcttctgcacgatgcccagcttcacgcccacatcaatgagttcgctcatcttggaaatgccctcgccgaacatgatatcgaactctgcctcacggaacggaggtgccaccttattcttgacgatcttggcgcgggtgtggttgccgatgaactggccggaagagtccttcaggccctccacgcggcggatgtcgatgcgcaccgaggcgtaatatttcagggcgcggccgccggtggtgacctccgggttgccgtacatcacgcccactttttcacgcagctggttgatgaagacgcagaccgtgttggtcttgccgatgaccgaagtcagcttgcgcatggcctgactcatcaggcgggcctgcaggcccacatggctgtcgcccatttcgccctcgatctcagccctcggcaccatggcggcaaccgagtccaccacgatggcatcgatggcaccggagcgcaccagtgcttcgcagatttccatggcctgctcgccggtgtccggctggctgaccagcagattgttgatgtccacgcccagcgcttcggcataggtggggtccagtgcgtgctccacgtcaatgaaggccacttcgccgccctgcttctgggcttcggccagaatgtgcagagccagcgtggtcttaccgctggattccgggccgtacacctcaatgatgcggccgcggggcacaccgcccacgcccagagccagatccagacccagactgccggtggaaatggcatccacctgcatggaggcgttatcacccagcttcatcacggcacccttgccgaactgcttttcgatctgggccagcgcagtggccagcgcatcctttttggcctccggctcggtctttttggtcgccggggcaacggtgttgttgttctgattttttgccatagcgtgctgctccttttcttcctgctgcccgccgtgcgcgggctgtccgtatactttccagtatagtataccacaaaatcaaaatattacaacaagaagttgtttctattttcacttttatttttcgggtctgtgggcgatcatgcaccggtcgttgccgccaaaatccttgcggcactcaatgtctgcccagccgtttgcagccagcagtgccgccacagcctgccgctgctgccagccgatctccagcaccagcgctccgccgggccgcagtgcattctggtaatgctctgcaagggcacggtagaacacaaggccgtcctttcctgcttccagcgccatggccggttcctgtgccacctccggctgcaggtgccgcatctcctcggcggtgaggtagggcgggttggatacgatcagatcaagctgcccttccggcaggccctgccagtatgtgaacaggtcgccctccacaggctgcaccgcataggctggctttgcctttgcgcgcagagcgttcagcgccggcccccagtcaaaggccggggcatctgcctgctcaaacgcggtaggctccagcaagtcctccgtctgcccgccctgccctttcagggcgcagcggcagttcttttccagataaacaaaggcttccgggcttttttccacgcaggtcacctgcgccgccgggcagaagcgcttgacgcccagccccagacagccggtccccgcgcagagatccagcacccggggcgctgcaatgcccgtcagggtattggcagccgcttccgctaccacctcagtgtctgcccgggggcagagcaccccggggccaacggcaaggtcaaaatccagaaagctccagatcccgcacaggtattgcagcggttcccgctgctcacggcgcgtgcagagggcttccagcttttccgcttcctccgtggtcagcacccggtcggaaaggcgggcatcccgcccggctgccacgcggaacagctcccgtgcatcgtaatcggcatccggacaccctgcagcggaaagccgggcttccacggcccgcaccgcttcgcgcggagtcaaaccagcaattaccatctgccatcctccgggtcctcgggcagcacaggggtcacagcggtaatggccacctcgatcatgctgtcgtccggttcaaacacggtcaggtgctgcacccagatgccgggctggcggatgatacgggtagcaatgttatcggaccggccgcaccacttgagcagctcatagctgatgcccatgaccagcggcagaagcagcagcttgaacagcacccgcaggccgatgctgccccacggcagcacgctgtagaggaacacgctgacgatgaccaccagaatgaggaagctggtgccgcagcgcggatggaaccgagtgtacttgcgcacattctccacggtcagctcatcaccggcctcatagcaggcaatggtcttgtgctcggcaccgtggtactcaaacacgcggtggatctccttcatcttggagatggccaccatataggtgaggaagatgccaactttcagcaccgcttccagcaccaccttggcccagcggcccaatgttacaaagtggttcacgccgcccacgatgagggtgggcagcacggtgaacagcaaaatcgccagcaggccgcccagtacggcggcacaggccagcagtgcgtcctctgcctttttgcccaagtggtcgcccacccatttttcaaaggcagtctcttcctcttcggggtcgtagtcgtcacccatgctcacctgagccgagtacatcatgtagcggtagcccacgatcaggctttcgatcatggagatggcaccgcgcaccagcgggatctttgtccagatgccgtggttcttcacagggtcgatcttggtctcaatggtgccgtccggcttgcgcacggcgcagcagatgagcttcgggccgcgcatcatgatgccttccatcagcgcctgcccgccgacgctggtcttgaaacgttcctttttgggttgattcattggtttctcctatcggatcatatttttcccgaccattttaccacagaattgtgacaaaatcttcacgccttatggtacagcggcaagcccagtgtgaccactgtgccgcggcccagcgtgctcttgatgtccatggtgccgtccagtgcagtcatgatggaatccaccagcgcaaggccgatgccgctgccgcgcaccgaattgctgcccttgtagaacttggtcttgacgttttcaaggtcttccggcgggatgccgcggccctgatcgatgatctccgcaaaagccttgtattcgcccgcccacagcttgaccgtgatgcgcccgccgggggccgagtacttgatggcgttgtccatgatgttgatgaacacctgccgcagacggtccgggtcggcatagaccgggatcatctcctccggctcggtgtagctgagcacaaggccctcgcgctggatgcgtgcttcacagaacagcaccgcatcggtcagctctgccacaaggtccagcgggcggcagtccatacggatgcggccgttctgcagacggctgaaatccagcagctcttccaccatgttgtacaggcggcccgtctcattgttgatgatctcaaggcccttgcggtagttctcgtctgccgggtcgtccagtgtacgcagggtctccacccagccccggatggaggtgagcggcgtgcgcagctcgtgagagacggaactgatgaactcgttcttcatcttctcggtctcttccagcccttcggccatctggttgatggtgccgcgcaggcggtccacctcgtcgtgctcgttgccggtgaccggcaggcgcacatccagctcaccccgggcgatgctggctgcggtgcgctccacctgccccagcggcaccacgatgctgcggatgaagtacaggccggacatcacggtgaaagcaaggatcaccgccgcgatcacaacacttaccgcgagggcgttcttgatctgcgctcccacaagggtcaggctggtgacaagacgcatcgccgccacatcctcggcggcatagggcaccagataacaggccgccatcaccagctcgccggactgggtgcggtagaccgccacaccaaggccatcagaagcctcctgcgcctgctcaaagtcgatgccggtcacaatgccgtccgcatttgtgccgctggaggacgcaatgaccccgccatagctgtccagcagcatgaactcgtatttgtccttatcggcaaactgctccaccatgcggcgcagggccacgctgcgggtagccgccgtgctctgcaccgtatcgccggtgtacattttcagctggccggacaccgaagagaaccgccggtacatggtctgctgcacgctgttataatagctgcgtgtgtagttgtacaggaacatggtttcggccagcagcaccagcagcacggtgatgagcaggttgccccgcagccaccggcgggtgatcccgcttctcattcttcccatctgtagccgtagccccacacagtaaggatatgggtgggatggctgggttcatcctccaccttcatgcgcagacggcggatgttcacatccacgatcttcacgtcaccaaaatagttctcgccccagacacccttcaagatcttctcgcgcaccagcgcaatgccggggttgcggaagaacagctccatgatctggaattccacctgcgtcagctcaatcggctggcctgccttgagcagcacgcggcggttctcgtccagcacaaattcgccgctggtgagcatccccagcgggttttccttttctttttcgtccccgcctgcagtacggccgacgcggcggcacagcgctttcacacgggccagcagttcgcttacgctgaaaggcttggtcatatagtcatcggcaccaatagaaaggccgcggatcttgtcctgctcctgtcccttggcgctgaggatgataatgccgatcttctgatcggtgcggcggatggtctcgcacagggagaagccgttcatgcccggcagcatcacatccagaatggccgcatcgcagcccggcttcttctccagcagcggcagagccgcctcggcgctttcggcctccacagcctccatgcccgcaaggcgcaggttcagcgcgatcatctcgcggatgttggcttcatcttcaacgacaagcactcgtaccatgaactgttcctccgttctttagttgagcagatacagcgccttggacaggcggtaatttttatcacggatctccacatccggggcaagcttcgcctgcatctggcgggatgccacgatgccaaggcgggtccagcccttcaggctggaggtggtgcgcaccagacgcagggtcattatcagctggtcttcgtccaccgtgcgcagctccactgcaccatcatattgttcgctgtcggtcagtttgaggttgccctcccactccatgggcagctcgatatagcagttggtctcttcgtccagcagcccgaagcttttttccgggtgcgggctggtatagtccatccacacgataaaatccatgcggcggctctggctcatgttcagcaggcccgcttcgtccggctgggtggggatctccacgatgccgtcgccgtccagatcctgactgaccagactgggcacattgcgcagggatgcggtgtaaagcttttcggtgctgatctgatcggcaggcaccatctgctgcgtgtcctcgtcaaaacgcagcagcacgctggccagattgttgccggaaatgccggtccagccatccagcaccagataatgcctgccgtccgcacccacacccgccgccaccgaggcgcagccggcgaaccgattggcggaaaggcccataacagccacctgctggaagctgccctctttatccacggtcagcagttcgatctgcacaccgccgtcctccagcgtagacatcaggatcagatcctgattgccgccgccggtgatatcctccaccagatactgctggtactgctgctccaggatcgtggaaagcacgccgtcggtgtaggaatacacagccagataatggtcgccctgtgccgctgtataacccaccaccagttgggtggcatcgccgggctgcagctgggccagccccaccgactctaccgtgtctgcaaggccctctacattctggcgcacatgccagatgtcggcatcatccttctgcaggatggcaatgcacacgttggagctttgggcggtggtgtaaagcacggcggcatcctgcctgccgtcaccgtccagatcctgcagcaggaaaggcgaaagcaggtcgccctgcatgggatatttgagctgtgcgctctcccccagccagtcgttcagggcagtctgcacatcgccgtaatcgccggaaagcttgggcgcacgcagaagctcttccacctgcacctgttcaccgggcatgctgcagcctgccagaagcaggcacagcagcacgcaagccaaccaccggccaaaataattcggacgtttcaaccgctgcgcctcctctgtgtggaaaacttgtccggccaaaggccgaaaacatgctattgtcagtataccacggggcgggcgcaattccaacacccgaaaacgagaaaaggggctgccgcaccacatttggtgcagcagccccttcggggtcctgatttttattcttcggtcttgtcaaacaagcctttttcttttgcggcgttccaggtcaggcaggtgcgcagcttgctgacggggaaggccgggtggaatttattgttgtccgcatcgtccttcatcagatcctgctccactgcccagcgggcggccttttgtgcgtcggtatcgccctcgtcgatgtcgctgtagagggcggtgcttacaggctcaggcttgccggcgtgctcccacagcagctcggccagctcgatgcggttggagggcatggggatgccgggcatattgatgacgcggtagatgccggtgccggcttcgtaagcgatgacgcccgcggcagcacccacgaccacagcagagagcgcgccctgaatgttgccggtatcgctgggtccaaccgggtcgggttcaggaatggggtcattctcgaaggttgcctttacttccacgttcttatccggcatggtaaaggtcaccttggtggggtcgttctcgtccggggtcgtcaggaaggtgtctgctttctgttcctcaccgcctaccagcaccgtccagctgatgaagtgctgtccatccggcacagtggctgtcaggtgcacggtttcacccaccggcacagcgctgccgctcggtacggacgcatcgttgtcgtcaatgttcgcagtcacatgatcgccgatgttcagcgtgggattcccctcaaagtttgcctttatttccacgttctcagccggcatggtaaatctcactttggcggggtcgttcgcgtccggggtcaggaagtcgtccgattgctcaacaccattcaccttcaccgtccagtcgataaagcgctcgttggcttccggctccctgcgcgttgctgttacagtatcgcccttagcagctttggtcttatccacagtgcagttttcagctttgatgttatacggaatatcgctataatacggttccgccttaacattataggcgggcatggtcagggtcgcagtggtttcggtgccattcttcagcagctt

SEQ ID NO: 1170 - DNA, 1698 bp, Unknown
  gut microbiota DNA sequence
ggtacaaatccacatggacgacattatcttatccacccagaacggcgaaccagtggcatccagccgggacgttgccaagcgctttggcaaggagcataagcacgttctggcggctattcgtcaacttttagtggccgaaaattcggctactaaattcttccacgagaccgagttcgagtatcgcggccagaaattcccggaatacttgatgaaccgtgacggcttttccctgctggccatgggctttacgggcaaggaagccgtgcagtggaagctcaagtacatcgaggccttcaaccagatggagaagcagctggccgcgcagcacaaagagcagcaggccgtgcaggacgccaacatccagagcgccatcgaccgggtgatcgaagcccggaagaaactggacgagaacaccgcttttctggatgagtgccgcaagaaccgcgaggacagcaaggccaagtatatgcaggtcaaggccctgtgcggtgagttcaaggccatttacggccagcattgcgacacggtgcgcaccatggagaacgtggtgcgcggctcccagagctacctcaccagcgccattgacagcctgaccatcgtcgccaaaggctacccgttctacgctgccctgatggacagcctgctggatgggctgcccgccaaaaagaaggaggaataaaatgttgaacacatcaactattcgcggcactttcaagcagatcccatactggaagctgcggggccggttccacagctgcgggttccgggatcaggagattgcaaatgcaatcggcatcggaactgacacaatgagcaagcggatgaacgggaagcagccttggacaagcactgagatcgcagaaatttgcaagacgcttgatatcccgcaggatgaaatcggggagctgttcttccctactgttgagaaaggagaatccgcatgaaaatcaaatccggcgtatggtactggctggcaatggcctgctttgtggtgggcctgctgtacagcatgggcctcgagggcacctgtcagaccggcggcaccatttcggacggtgcgttcattacggctatggtgctgatcctgctggcaatcttcttcatgctgcagggctttgcagccgaagctcgtgagaagcggccccgcaagattcaccagcagccccgcaacaccgtgaagagcggcaggaaggcgggctgacaccacccatgaataaaggaaagcactttacccgcgtttgtttggactgcggcaaggtgatggaaaatgttgctagcaacctgcgcttttgcgcttcctgccgcagagagcaccacaaccaatattgcagggattacagggcgcataatgaaaaacctgcccgcgtcatgtggtacaccgtctgggacgcaaagaccggcgatctactggcatccggcacgtccgagatgtgtgcccggcggctgggctacaagagcgcgaacagctttgcgtctgccgtcagccatgggctcagcggcagccatcgaacttacaagtacacatttgcgcgggaacgcatcgagcgcggcgaagtggacagcctgccgccggtacgcactatgcgaaaaaagcccgccggtgcgccaacaccgacgagctgcaagggatgatggaatttgaaagccccatcaccccgatgataccataaaatcggaggtttttacaagaaaatgaac

SEQ ID NO: 1171 - DNA, 13924 bp, Unknown
  gut microbiota DNA sequence
cttttggaattgtttttagtgtttttccaaacacttaaaaggttccttacaagtttttcgatattgttcaattttcaaggtcctgtagcgcctcagccttgcggctgaaagcttatttattttatcactttcgtgataagctgtcaagcacttttttgaattatttttgagtttcttgtcgaagctcatcgattcttcacgttaggacgttccttctgaagtgtttcattctgtcggatgtccgcctgacagtaatgtattttagcacagccttttgcaaaaagcaagcattttcttcatatttttcgcaaaaatccggcttttggctttttgcccagttttttccttttaatctggaaagtatgacatctaatcttctaaaagtcggcggcgcagctgcaccagtatcttgcgttcccgccgggagatctgcacctgtgtggtatgcagcacctttgcagtttcactctgggtcttgttgccataaaaccgcaggcggatcaattgcctgtcctgttccggcaaagcgtgaagcacctcttccagactgatacgttctgccaatgcttcttccggggattctactggaatatccatctgccggtcctcttcttcattttccggggtcaggctcatggcaggctgtgccgcctgaatggcaagtgtgatgttctctgcaggttcattcaattcttccgccagctgagaaagggtcggctccgtaccgcacactttcatgtgatgctcccgtgccgcctgtacgcgcatccccaattcttttaaggagcggctcaccttgactgtgccgctgtcccggaacagctttttgatctcgcctaaaattaccggcactgcataggtagaaaagcatacgccgcggctctcatcaaaattatcgcaggcttttacaagtcccatgcatccggcactgtacaggtcatcgtactctatgccccgcccgcggaagcgcccggcgcaggcgtgcaccagccccagattctgctcaatgaatgcgtcccgccgggtcttatccgataccatgctcctgcctgcctttcctgttatgtatcattctctctgggccagacgcttgatgagcagcacctttgtacccttgccgggctttgagatgaccttgaccttatccataaagctctgcatcaccgcaaagcccagcccggagcgttcctccgggtttccggtggtgaacagcggttccatggcctgcgggatatccgggatgccgatgcccttgtccgacaccgtgatgtgcacctcccgcccgggatagactgcaatgctcatggccaccggcccgatgtggtccgggtaggcatggacgatgcagttggtcaccgcctcagacactgccgttttgatatcggccagctgcggcacggtggggtcgtaccgggcaagaaaggctgccgctgcgccccgggcgtagctttcgttcacactgagggaatcgaactggatctttgttgtgttttccgctttcatggtttattcctccttctgtcctgcatctgtgcaggggatgcgcgccagctgcagcacctttgccagctgggacggtgtgtgctgcacccgcagtgccgtgcccagtgtgcgggcaatgcgctgccgccccaggatcagccctacaccagatgaatccataaatccgaccccgccaaaatccaggatcatggtctgtggggcacggctgaccagtgcatcatccagctggatgcgcaggctttgcgccgcatcgtgatcgatctcgcccgcaaggtaggcataaagcacatcgcccgccgggctgaagcttaccgttgccatggtttgtccatctcctttgccaaaaataaaaagatcccgtacacatggtttcagtgtacgggatctttcgtttattttttagggaagcgtgtcggctcagctgttcaccagcagttcggccgcttccagcgcggcagcttcaccgccgcagaccagcaggccgcggcgggtgttggcatgagccaactccactgcttcggcaatgctggtgcacatctcggcatcaaaatgatactttgccttttcggtcaaacggaccgtcatctcgtcatcgccgcctgccggggtgacaagatacaccttatcaaaggggttctcactcatgccgggcatggtggacttatcctttttctgctcttcaggggtcaggccggtctccagtgcggagaagaacgcttcggctccctcctcctctgccagaccgatgatggcgctcatatggcgtaccttggccatgttgagcacacgcagcaaggctgctgcctgctgcggggtgcggcaggcatccagaatgatgagtgggcgctgcgagatgacccggatgctgctgcggttctccaccgcagccagaccttccagaatggcatcgtcggtaatatcaaagcccttgcggcacagcgccagcgaaagctccacagccatggcagcgctgcccgccgcatgacggcccagaaaagccagcggcacggtatatccgccgtagtccaccttgctggcaaacttttctgcctccagaaaggtgatatcctccgggtccggcaccaccagctcacagccgcacttgcctgcggccacgatcagctcgctgagcacagacttgggctgctccggcgcggtgacgcagatgctttccttgcgcatgacacctgctgccagagccgcaaggcgctccaccgagcggctcacaccgtccgggccgaccgaggtgacggcgcacaccggcatgccgggcagcgcttccgcaaggcccgcatccggcagttccaccacggccagcgtgcagcccgctgcgccaaagcagttggccgcagcggccagctccgctgcatcctgcggcagggcttcggctgcggaaagggtatccgcagtcagagccagcaggccctcgtccaccggggcatcatcgatgcagatgcgctccgacagcgggcggcacccggcatggtacaggccggcatggatcccctgtgcgtgcaggatggccgccagcaggcgggccgtcacggtcttgcctgccgtgcctgccacgcccacgaactgcaccttctgcaccggcgcggtgaacgcggcgcgcagctgttcggtggaggcaaaaccgtccggcagggcggcaaaatactgatttgcctgttcgatggtcattggttactccttattacgatggttgaacaacaatctgcacagcgccatgagcaccagcgccgtaaggatgcccgccagaacaccggctgaatccagccacacatcggtgacctgactactgcgtccgggcgaaaagatctggatggtctcatcagtcagcgcagtgagcacgccgcccagcatgggcacgctgatgtgccagatatactgccgggtatacacccgcatacacagcatgagcagaaagccctccagcatatactcgcagaagtgtgccagcttgcgcacgatgtggtcggtcaggcgctgggcaagggccggatggcccagacggcgcagagccgcctgcagcagagtgagcacccggctgctggacacagtagacaccgaggcgatcttcatggaattggaaaagatgaacgcgatgcagctgatgagagcaagggtaaagatcacccgccctgcggtcacccacggcgaagtgcgctgtgcgctgctgttatattccccgctcaaatcagcccagagccttgatgctctgctcgatgttggccagcttatcctggctcttggcgtacttattgcggatatcctccaccagtgccgccggggcgcgctccacgaacttggggttgttcagctggttcgcgaacatggccatttccttttcggccttggccttttccttgttcaggcgggccagttccttgtcgcggtcgatcagctccatcatggggatgaagccgcgggcggcgtgggtggacacctgcaccatgccgtcggtgctgccctcgtacttctcggtaaaggtcacgtcggtggcaaaggcgaactttgccagatagacctgtgccttctggaagggtgcagcgtcggcggtctcgatgatcatgctggtctttttggcggggtggacattcatctcggtgcgcatggtacgcacggccttgatgtagtccatgaccttttcaaaggcttcctcttcgtcggcccagttgtgagcttcgtcaaaggtgggccagctctgggtcatgatggtctcggcagagccgggcagagcctgatacagctcctcggtgatgaagggcatgaagggatgcagcagcttgagggccttgtccagcacatacaccagcacacggcgggcggtgtcggcctgctcggcatcgccggagttcaggcggggctttgcgatctcgatgaaccagtcacagtagacatcccagataaagctgttgatcttggcggcggccagacccatctcgtagtggtcgaggttgtcggtcatggcaccggccacctgattcagcttggtgagcacccacttgtcgctcatgtccagcttgtcctcactgggcagacccggggtaaagtcctcgggcaggttcatcagcacaaagcgggtagcattccacagcttattggcaaagttgcgggcagcctccaccttcttttcgatataacgcatgtcgttgcccggggtggagccatccaccagcataaagcgcagggcatctgcaccgtactgggcaatgacttccagcgggtcgatgccgttgcccagactcttggacatcttgcggccctgactgtcgcgcacgataccgtggatgcagaccgtgctgaagggtgccttgccggtgtaggccagaccggagaagatcatgcggctgacccagaaaccgataatatcgtagccggtaacaagggtgttggtggggtagaaatacttgaggtcttcgctctcttcattgggccagcccagtgtgctgaagggccacagagcggaggagaaccaggtatccagcgtatcggggtcctgcgtgagctttgcgctgccgcacttagggcaggcgcagggagcggactttgccaccacggtctcgccgcagtcgtcgcagtaccatgccgggatctgatggccccaccacagctgacggctgatgcaccagtcgcgggtgttcttcatccagttcatatagttcttggtgaagcgctcgggcacgaacttgatctcgcccttttccacgctctcgatggcgggctttgccagcggctccatcttgacgaaccactgcttggacaccatgggctcgatggtggagtggcagcggtagcaggtgccaacctcgtgcttgaggggctcgatctccttcaggaagccgcctgcttccagatcggccagaatggccttgcgggcctcgagggtggtcatgccggcgtacttgccgcagtccagcacctccggctcattgatggcgttcttgccggcggcgaacagggcatcggcagcagccttgtcggcagcaccggtcatgtggccgtcgtaggtgaacacgcgcacgatgggcaggtcgtggcgcagacccacttcaaagtcgttggggtcgtgggcgggggtgatcttgaccacaccggtgcccttggtcatgtcggcgtgctcgtcgcacacaatggggatctccttgttcagcaggggcagcaccacatggcagccgtgcagatgggcatagcgggggtcatcgccgttgatggcaacagcggtatcgcccagcatggtctcgggacgggtagtagccagctccagcatctcgccggtctccttgaccgggtacagcaggtgccagaagctgccgtccttctcctcgtactccacctcggcatccgaaatggaggtgttgcagtgggggcaccagttaaccatgcggttgccgcggtagatcaggcccttgtcgtacaggcgcacgaacacttccttgacagcctcggagcagccctcgtccatagtaaagcgctcacgatcccagtcgcagctgctgcccagcttcttcagctggctgacgatgcggttgccgtacttggtcttccatgcccatgcacggtccagaaaaccatcgcggcccaccatctccttggtcaggccctcggcacgcatggcctccaccaccttggcttcggtagcgatggatgcatggtcggtaccgggcacccacagggcggcatagccctgcatccgcttggtgcggatgaggatgtcctgcatggtgttatccaccgcatggcccatgtgcaactgaccggtgacgttcggtggcggcatgacgatggtgtagggtttcttgtcggggtctgccttcgtgtggaagtagccgccgtccagccagaactggtagatgcggtcttccacctggctgggatcatactgttttgcaagttctttcatagggtcctcccagtaaaaaatgatgaagtgggacgaaaaaagccgtcccacggaacgttccatgggacggctgtaataaccgcggtaccacccaaattgcgcagagcatcctgcgccccttgatgccccggtaacgtgggacagctccgagagcggcttgctcttcagctcaccgctcctgctccaaagtgacagcacaccgcccgaccgtaccggattcacagcattctccggctctctgaacggcaaatgcagtgcacactcttcttcaacgcatttataaaaagaatatagcgttttttgtgcgatttgtcaattactttttcttcaaaagaatttatcccactgcatcttacggtttgggccttattcgtgaaagcgcgtttggagtggcccgcaggccacgacaaacgcaaatataaaaaatattttttccgctatcaatggccagagcaaacgcatcggccattttcaatccgcgatcccttcatccttcagccttgcaatgagccgctccatcagagcgatgcggttgaagggggtcatcaggtaaaagccgtctgcatagggcgctgcggcctgcgcggccttcaccgagacttccagccccagctcttcgccctgcgcacggtccagcccggcaaaacgctcgatgatctcagcatccacatggatgccgttgacctcgttctccataaagatggcgttgcgctggctcaccaccggcatgatgccggccagaattttcgccttttcgcccagcgtttcgcgggtctttttcaggttcaccaccgcctgtgcggagagcaccggctgggtaaggaagccgctcatgccattttgcagcttttcctgtgcgcggcgcaactccacatcaaagttgcgggcgttcaggttcagcgcaccgaacacggtgaggggcgagggcatctcccggccctcccctgccagcgagacgatgtactgcgccagcttgcgggagttgaactggtacacgtttttcacctcgtcccgctccgcggtggggatggggtcgccggtgatggccagcacctcccgcacgccctcggcgtacaggcccagcagcagggcctttgtggcgttcagattgcggtcgcggcaggtcatgtggggcagcacgttcagccctagctcccggtgcacccggcaggccaccagcgaagaatccatccgtgcccgggcaatgggacagtccgcaatggtcaaaaggtctgcaccagcagcctgcaggcggcgtgcaccgtccagatagccggtcaggtcggcatccttggggctgtccagctcaatggcgatcacctttttgcccgtgttcagcttgcgcagaaaggcatcgtctttttccacctccggctttgcggcagtggagactgctgctgccggggctgcaggcagtgtttccggcaaggcatccagtgccgcacgcagggccgcaatgtgggcaggcgtagtgccgcagcagccgcccagaatacgcacaccctcggcagcaaggcgggccagctcccgtgcaaaatattccggcctgccctgatactgcacccgggtgcgtgtgaccaccgggtagcccgcgttgggcatcactgcaagcggcagctttgtctcgccaagctgctgcaccagcgcacgcatggcaccgggagcagaaacgcagttcaggcccacagcatccactgcaccgcaggcagtcatgctgcgcacaagctctgcgcagtgacggccctcgcgggtgtagccgtccggcagcactgcaaaggacaccagcacaaaggcatccggcacggtctccttgattttttttgccgcttcggccacaccggcatcgctgctcagcgtctcaaacaaaaagttctttgcacccaatgcggcaaaccgctcggcaagggccgtatagatctgtgccgccgggagtgcctcggtgtccggggccgggccaagatcggcaaacacggcagcgctggtctttgcagcggcctgtgcagccagtttccagccttcgtccgccatggcctcccacatggggttctgcgctgctgccatgcgcggcaggccgaaggtgttggtcttgatagcatcggcacccgcttccagatacgcgcggtgcacggtcaaaatgccgtccgggtccagcaggtttgcctgctcacattcctgcccgggctttgccttataatatgtacccatgccgccatcgaacagcagcgggcgcttttttaaaatttcacgcacatccttcatgagggagttctcctttttcctacaaaaacgcttggctttcagtttaatgcacaaatgccgtccggtcaagcgttttttcacggcggcgcttgcaggaacgcaaaatttgtgctatcctatgcatactttataaagtggggaggtgtgtgccatgcgccatgccggaacgcaaacgcttgagaccgaccggcttttcctgcgccagcttctgcccgaggatgccgagcagatgtatacgaactgggcatccgacccggaagtgacccgctttctgcggtgggagccgcacaaaaacgcgctggagaccgtaggtctgctggcggcatgggccaccctttacccgaacccggactactaccagtgggccattgtggaaaaggcttccgggcaggtgtttggcagcatcagcatcttcaatgctctgctcggtgacccggcacagaaagcgctctggccgcaacaggactgcacagacggcatctgggaagcaggctactgcatcgggaagcactggtggaaccatggttttgcaaccgaagctttaaaagcagcagtaacctactggtttgagaatacagacggcggctggctcacctgctgccacgcaaaagagaaccctgccagcggccgggtgatggaaaaagcaggctttctctaccaccacgatgccattgatcataaatttgacggcacaccggtggagtgcagaagctatctgctgacaagagaacgatataacagaaaggacttaccttgagcgaactttacgatattttggtagaaacacccccgacgaaggtcattctgctggcgctggatcagggcctgtgggactgcgagcgcagccttgcagagctttccgccctgtgcgaagcaaaccacatggaagccgtggcacaggtgacccagaagcgccagaccccggagaccggcatcgtgctgggcagcggcaagctggaggaagcatcccttgccgccgaaacgctgggcgcggaatgcgccgtatttgacggtgaactgaccggcagccagatccgtaacatctccaatgcgctgggcggactggaagtgatcgaccgcaccatgctgatccttgaaattttccgcagccgcgccgtcacaaacgagggtaagctgcagaccgaactggcccttctgcgctaccgcctgccccgtctgcagggcatgggcgaagcgctcagccgtcagggcggcggtggcggcggcggtggtggtgcacgccgcggtgccggtgagaccaagctggaactggaccgccgccatgtgcatgcccgcatcgatgcgctggctgaaaagctggccgaaatggaaaagcgccggggcgagagccgcaaggcccgtgccaagaccgggatgccggtggtcagccttgtaggctataccaacgtgggcaaatccagcctgatgaatgctctgtgcggccccagcgtagcggaagcggacatgctgttcgccacactggaccccaccagccgcaagctgatactgcccagcggcatggcggtgctgctggtggacacggtgggctttgtgtcccgcctgccccacaatctggtggaagccttcaagtccacgctggaagaagcggcatggtcggacgtgatcatccgtgtggcagacgcaggcgatgagcatcgggaagagcagctggccgtcacggacgaggttctggacgggctggactgtgcggacatcccccgcctgaccgtctacaacaagtgcgataagccgggtgccatgagctttgacccggacatcctgctcaccagcgccaagaccggctacggtctggacaccctgctggcaaagctggacgaggtgctcagcgaccgggtgcacaccttaaaggtgctgctgccctacgataaactgggccttgccgcccccatgcgggagcgcggcagcgtgcaggtggaggaataccgggaggacgggttgtatctggagggcatcgtcaagacggaagacctgcactgctttgaagggtatctggtctgatcggcgtacacgatctaaatcgcctccgctgtgctccggctatcatcagcggaataatattttgagatagaacaagcccggaaagtctgcgaactttccgggcttgcattttcacgggcggggtcgcagccgaaagcagctgctctatgggtcgaatacattgtctgccactgcttttttcaaaaagaaaaaatccccaacaaacacaaaaacccgcctggcagcgggcttttgtgtatagaggggtgggaaagtatataaagtggtgaatctcaaattcaaagcggcagacgctttctgtgctgcgctgccttgcatgatgtattatacccctttttattttcttgtcaaacaaaattttccggttttgctttaaattaagtctttactttttcgataaaactttatataattaacgcaaagcaaagcaaaagcaaaattttttgacttttgtatgtttgcaccaacaataaaactttactttcaaaaaattttatacaatccaacatattttcaaaaaggagtattccccatggatgatctggatcgtaagattctctccctgctggcaaagaacgcacggatgccggtcaaggagatcgccgagcaggtatcgctgaccagtcctgctgtttccagccgcattcacaagctggaaacggatggcatcatcagcggctacaccgtcaccctgaaccgccccgctgaccggatgtatgtggatgccctcatcagcctttcggtagcaccttccaagcaggatgcctttctggagctgctgcaaagcagcaaggaagtgctgcagtgctaccacgtcacgggtgcatacaccttccttgtcaaggtgagctgcggcagcatgccccagctggagcacctgatcctgcagttccagaagctgggcaccaccagcacccagatcatcctttccacgccggtgaaccacggcgagctggatgcccttatgctgtaacgctgttcataaaatggttacgtttgcggtgcaattctgccggggtgttctttcgtattatggatagcaggcgcaaaacagcacacaatagcttcaaaaccgctgcgcccgctttcacacgaagattttcacacacgaaaggacttcatttatgaaacgtatcattgcttccctgcttgccggtctgtgcctgcttgctctggtgggctgctctgccggcagcaaggccgactctgccgccccgaaggactactcccagatcatccacgatgcccgcaccgacgaggacaacgaatacgatatgatctttaccaaaggtgaggacggcaaattcaccgccatcgacggctacagcgccgagtatgaggccgaccagctgaatgacgagctgaaagacatcgtgttccccctgctgggccttgaggacggcagctacgagagctttgctgcctctgtttcctccatgatggtgcgcagctacgccgttgccatcgtaaagccagccgagggcaagaccgatgccgtgaaagccgcactggaagcctatgtgcagagtgagcagcagtccatggagcactaccttgaggatcagtatctggtcgccaaggcggctaccgtcaccgtagctcccaccggtgaggtggttctggtgtgcgccgaggatcacgacaccattctttccaacatcgagaaagcccttgccgcataatttttgccctgccgaagccgcatcctgccgggatgcggtttctttttgtgtgcagatatgctatactgttcccgtgaacttgcactgaaatacaggagtatttatgtataaagcgactatcgtgatcccgaatatcaacggcaagggctggctgaaggattctatcgagtcggtctatgcccagaccgaacagaacttccggctcattgtggtggacaacggttccaccgacgaaagccttgagcaggcccgcagctattgcagccgtgaaaatttcaccctcatcgaaaacggcaccaataccggcttttcccatgcagtgaatcagggcattgcgctggcggacagtgaatatgtggtgctgttcaacaacgatgcctttgccgaaccccagtggctggaagagctgatccgcaccgctgagaccgacccgaaaatctttgcagtgcagagcctgatgatccgacacttcgaccgggagctggccgacgacgcgggcgattacgtcacctggatgggctttgcctgcaagaccggcgatggccgccgcgcaagccgctacacccggcaaaagcgcatcttctcggcctgcggcggtgcggcgctctaccgcaagagcattctggacgagatcggcaattttgacgagaacttctttgcctactttgaggatgtggacctgagctggcgcgccaacaatgcaggctataaaaacctgctctgccccaccgccaagtgctaccacatctgcggtgccagcaccggcgcggtgaagtacaacgccttcaaaagccagcagagcggtcgcaacagcatcctgctgccgctcaagaacgaaccgctgctgatgctgattttaaacttcatcccgctggccgtgggctacctgctcaagtgctacaagttccacaaacagggctttggcgaggcatgggacaaggggatgtacgaagcctttgccctgctgaaaagcggcaggctgggcaagcggcctttccgcctgaaggatctgcccaactacatcctgatggagctgtggatgatctggaacatggtgccgtacctgtggtaccggctggtgatcgtaaaatttgacctcaaataaaaaataccggatacgaagcatctgccttgtatccggtatttttgttttgtattatgccgccgggctggctgtgctttcgtccgcctgtgcctcggtgctgtcggcgggctgttcctccgcctgtgtatccacgccctcgtctgcagcggtgctgtctgcctcagccgaagcagaatccgaaccggctgctgcaagaatggcatcctgcacatcgctttctgccatgggttccggcacattcgcggccggtgtgctttccgtgctctcggccttggtctcgctctcggtcaggccggtgagataccagctgccgctctggcgctcgaacagataatccatgtacttggtgggtgtatccgaagaaacattgatgatgctgtcgtccgtgctggtggtggggatatagcccacggtcacatgcagcttgccgctgcgcttgaacagcttggt

SEQ ID NO: 1172 - DNA, 1183 bp, Unknown
  gut microbiota DNA sequence
aaggctgccaatggcaacatggtcgttgttgacaagttcgcttgcgatgagtacaagaccaagaccgtggttgcaatgctgaacgctgttggtgccggcaagaagaacctgctggtcaacgagactgtcgatgcaaagttcgtcaagagcgctggcaacattgccggtgtgaagaccacctttgcaggcagcgtgaacacctacgatgtgctgaatgccgacaagctgatcatcagcgtcgacgcagctaagaagctcgaggaggtgcttggctaatgaaaaccgcacatgatatcatcctgaagccggtcattaccgagaactccatggctggcatcgctgacaagaagtacaccttcaaggtcgctaccgatgctaccaaggtcgagatcgctcaggccgttgaggtcctgttcccgggcgctaaggtcgcaaaggtcaacaccatctctgtgcgcggccgcttccgccgccagggcatgcacgccggttacaccgctgcatccaagaaggctatcgtgaccctgaccaaggactccaaggagatcgagttcttcaacagcatggtctaagccgaacccgccgagggttcctctatggggatatgaccccgataataattcataagataaacaaaggagaatagcactatggctatcaagaagtatggccccactactccgggccgccgcggcatgaccgtcacggattacagcgtcctgtctaaggtcgctcccgagcgcagcctgctggagcccatgaagaagcacagcggccgcaacaacaccggtcgcatcaccgtccgtcatcagggcggcggcaaccgcaccaagtatcgtgtcatcgacttcaagcgtcagaagaccgatatgcccgctaccgtcaagactctcgagtacgatccgaaccgcagcgcattcatcgctctggtcgagtacaccgatggcgtcaagagctacatcattgctcccgatggcctgaaggtgggcgatgtggtcatcagcagcaagtctgccgacatcaagcccggcaactgcctgcccttcgagaacatccccgtcggtaccatcatccacaacatcgagctgtatcccggccgcggcgctcagctggttcgttccgctggcaacatggctcagctgatggctaaggagaatggctacgctctggttcgtctgccctc

SEQ ID NO: 1173 - DNA, 591 bp, Unknown
  gut microbiota DNA sequence
cacatcgagggtgcgggacacgccggagacgctctgcccctccacggtgtcgcccacctgattgacaccctgcgcggttttcaagtccacgtcgatgccgttcagcgggtcgagaaagtaaggggcatcgtagtcccagcccagatgcaggacggcaccggcatctgtcacgaccttgagatggtctttaaaaagcacagtgtcctcctttcatcgtttgcgggccttggccttgtcggcttcccagcgggcttcccgctgctgtgcggcggcggtgtcgtggccgttgtaaaagttctgggtgatgttggtatcaccctcgcggtggtagctgttggcagcagacaccacctgtgcagtgccggaagcggccacggtggagccgaggcgcatgttgtcggaaagcaccagcgcccccgcctgccggatcatgtcggcaagggcagagttggtcttttctagcgccttggtgttggcgttgatggcatcttccagactgccggtgccggtggtgatatccacgctgcccatgctgccagagccagacgaaccgccgccagaggaaccgccgccgtggcttacgttcttttt

SEQ ID NO: 1174 - DNA, 9371 bp, Unknown
  gut microbiota DNA sequence
gatcacccccgcgtatgcggggaaaagtagccatgttctgttgcgctgtaggtgcacataggatcacccccgcgtatgcggggaaaagactaaaaagatcccgtagcaccgtgtctcctgttgctattgtaccgctgtttccttcagtttgcaataaacttgttgtatcagacggcagtccggcagggcgcgatgctccactttttctgccagctgaaaatgctgtgccagcgtcaccagcttataatttgcggtccttgtaaggtttcggcgggcaagttgtgcaaggtcgatctggcggttggtcggtgccggaaagccatatcgtttgcaggtcatgcgcagaaactccagatcaaaggcaatattatgtcccaccagtgggtctttgccaataaacaacaaaaagctattcagcgcttcccgtggttctgttccctgctgcaattccgcagcgctgagtcctgtcagggctgtgatctctgccggaacgttttcttccacgcggaccagcatggtcagctcctccaccggtacaccgtcccggacccgcagcgctccatattcgatgatggaatcgcacgcggctgctcacattgcccacataaacgcccgtgttgatttcgcacaaccatttggacagatccccgcgcagttttggcgggcagttcgtcatggtgagaactacgatgtttcatcaccctcttcttcaaaataattgatgccgttggccacagtgcccactttgttgtcccacagataaacagcttccggctcctgttcccgctcatccgcattcaggagcagataccggatatcgtgcaccatgcgctccagaatatgatgctctaccatggcatcccgcacccggcggcgcactacggccggcaggtcgtccggagcctgtgccgccacttcaaaggcgatgggaatggtcacctcggccttgtacaggtcggcaatatcgtacacaaaggagcactcgtgccccacatgaacaaagccaagacccggggcgcagcccaatgccacgatcaccgcgtgcgccagaccgtacaaacaggcgtgaccggcagaaagcgcctgattgacggcatctcccgatgcaaaatcctccgggcggtacagtcggccgctccacggaacaccggtatccttggaagctttgcggtatacctgccgcacacggctgccctcgcgtccccgcagctgctgcatcgtcagccgggagatatcttcgtccgggaaacggagctgatacatcttgcgtaccacatccaggtgcttgcgggtgttgctgacaagctctgcctgccgcagcaacagctgcgagtgggtggtcaggggacggccatgggcgtaataccgcacaccgtgctcacctacccagacagcacccacgcccgcgtcacccataagttccatggcacggtgggtcacccgtgtacccggccccagcagcagcaccgagatgcccgccgccgggatctgaacgatccctttttcgtctgtaacggtgattgcgccgtcctgtcggccaagggtgcagtgttccagatacagaaaggtcatccggtctttcacctgcggcagcgcctgcaggtccggccggatcatgcccggcatctcgtccatctcagtttcctccgcgcatgacggtcatcagcccaaggccgtaggccttgccgcgtcccatgccctgacacagcagtgcccggaactgctctgcatcggtcacctgcaaaacaccctcgtaggtcactgccagcagggtcacaggccggatgccatgcttggcaaaatgctgccactgcacccgggttacggtaaattcctcctcccgcagggcaaagccgtgctttgcggcgcgctccaacagccactgcttctggtactgtgtcgtgcaatgtgcggctacagttccccgcgctgcggggttttgggggtctttgcagcttttggtggggtttgcggtcagccgaaactgccagcagctgcccggctccacccgctgcaaaagcgggtcgtagctgcgtgtctccgcagccgctccggtgccaaactgctccaccacgccggacagctctggcgcatcttcgctgagcagcagcagatacaaccgctctcccagacgatccaacctccacagtctgcggcggcgctcccctgcaaaagcgctttccactgcgccatgcagtttttgcggtgccgacagcgcagccatggtgctgcggcgggtgggatctagttctacccgtgataaatacattctctcgccccctttttacaattcccggaacggatcgtgctccgtagtctccgggctgtccggcactttctgccaaagctcccgtaccgagcggtagccgtactgccgatgatgcgggtcaaagctcaccggcacatcccgctgcggagccgtgcccggcttcagcgggtcggcgtccaacaagatccggctctgccgtcccggacacaggggcggttccgcttgcagcacctcctgcaagctgcccgagcgtactcccagacagagcggcagggtaggcgggcagcagcggcggcccagatacagcggaaaggccgggtgcagcagcgcctgctgcagctgctgcaaaagtgcagtgtcggtgctttcgatcccggccagaaacacggcgtcctgcaaataatggcggtaggtcacataagaggtcttttcatcctgcgtctttgccgtgtggtagtccaccagcagctgcccttcccgctccacgcggacgccgaaccgcagcccggtcaatcggagcagtgcttcgcgctcgtcccgccgcagcccaagagctgccgccaaaaggccgatcacgccgctcttggtgggttcacggcccgtcttgcgggtctcaaatttagagtctgcgccccacgcctgcaaaggcgctgccagccgaagcaacagcgttgccattaccccacctcatttccggcaagtgcatcccggacagccttttccagtgcgtccagcatagcctttgcagtctgcgccggagccagttcctccagcccgctgcccacagtaaagctttgcgccggggcctcggcaaagctgctgtacatctgctgcgcatactgtgccagtgccaccttggaaggcgcggcatacccctgcgcactgcggggcacggcacgctcgaatgcgccgcacaggttcaccggctgatcctcccgcagggtcacatataccgcatccggcagagtgcggtttgcaaaggtgttctgcttgccggtgggcatggagaagaggaacgcctcaccaaaggcccgcaccgtttccgcggcctgcgctgcacccagctgcccggccagctccatcacgttcactgtggcatagcggtacagggtggaggagttgtactccaccgtgcccagatggcctgcaccggcgttgtcctctgcctgacagtcatccacggcggtaaagtaatcgtactcgttctgcacagcatgagtggagatgctgtgcgccacctgcgcagcggcgtcatagttcagagaagggtcatctgccaccatgcggccaaacagcgccatgtccatcgagggcgccgctttcagggcatcccgatactgctttttatccgcagagccctccacagccagctctgccaatgcctttgcctgcgcagtgctcatgaagaacagcgccttggtgcccttatcgtcgctcttgatgcccgcattctccagcgctttttttgccagcttgtccgcatccagttccggggccagtgcaaggatctgcgccttcaccagttctgcggcctttttagtgcgcttgcccacgtccagccgggcgttctccgcaaaggcagcgcgcatggcgtgcttccacgcctgtgaggaaactctggcgcggagcacaccgccgtacactgccgtttttgggctgccggtatcatcccggttgatgcagctgggcgggacggtctgcaaaatgtggaaatcaacatacaggcgcttattcatgatcaattctccttttctttctcatccggtgcaggcttcgggtcgcggtacaggtcctgtccccaccgtagacgaacattggcgggggtctgcgcatatcgcgggtcggtgcattgcaattcatacaagtctgccgcaagctgcggatagtccagcgggatgccgccatcctttgccgcgctcaacagctggatcatgccccgcagatggtggctgatctcggtgatttcttctgcggtggccagcgcgttgaaccgccggagcacgctagcctcggtccagtcctgtccggcactgttccgctctgccagctgccgcaccgcacgccccagtgtgttgccagggcagttcataaggcggtcgtttccctgctgatgcatagcatacagggtcagggcgaggtagaccgcccactctgccgccgagggagcactgcggccctgaaagctttccggcatttccagcaaaaagcttccccacagttccggcagttcgccgggtgcgtggccgatgccccgacgcagctttgccagctctgcccgccgctggttgtccggcagagactgaagcctgtgcagctgctgcgccgcatatagtttgacgtcctgtgttttcatacaattccccctttatggttctgttttgggatagatctcccaaagctttgcgcgaaaacagttataggcctttggcgaggtatacaggatggcgcgctcggtctttttatccttatccaccacaatgcggtgtcccttcagggcggcatttccggcctccatcaccatctgttttcccagtttttccgcgatatttcgcgcctgcgcctgccagcgcagcgctgcctcatccgggtcgtcctgctccgggtcgatcgcctgcagccactgccgaaaaggctgatccactgcaaagtagaattgtgcacgaaccgcgccgcctgcattttcattccggtcaccggcggcaattgccagttcctgcgcaaaatgtccgaccagcgccgctgtctgttcacagcgctcgatttctctgacgatccgactctgccatggacgccctatctcatccagaatccctgcctgaaaggtcaggctgtcgctgaaagaatcatttacaaagaagtccttatcgccatattggacaccggagatgcggaaatgtacctttctgcggggatccagaagtttcaatctcttttcctgcaacttttcgatccagcatacaacgcccgggcgatgcccgctgtcctgacaaaagaccgccgggaactcccgccagaattgtttagccgggtcatgacgacagggcacaaacaccaccggttcatttttcttgattggcatcgtgcgccagatggtcatctgttcggcaaagacgttttctctggggaagaaatctcctcccagcagacagaacccatccacattctcccctgtcctgtgcagcaacagccttctggattgcagggtgagcagctgtgccgggttgtccgggcagcaaatttctgtccgttccgcgctctttggtgcttccaattcccaacagggcttgctttcgccccagcattcccggctgtcgcgcagcagcgtcaggttcagcatcagggtctcgtacagattatcgccctgtgcctgaataaaaccgattttgcccagccacccggctcctactgacggaagtccttttccttttggcttcgcggaggtgtcatcatagccgttcacgcacagcagccaccgcgccgcctgcggatagctcagctgctccttgctctgccccgcatacagtggaaagagccggagtttattgctgctttccgacatttcaccgttgagtttggccgcgccgtattccgtgccgatctttgcctgcggcacctgccagaaggggtgtgtcgggtggaacagccagaagcggtccttccactgctccaggtagtcccggacaggctctgccgggaaatgcccaagctgccacagctcgctccagcgctccagtgcatcatcgctctgtgccagcggttggggttttccctttgcatccacccgggagaacacggtgaacagcaccgccagcaacagccgcagcacggcggcgttctgggtgggcatctcgcccgcaaggtccacataatcctgcgcatggagcagtgcgtccgtcaaagaaacttcctgcaccgtattgtctggccgacgaacccggacccacggctccgtcaacaggttaaattcgatttccttcatccgtttcctccttttggtaatataagccgttttcacggtcataacaaagttccatgcccgcaagccgggcagtcaggttttcatccagcagcaggatcagttctccgtgcagcagcggcgacagctgccacgccgcaaggcggctgcggttatccgcttccaactcccggatgaccctatccaccttccacgctttgccgaacaccgccgggagccgcagcttctgccgggcaatcttcagtgccgtttccggcgggggcgggctgtcagcagctacggcgctgccaccctcctgccacggcagaaagtggatgctgccgtctgcccgacactgcattacaagcacctctaccgaggggtcgccgtcccgcactgctgcccgcgccgccgggtcggagcgggcaccctcgttctgcatccagtcgtccagcgtattcaactgcgccagccggtgcgtttccggctgcggcacaaggtacgcctcggcgcgcgctttctttttctcctgcgtctgctcatatacgcagcgcatttcctccccctgcgctccaccgggagcttcccgctcccagccgtagacctgctgcaccagcggagagatttcctccggcagccggatgctccggggcagaaacttccgggtgcgccagagcaaccactgtccatataccgcctcgctgcccgcatcaaaggcatcttccccggtgtccagcaccgcgcagcaggcctgctgcaatggggcggggcggctgcggcggtgacggtgcaaccgtccgatgcgctgcaacagcagatccatggggcaaagctctgtaacaagaacatccagatcaatgtccagcgactgctccatcacctgcgtgcccaccacgatcaggtcgttccggcgctccggtgcagagcccttgccaatgcgtgccatcagctggttttcccgcgctgcgcggtccggcatcaggaactgcgcatggaacagctgcacctctttgtccggcaggctttcccgcagcagctgcgcgatcttctgcgcttttttgaccgtgttgacgatcactcccgcgcagccgccctctgccagcttccggcgcagcagcgcgggcagctccggctctgtgagcgtggtcagctgcaccgttttaccgggtgcgtctggtgggatggccgtctgctttacctctgcgccgtccgtccatgtcagcagcggatagccgcagctggttttccatggggcgtccgggacagcctttttctgctggtaagcctcgaccagttccgcgcgccgccgggcaggcagagtggctgacagcaggatgaccggcaccttgtaccagcccagccattccagtgcgcggtccagatagcagttcatgtaggtatcgtaggcgtggcactcgtcaataatgaccaccttgcccgcaagccccagatgccgcagcataacgtgcttctgggcaagtgccgccagcagcaactgatccactgtgccaatcacaaagtttgccagcagtgcctgcttgtttccccgaaaccactggtgtacctgcacctgatgcgcttcctgcgcgtcctcttccaactgcaccccgcgcccctgcagccgcagatagcactcgttcagttctgccatgccgtgtgccagctttatagcctgcggcagcgtctcctcagactgtgtgtctgcccagccaagcagccggggaaagatgccgtttgccgtggcctgtgtgggcagcccgaaaaagacaccacccagcccgaaccggctggccatgacctccgcagcggccagcgccgcctcggttttacccacgcccatctgtgcttccaaaatcaggatgcccggttctgctgcggtatccacagcctccagaacagccctctgcaccgcattgggcgcaaagccgaaccgcaccgcaaactcctgcgggtctgcgatgcccggctgtgcctcccacgggaagggcagcgccagcttttcccaagccctgtccacccgcgccgggtaatcctccatgctgcccaactcctctaccgggatcaggggaaagtattccgtattgctggcgatccagtctgccatgatcagaagtccggtcagaagcacttcctcctgcggattcagatcatccaactccgctgtgtcgtcaaagccgcagtcctgcaaaacagtcatgagcagttctgtccagaagtcctcccagacctttttctgtcccttggggtagtagttgctctcccaaccctctaactgatcatcgaccgccgcgcagctctgtggcttgccgtggtgcgcccccacaatggaggcgatcccgccggggcagtcatcccacagcaggactgcctcgcccgcccgggcatgcggcgactcccggcggttctgttcaggacagtccagcggcgtcaacgtttccagccgctgcctcgcctccggcagggtgcgcaggatatttgcctgaaaggctaccgtagccttgcctatatcatggattccacccaaaaaccgggcatgcgcgagcaacgcttcctcgcgctcaaagcccatggctcgttttacactttcggggagccactgccggactagccgctccatgatgcccgccgtatcccacagatgcatccagagcggcagccacaggctggtattttccgggtccgttttaccggccaaaaaccttgttttattcaacgtccttcgcatttttgctccttttccggtgtgtgccttccatgtaccgagcataacagataatgtgtactataatccgtactttttgtattttatctccgcaaatgaaaaaagcggcacaccgggtcgtgcctcatcaaaacgaaagtgtcctcgcaaggtaaagaaacatgctatttatagcccggttccgttttctgtttcaaagatgcgcttctgcccttctgctgtcaatgactctgcgccaattcatcaaagctacaaaaaaacgatttcttttttgtataaaaaaccgccccggcttccattacggaagccggggcggttcgtttgctttatttgtgctttttcaagcccttacgccattacttgcggggattcttgatcgcagcctgaacgggtgccaaaattacagagcgttcgcacgtactcac

SEQ ID NO: 1175 - DNA, 1588 bp, Unknown
  gut microbiota DNA sequence
cagaccgaccatgacaacgttatgatttatatttccggcggcacgacgctggaaagtgagaacgtcttcctcaatggcaataacaactgcgagaacgtcgtttacaccgaaggcacagacagcaaaatcagcctgcaaaactgtaccgtgggttacggaaacgacaacggtattctgctgaaccccggccaggccgagatcaatggctcgctggtgttcaacaatggcgaatatgcgggcgacggaaccgcgctgtatcgctttgagaacggttcggctgttctttccggcaatgtgcgctcacagggccttggcggcggtgggctgacctgtgccgccggttcccatgtgcaggcagcggccagctcttttgtgtggaacaaaacctccggctttgacatccccgaagccgacagctccgccagcgcggaaaactgcttcttctggggcaacggctggacgggcgcaaatgtgcgctcgaacagcgttatgaccctgaccggctgccaggtggagaacaacggctacaacaccgccaatctcctgacgacagacggggacaccgcttccaacaccttccccggcttggacgtacaaggcgcaggcacgatgaaaatcagccattgcggtattttgaacaatgcgggcaacggcgtgcagtgctaccctgacagcaagacttatttgtacggctggaaccatatctacgcaaacgggatcaacggcgtttacacccaggggcaactgtggatcggcaaggccgcggattccgcgaacggcgacgaaacgaccgccgtgtacaataacgccgcggacggcgtccacacggacggcggcactgtgcagggcgatcacctgaactgctacggcaacagctattccggcatcagcgcgatgaaaaatgaatcgctggaccagacggcaacgcttgaactgaccgcgccggtcacatcgcacgaaaacggccacagcgggctgtacctgaaaggtggaaccaaggcaacggtatccggcggcagttttaccgaaaacggcgcggaacacgcggaaatctacgcgggaagcggaacagacacgacactcaaggacggcgtcgaagtgaaaacttccgccgacaaaaccctgcaaaattccggcctgcgcatcgcggtgatgctggacggcgtcgatgtgttccgcaccgattcaacattgcagattcccgccggtgacagcatccatctgaaacaggatgcggacgttgtcacctggaacggcggaacacgggaacagcttggcgtgacctgcgagaacccgtggctggggcggacgatcatccagtcggacacggcggtgctggattgggaaaatagccgggaatccaacaacgcccagacggcggagcagcacccggagaacggaattgacaccaacgtatactataccgctattgaggacgcctatttcggcatgaaaaactccgacgcgcatgatgtttggttgtcctacaaatcgaattatcgctattattacaatcacgacgctgcggcgggcaccgcgctgaccgtggacggcatcgacagcggggaactgctgggcacagtgcgca

SEQ ID NO: 1176 - DNA, 10483 bp, Unknown
  gut microbiota DNA sequence
ccccccccctcgggggagctggcatcgagcaaagcgagatgactgagagggttaaaactttgcttttccgctccacagtgagcgaaaaaataaaatgtttacaatcagccactgaataaacacaaaacaaaaaaggagaacaactaccatggctatcaagaaatactacgattccgactgcaacctcggcgtgctggacggcaagaccgtcgctgtcatcggcttcggcagccagggccacgcccattccgagaacctggccgagagcggcgtgaacgtcgtcgtcggcctgcgcaagggctctgctcactgggagaaggcttctgagttcgcagcaactcacgagaacttcaaggtcatggaagtggaagaagctgccaaggccggcgacgttgtcatgatgctggtgcccgacgagctgtgcgccgacatctataacaagcaggtggctccctacatgaccgagggcaaggcactggcctttgcacacggtttcaacatccacttcaagaccatcaccgctcccaagaatgtggacgttatcatgatcgctcccaagggccccggccacatcgtccgccgcctgtacaccgagggtgagggctgcccctctctgatctgcgtggagcaggactacaccggcaaggctaaggatattgctctggcatacgcttccggcatcggcgctggccgtgcaggcatcctgcagaccaccttcaaggaggagaccgagaccgacctgttcggcgagcaggcagtgctgtgcggcggcgtttccgagctgatccacgccggtttcgatacgctggtggaagctggctacgagcccgagatggcatactttgagacctgccacgagatgaagctgatcgttgacctgatcaacgagggcggcttctccaagatgcgttactccatctccaacaccgctgagtacggcgactaccgcaccggtaagcgcctgatcaccgccgagacccgcaaggagatgaagaaggttctgaccgagatccaggacggcaccttcgcttccgagttcctgaccgagatgagccccaacggcggccgcaaggtgcacttcctggcaaagcgccgcatggaagcagagctgcccatcgagaaggtcggcgcagagctgcgcagcatgatgagctggctgaagaagtaagaggaaaaccctctcaggccgcctttcggcggccagctcccccgaaagggggagcttttgttgaaagtgagaaccttatagatcctccgcaaaaacctctccccttcgggagaggtggcacggcgcagccgtgacggagagggtttttgtcagaaaagaggatttgaaatgagaagcgacaatgtgaccaagggttcggagcgcgccccgaaccgaagcctgttctacgcactgggctacaccaaggaagagctggagcgcccgctgatcggcgtggtgagcgcctacagcgagatcgtgcccggccatatgaatctggacaagatcgccgatgccgtaaaggccggcgttgagatggcaggcggcacccccatcctgatccctgccattggcgtgtgcgacggcatcgccatgggccatgtgggcatgaagtacagccttgcatcccgtgagctgatctgcgacagcgtggagaccatgctcatggcccaccagctggacggtctggtgctggtgcccaactgcgataagatcgtgcccggcatggtcatggccgccgtccgtatggacgtgcccgccgtggtctgctccggcggccccatgctggccggtacctacggcggcgaagaggtcagcctttccaagatgttcgaggctgtgggtgcctacaaggccggtatgatcaccgaggatcagctggaagactgcacctgcaactgctgccccagctgcggcagttgctccggcatgtacaccgccaacagcatgaactgcctgtgcgaggccatcggcatcgcactgcccggcaacggcaccattcctgccgtctactccaagcgtctgcagctggcaaagcacgccggtatggccattatggatatggttaagaagggtatcaccgcacgccagatcatcaacgagcgctccatccgcaacgctcttacctgcgatatggctctgggctgctccaccaacaccgtgctgcacctgctggccatcgcttatgaggctggtgtgcccatcgacctgaagctgttcaatgagatcagcgccaagaccccgaacctgtgccatctggcaccggccggccccacccacatgccggacctgtacgccgcaggcggcatccccgccgtgcaggcagagctggccaagaagggcctgctggatctggatgtgcccaccgttaccggcaagacgctgggcgagaacatcaagggcgcacacatcctgaacgacaaggccatccgtcccatcgacaacccctactcccagaccggcggtctgcagatcctgtggggcaacattgcaccggacggctgtgtggtcaagcgcagcgccgtggcccccgagatgcagcagcattccggcccggcccgcgtgttcaacagcgaggacgaggccattgccgccatctatgcgggcaagatcgtcccgggcgatgtagtggtcatccgctacgaaggccccaagggcggccccggtatgcgtgagatgctgaaccccacctccgcgctggccggcatgaagctggacaagaccgtggccctcatcaccgacggccgcttctccggcgcaagccgcggcgcagccatcggccatgtcagcccggaggctgcttccggcggtcccatcggcctgatcgaggagggagataccatcaacattgatatccccaatgcctccatcacgctggaggtcagcgacgaagtcctggcccagcgcaaggcaaagtatgttgcacccgaacccaacatcaagaccggctggctcagccgctacgcacgcatggtcaccagtgcaaatctgggcgctgtgctgaagtgatttgatgatctaagcaaaaacagagggacgaccctgcgtcgttcctctgttttttgtttcctgaaggctatctgtaaaaaatcggcaaagcccgcaggctctgccgatctgtgatccgaattattctccgtggccgaacagcaccgcacggaaggtgcggaagatgatacgccagtctaccagaaagctgcgttccttgacgtacttcacatccagcgccatccactcctcaaagctcagctggttgcggtgcggggcgatctgccagtagcagctcagacccggtgtcacgtacagccgctgccattcatagggcgtgtactgggctacctcgcggggcagagccgggcgcgggcccacaatgctcatatcgcccttgaggatgttcaccagctgaggcagctcgtcgatgctggttttgcggatgaaatggcccacccgggtgatgcgggggtcgtccttcatcttgaacaccgggccgtccatctcgttgtcctgcagcagatcgttgagcttgctctcggcgttcgggcacatggaacggaacttgtacagccggaacagcttgccgttgcggcccacccgcagctggctgaacaccgggcttgcacccgggctgtcgatccagactgcaatgcaggtaaggagcatcagcggggaaagcgcgatcagcgccagcagagaaaagaagatatcctgtgcgcggcgcacacaccagtaggcgcggtgctcgtgaagattcgtcttacgatcgatcgtaatcggcttgtggatgccaagctctgcgccgggctcctccatccaaccggtctgcagccagtattccgcttctggcgcagtggttacagttgtcatacttagattcactccattgatcctataacatgaaaacaggagagccccaaactctcccacacagttattgcacctattgcacaataaaactgcaaacttctgtacaattttaccatgtgtacaggcggattgcaagagagttgaaccattttttgtctggtatatcagaaaaaaccggatcacagaggtggaaaacgatgaacagacagaccggtgcgccagagccttacccgaacaggctctttgtattgtgcatatatacggaaaggactaatccgacgcagatatacagcatcagcaccgagctgccgcccgcagaataaaagggcagggtgacgccgatgaccggcagcacccgcagattcatgcccacattcacggcgatctgagccatcagggcgccgccgatgccggcgcagatatagctgcccagcaggtcctcgctgcgcgcaccggtggcaaaggtcttgatcaccagtgccagcagtgcccccagcacgatgcacaggcccacaaagccaatgacattgcccatccagctgagaataaagtcgttgtgggcattgggcacgctgtagtaccggccgctgaacaggccgttgccgaagatgccgccggagccgatggcgatctcgccgcgctgctgctggtagatgatgtttttccaagtggcttcgttgggtgcccagccggtggaattctccgggtcgataacggccagaatgcggtaccactggtagcccttgccgatcttatcgctgaaaaaggcaaacgccgccgccacggccacagctgctgccgaaatggcaccgatgatatacttccagctcaggcccgctgcaaacatcatgcagcagccgatgatggcgtagatgatggcggtgccgtcgtcgccctgaatgtggatgataaggatgggcacggccagatgcagcagaagctttaccagctcctttggctcgttgatgcggctgcgcacattgttcaggtgcatggcaaaggtaaggataaagctgatctttgccagctccgtgggctggaaggtaaagccgcccagcttgtaccaggagtagttgtcggtgtcaccggcgttgaagccgatggtcagcgggccgatggccacattgcggatgaacagcgtgggcagcaccagaccccatgtcagggctacatgcaccggccacaccttgacaaggctgcggtagtcgatgcaggagagcagcagcgcgatcacgatgccaagcaccgccgcaccggcctgcaccagcgcgcggcggtaatcgccgatgccggtaatggcaccagtgatctcgtccgtggcaaaaccgttgccctgctttgcggcccaggaggcaagagccaccaccgccatggtgctgctgaagatgcacagcagcagatagatcttatccgttcgtttaaaatattgtcgaatgctttccaagaaagcaccacctttcgttcccagatgcacaccgggttttgccgctgcagcgggcaataccaacccagtttatcctattatacacagcctgcacaccgtttgcaatccaccgggtgtgacagctttgcaaaatccgcacgaatgcttgacaaagcagaccgcaccatctacaatgaaggtgcagcagaaagctcctttgcagagcgcctgccgcgcaaagaaaatggcaggaagatgcctgctggaaaagggcggcgtgccgcattgggcggcagatatgcccggaggaaatgggaatggaacacgatatgctccgccgttttgggtgtgcactgtgcgctttggctttcgcgctcacagcgctgcccacagcggcttttgcacagcagccggaagaacaggcggctgtgcagcagagcctttcggccacagatgtgcgcgagatgcagcaggcagatgctgctgtgaccgcactgaccggaggcagcgactatgcacagatgaccgaggacgagcgcacagatgctgctttgcagcagctggatgcgctgaccgcacagggccttgtgaagcagggatctgtctacaccgatgccgaaaacggcatgatcagctttacctacagctgcggcgcgctgggcggcatcttgcttaccgacccggaggaggagaacaccgcagccctgccggagctggacgagagccagctgcaggagctggcagagaacaagcgggtgggcacggcggcgatctattatgcgtttgacaacacgatcaacagcacccgctacccgtattatgcctacatgcagacctattgggattcggtgggcctgcagacggatctggataccaccgttaccgtatccgacctgctcaggatgggccgttacgacctgtgcatcctgagcacccacggcgcgtactacacctatgaatacggctggctgttcaaaaagaccgccacggaaccgctgatcttgctgaccgagagatcggatttctggagcgatctgcgctatggctttgacctgctggcccaccgcgtggtcaaggtgaacggtatgtatgccgtcaacggcgatttcttccgcagcgcctaccgcggcaatggcatcgtgctcagcgagacctgcgagttctacggcaagaacggccatgtggacacctctatggcagacggcctgctggcaggcggtgccaaggcggtgatgggctatgtgaacaatgtctactcggtgtattcccgcagtatgctgtgggccgctgtaaaccggatgatcgagggcgaaacgctggaacaggccgtggactatgccaagagcatctacggcaccgatgatatcatctggtacaacgagcagggcggcagacggtcccatgcggcggcatcctatgcgatgctcagcggagaccgaagcgctgcactgcccaacccctacacggcagcggatgtggatgcggcggcgtaagcaacacacggcattgcacttttgcacaaagtatattatactaaaggacggcagagcattctgccgtcccttttgctttataaaatgaggtaagcttcatgtcagaatatatcacccactcccgcgccgagacggtggcgctgggtgcccgtatggccgcagtgctggcaccgggttcgctgattgcgttcaccggcgggctgggcgcgggcaagaccgcttttaccgagggccttgccgagggccttggctgcaccgacccggtgtccagcccaacctttgccattgtgaactactaccgcggcccaaagccgctggcgcactttgacctgtaccgtatttccactgagaacgacctgtgtgctgcaggcttttacgattatttggatcagggggccattgtggcagcagagtggagcgagaactttgcagacctgctggcactggaaaaccccatccgggtggatatccagcgcgtggacgaaaatacccgcaggatcaccattgagggggtaacgctatgaacatcttagctgtggatacagcgggcaaaacggctggtgtggctcttttgcaggatgaccgcctgctgtacgaggtgtatctggacgcaggcatgacccacagcgaaacgctgatgcccatgatcgacacctgcctgaagatgtgcggcatgacctgtgcagagattgacttgtacggtgtcaacgcaggccccggcagttttaccgggctgcgcatcggtctggcggcggtcaagggtctggccttcccgcgggaaacgctgtgcgcaccggtctccacgctggaagcactggccgcagcccacacgggcgagggcaccgtgctgtgcgcactggatgcccgccgtgcgcaggtatacagtgccgcgttcgaccttgccacccacagccgcctgctggaagacgatgcccgggcggtggcagatctggccgattttgtagaaaattgcaaaaagcccctgttttttgttggtgatggcgcatctctgtgctataataaatacggcaatgtgccgggcgtgctgcaggcacctgcggccctgcgcggcgggcgtgctgctgcagtggcccttgtggcaaagcagatggccgaagccggaaaggctgtgctgccggaggctgtgctgccggattaccaccgcctgagtcaggccgagcgggagcgcgcagagcgccttgcagcagaagctgcagccaatgccgcccaaaacaaggagcaggcataaaaccctgcgtgactgagagaaaggaacatttccatggcaaaacccattgcactggccgctgaccacggcggatttgaactgaaagaagctgtcaaggcgcatctgaaggagctggggctggaatacatcgattttggcacccacagcaccgacagcgtggattaccccgatatggccgtgcccgcctgcgatgcagttgtgagcggcgagtgcagcaaggcactgctgttctgtggcaccggcgtgggcatcagcatggcagcaaacaagatcaagggcattcgtgcctgctgctgctctgacagcttcagctgcgagtatacccgccgccacaacgacgccaacgccctgtgtatgggcggccgcgtcgtgggtgcaggcttggcctgccagctggtggatctcttcctgaatacggagtttgagggcggccgccatcagcgccgcatcgacaagctgaccgcattggagaaccgctgatcatggcgaagcgtatgcggagctgttttaaatcgtaattttggacccgatagagttatctatttaaaataaggagcgtgtttttatgaccccgatgatcgttgagcatccgctgctgcagcacaagctgagcattctgcgcaacaagcagaccggcaccaaggagttccgtgacctcgttggcgagatcgcgaccctgctgtgctacgaagcgacccgtgacctgcctctggaagaggtggagatcgaaacacccatcaccatggcaaagaccaaggtgctggctggccgcaagctggctctggtgcccatcctgcgcgcaggcatgggtatgctggacggtatgctgaccctgctgcccgctgcaaaggtgggcttcatcggcctgtaccgcgacgaggagaccctgcagcctgtggagtacttctgcaagctgccgcaggacattgcagagcgcgatgttctggttctggacccgatgctggctaccggcggcagcgccattgatgccatcacccagatcaagaagcatggcgcaaagcgcatcaagttcatcggcctgatcgccgctccggaaggcatcaaggccctgcacgaggcacaccctgatgtggacatctacctcggcgcagaggatgaccacctgaacgagaacggctatatcgttcccggtctgggcgacgcaggcgaccgcatctacggcaccaagtaagaaactgtatcacggaagggcagctgggaacagctgctcttttttgtgcagacgaaaaggggaacgacggctgtcgttcccctttgtgcgttatggaaaaactcagatctcggccagaatggcatcgcccatggcggtgcagccaaggcaggtgcagccctcgctcatgttgtcggcggtgcgcaggcccttgtccagcaccttgttcacggcggtctcaatggcatcggcctcctcggccatgccgaaggagtagcgcagcatcatggcggcagacagaatgcaggcggtggggttcacgatgtctttgcccgcaatatctggggccgagccgtggatgggctcatacaggccgcgggtgccgtcgcccagagaggaggacgggatcatgccgatggagccggtgatcatggaagcttcgtccgacaggatgtcgccgaacatgttctcggtaacgatcacgtcgaactgggcggggttcttgacgatctgcatggcgcagttgtccacgaacatctcgctgtattccacatccgggtattcggcctgcaggcggtgcatcacactgcgccacaggcggctggtgtccaaaacgtttgccttgtccacgcagcacagtttcttgcggcgcttgcgtgcggtctcaaagccgatgcggccgatgcgctcgatctcgtgctccgcgtagggcatggagtcgatggcctgcttctcgccgctggcgagggtgtgggtctcgtgattgccaaagtatacgccgccgatcagctcacgcacgatgatgaaatcgatgccctgtgccacgatctcgggcttcaggggactggcaggagccagctgcggccagatcttggccgggcggttgttggagtacaggcccatgcctgcacgcaggcgcagcaggcccttctccgggcgctgctcaccgggcaggccctcccacttggggccgcccacggcacccagcaggacgctgtccgcagcaaggcacttgtccagctcgtgctggggcagcgggtcgccgtacttgtcaatggcttcgccgcccatggcagcgtcggtgtagtggaaggtgtggccgtacttttcggccaccttgtcaagcacgcggatggtctgcttgacgatctccgggctggagcagtcgccccagatgacagcaatgtttttttccattggtggtactccttttatgaatgaaactccttccgtcatcgctgagcgatgccacctccctctgtgagggagctgtcgagcgaatgcgagacggaaggag

SEQ ID NO: 1177 - DNA, 4283 bp, Unknown
  gut microbiota DNA sequence
ttcatcagtccaccggcggagatgatctcctgaatgaacggcgggaagggctcggcatggaacaccttgccgttggtctcgtcggtaatgacaccggtgtcaaagtccacgctcacggtgtcgcccgcattgatggcatccacagcctccgggcactccatgatgggcagaccgatgttgatgctgttgcggtagaagatgcgggcaaagctcttggcgatcacgaccgagatgccggcggtcttgatgcacagcggtgcgtgctcacgggaggagccgcagccgaagttccagccgcccaccatgatgtcgccgtccttaaccttcttgacgaagtccttgtcgatgtcctccatgcagtggctggccagctctttggcatcctgcgtgttcaggtggcgggccgggatgatgacatcggtatccacgttgtccgggtatttgaaaacagaaccttttgcgttcattgttgtgctcctttccgatcagaccgtgcgggggtcggtgatgcagccggtcagtgcgctggcggcggcggtggcgggagaagcaaggtagacctcgctcttcacatggcccatgcggcccacaaagttgcggttggtggtggaaacacagcgctcgccctcggccagaatgcccatgtagccgcccagacaggggccgcaggtgggggtggacacgatgcagcctgcatcaataaaggcagtggtccagccgcgcaggatgcattccttgtaaacggccatggtggcggggatgatgatgccgcgcacgcccttggcaatgtgcttgcccttgagcacgttgtaggcggcttccatgtcctccagacggccgttggtgcagctgccgatcacaacctgatcgatcttgatgtccttgccctcgctggcaaggtgggtgttctcgggcaggtgggggtagctgacggtgggttccagcttgtccagatcgatctcaatggtcttttcgtactcggcatccgggtcggcctcaaagaacaccggctcacgctggctgcggcccttgaggtagctgcgggtcatatcgtccacagggaagatgccgttcttggcaccggcttcgatggccatgttgcagatgcacaggcggtcgtccatcgtcaggctggcaacgcccgggccggtgaactccatggatttgtacagcgcaccgtccacaccgatcatgccgatgatgtgtaggatcaggtccttgccggacacacgggggccgaacttgcccttgagcacgaacttgatggcagagggtaccttgaaccatgccatgccggtggccatgccggcagccatatcggtggagccgacaccggtggagaaggcacccagtgcaccataggtgcaggtgtggctgtccgcaccgatcacgcagtcgcctgcggtcacgatgcctttttccggcagcagggcatgctcaatgcccatctggcccacatcgtagaagttgaggatatcgtatttgttggcgaactcgcggcactgcttggactgggtggcgctcttgatgtccttgttgggcacaaagtggtccagcacgatggcaatgtgctctttgtcgaacacaccgtcaaaaccggccttttcaaactcgttgatggcaaccggggtggtgatgtcgttgcccagcacgatgtccagctttgcattgatgagctggcctgccttgacctcggcaagaccggcatgtgcggcaagaattttctgcgtcagggtcattcccatgatggtactctccttttatctgttggtagaactccttcaggcacggcttgcgccgttccagctccctcaaggagggagcctctggcgaaacgggaaacttttccgcactgccaggggccccatctccgagggggctgtctgcgaagcagactgggggagtttctttacttattattgatcgcgctcaccagtgccttgatgccggccacgatgatatcggtgtcggtgccggcaccccaggtgacggtgttatcgccccagacaaggccgacgtaagaggcagcgcgggaggtggagccttcgtccagactgtgctcggagtaggtctcgaggtggaactccatgccggtggcgctctggatggcgtttgccacagcgtccagacggccattgcccaccgaggtgaccaccttgcgctgaccgttcagctccagcgtgacggtggcggtgatgccgcccacctgtgcaaagtgggcttccagaacgttgagcggcttgcagcggttgaggaaggcatcctcgaagatgtgcagcacctcgtttgcgctcagctccttgtggctgtggtcggaaacgctcttgaccttgtagcccagagcctcgcgcattttgggcggcaggttgtagccgaagttctgctccagcacaaagccgatgccgcccttgccgctctggctgttgatgcggataacatcggcatcgtaggtgcggccgatgtcgtgggggtcaacggggatgtaggggcaggtccagcggtgttcgccatgctccttgcggtaggccatgccctttgcaatggcatcctgatggctgccggagaaggcggcaaacaccagctgaccggcgtagggggtgcgctcgtaaatgtgcatccgggtcacacgctcgtaggtggcgcagatgtccggcatatcggagaagtccagcttggggtccacgccgtggctgtacatgttcatggccagcgtcaccgcgtccacgttgccggtgcgctcgccgttgccgaacaggcagcactccacccgctgtgcacccgccagcacggccagctctgcgcaggccacgccggtgccgcggtcgttgtggggatgggtggagatgatgacgctgtcgcggtatttcaggtgcttgtcgcagtactcgatctggtttgcgtagacatgcggcatgctcatttccacggtaacgggcaggttgatgatcatggggcggtccggggtgggctgcatgatgtccagcacggcgttgcacacatccacggcgtagtccacttcggtgccggtgaagctctcggggctgtactcgaacaggaagttgccctcgtactcctgactcagctgcttgaccagctttgcaccgtcggtggcgatctgcttgatctcctccttgctcttgtggaacacctgctcgcgctgggccacagaggtggaattgtagaagtggatcaccgcgcggggagcgcccttgacggcctcaaaggtcttgcggatgatgtggtcgcggcactgggtcagcacctgcacggtgacatcctcggggatcatgttcttctcgatcagggtgcgcaggaactcgtactcggtgtcgctggcggcagggaagcccacctcaatctccttgaagccgatcttgaccagcatctggaagaactccagcttttcctcaaggctcatgggcacgatcagggcctgattgccgtcgcgcaggtccacactgcaccatgcgggggctttttcaatgtgatccttctttacccagctgtcatagcctgcgggtaccgggtagtaacccggagcgtacttggttgcgtccatcatttgcgcgtcctcccaaacaatttacacttcttgctccatgctctttgtgagcgtccttgccctctcagtctcacattcgttcgacagctcccccaaagggggagcccttgacaaaaccgaaaactttgccgtactgccaaggcctctcactttgggagaggtggcacggcgtaagccgtgacggagagggcaagcctgcttccaaaaggcagatatacgaaaaggctctcgtctttcaaggcgaaaaccttgagagacgagagcctgtaaagttcaaactacagggcacccgtggtaccactctctttgctgcgcctttgggcacagccgctttgcacgatcggctttttgcggcgaatcgctgtccttgtaacggtggacatccgtcagagcctacttgtgtgttcagccctgccgctcaggggccagtaaccgaaaccctctgcacccgccttgcaccacccggcggctctctgtacgcagaagaaaatcgttttttccccgtcaacgcatttgtgcttttttcaaagtggactaagtttagcatgattcgcgggcagtgtcaagcaatctgactcattctcaaaatgaaacaatttcacaaaagaaggggcggaattttccaaaattatgcacgaggcgttaatgttaacaatttgcgaagtttttggaaagttgcgctcaaaccgctgttgcacgcccggcggctgtgttatactac

SEQ ID NO: 1178 - DNA, 2471 bp, Unknown
  gut microbiota DNA sequence
ccccgacaagttcggatttgtccggctctgctggaccaaaagctccacagacgaatttgttcgtctgtggagcttttttgtttgcccacagcgtggtcagaaaatgaaaaaagaatgcaaaatgtggtgcgcttgaaaaatgtcaggacgggatttttgtaaaaaatgtagaatatcttgccggaaactgtgcattctctccaacaaaaactgcccaaacgtgttgatattgagaaaaaagcttcacaaacgtttacaaaagggtaacaggttggtatactttatggtggtaaacgtaacaagccatggaagctgaaaggagaacctacccgtgaataccgctgcaccgtcccgtaaaaaactgctgagctttgtgctgacactggtgtttatgctcacctgcctgccggctgccttggcggttgatctgaatgtggacgcaggcttctacttcaagcagagccgtggcggcacctgcacactggcatccgcagccatgatgctgcgccgccgtgcctattttgacggcctgaccgactggtccactgtgaccgagaacagtgtccgttccacagcatggtccaacgggctttcccacagctttacatataaggagatgcaggtgggctacggcacactgccctcccgcaaacaggaaaaagtacagaccctgatcaccctgctttcgcagcacccggagggcatcgtgctgtatgaccgcagccagccccatgcagtgctgctcaccgactacaccaacggcaacttctattgctccgatccggcaggcaacatctcttccggacgcatcccgctggaaaactccagcgtttcggtcaataggtcctcctgctactggtatgtggcatcagatcacaacttcattgctgcagaggctgacggcctgcgtctggaaggcatgagctacccaatcaatgtccgtgcgggcaagggcatggcactgaccggcactgcaaatgctgcgctgggcaccaccctgaccaatgtgcaggtggcagtgctggacgagaacgaccagacggtgttcactgcacaggcggcacccaatacggcgatcttctccttcaagtcgctggacagctccatccgctttggcgaactgcccgcaggcaattacacctacatggtgatcgtgaccgattctcagggcgataacctctgctttaccagtgacttcacggtttcggatggctcggcaagcagcggcgtttactggtcggtgaaggataccgagggcaccaagctgctggacagcattcaggaagttcaggatgcctttgcaaatgcaactgagtccactctgggctggtttggcggtctattccagtaaaatcataaacgaaaaaaaagaagtcccggaatacacttccgggatttcttttttgctgtaatttgttgtaaaaaagcttatttcagggttccgtccagtacctgactgtaataccagggctttggtgcgcggaaggtcttgccgctgaggaactcgaaatccggctggttgaagcggggcatggtgagttcccatgcgcacagggcctgatacttgagtttcagctcgcggttggcggtgttgttgccgtatttgctgtcgcccagaatgggacagccgatgctggccatgtgtgcgcggatctgatgggtgcggccggtgatcagctgcaccttcagcagggccagacggccggagacggcgatggtctcgtaccgggtctccacttccttggcaccaggctgcttttcttccacgatcttcacgatgccgcggtccgcgtccttgagcagatagccgcccagagtggcatccggcggcatcggacggccgaaggtgacgcagaggtaggtctttttcacttcgcggttcttgatggctgcaaggaacagctcctcggcttccggggtcttggcaacgatgacaaggccgctggtgccggtgtccagccggtggcacagcgccggggtgtacaggtcgttctccttgtactcgccctgctggttcaggtagagcagggtgcggttcagcagcgtgtcgtcctccgggccatccacggcaagaccggcgggcttgttcacaatgacgatctgcgggcagtcgtagaccacctgtgccgggccgcgggcgttcttccacgccgggccgtccacacgcctgtccgcatccagaacttcatccagaatgaacagcttgatctcatcaccggccatcacgcgggtggaaagcggctgctttttgccgttcagcttgatcttgttctctcgcagggccttgttcaggcggcccggggtcagggcggggaactgctgggtcagatagttgtccagccgggtaggggcaagacattttacttttaaaattttcacggaaattttcctctctatcttgaaatagaatgtgtctttgaatcgtttttattgtagcggaacaaaaactgcgcgtcaagcgcagagaaaag

SEQ ID NO: 1179 - DNA, 43985 bp, Unknown
  gut microbiota DNA sequence
ctccgttttgcaaacaatgatgtggacaatcattttgatgccgtctgtgcacagatccatagtaccattcagcacaggcttccatcttaaaacaaacaggaaaggaacaaactcccatgatcatctccaccaaaaaagggactccgaaggacgaactggaaaagatcgttgacaaattcgagaagcagggtctggacgtgaccctgatcaccggcaagaactacaacgtgttcggtctggtgggcgacaccaccaagatcgacgaacgggatgtgctggcaaacccgtggatcgacaacgtcacccgcgtgtccgcgccctataagcgtgcaaaccgcctgttccacccggcagattccgtgatcgactgcggcggcgtgaagatcggcggcaaggaaaagatcgccgtcatggcaggcccctgcagcatcgagggtgcagagcaggctctgcgcattgcacagggcgtgaaggccggcggtgccaccctgttccgcggcggtgcctacaagccccgcacctctccctactccttccagggccttgagaccgagggcattctggatatggtaaaggcccgcgaggccaccggcatgcccatcgtctccgagctgatgagcgaggaccgtatcccggagtttgaggagtacgtggacgtggtgcagatcggtgcccgcaacatgcagaacttccagctgctcaaggccgtgggcaaaatgcacaagcccgtgctgctcaagcgcggcctgtgcaacaccatcgaggagtggatcatgagcgccgagtatatcatggccggcggcaacgagcaggtcatcctgtgcgagcgcggcatccgtaccttcgagaagtacacccgcaacaccctcgatctctctgcagtgcccatcatccacgaaaagacccacctgcccatcatcgtggaccccagccacgccaccggcaaggccaatctggtcgagcccatgatgatcgctgccgtggccgccggtgccgacggtctggaagtggaggtccactacgacccgcagcacgcatggagcgacggcgcacagtgcctgaccccggattccttcgcgcaggccatggcaaagtgccgtcaggtggcatgggccattggccgggatatgtaacggcctatgctggtaacgattcagaacgcgcgttccgtgggcggcaccatcactgccccacccagcaagagcatggcccaccgtgctgtgctctgcgcggcactggccgagggccgcagccacatcaccaatctggaattcagcaaggacatctctgccacgctgggcgcagcagcacagctgtgcgcccgtgtgcgcaccggcgcagacgatgctgtggtggaagggctggggcattttgtgccccttgccgcgccggtggactgctgcgagagcggcagcaccctgcgctttctcatccccatcgccagcctgaccggacaggcagtttccttcaccggccgcgggcggctgatggagcggcctcagtcggtgtatgacgctctgtaccgggagcagggcctgcggtttgagcagagcgctgccgggctgaccgtggaaggggcactgacccccggcgaataccgccttgcaggcaatgtatccagccagttcatcagtgggctgctgtttgccctgccgctgctggccggagacagcacgctgcacctcattccgccggtggagagccgcagctacatcgatatgacccgctctgtgcaggcagccttcggtgtgcagagccattggctggacgaaaacactcttgccatcccgggcgggcagcactatcacccctgcgattacaccgtggagggcgattacagtcaggccgcgttcccggcggtgctgggtgcagtgtgcggcggcgtgaccatcaccggccttgccccggacacgctgcagggcgatgccgccattctggatatcctgcgccgctgcggcgcggtgtttacccgcacggcagagggcatctcttttgaaaaggcccccctgcacggggtggacatcgaccttgcggactgcccggaccttggccctgtgctcatggtgctgggcctgctgtgcgaaggcactacagtcatccgcaacgcagagcgtttacgcctgaaggagagtgaccgcatcgctgccatggaggccgagctgcgtgcctgcggcggcgtgctggaaagcgagggcggcaccattacggtgcacggctgcacgaacaggctgcacgctccggcaggtgttctgcatgggcacaatgaccaccgtgtggtcatgagccttgcggtgctggccctgagtacgggcatccccctgaccgtggacgatgccgaagccattacaaaaagctggccgaatttctttgaagccatcaagcccttgggcgcggaggtggaatatgcttgataaaacaaaacgttatctcgtggtgggccttggcctgctgggcggcaaatacgcgctggaactgacgaaagccggtttccatgtggacggcatcaaccgcagcgaagggcatttgcagtacgcgctagagcacggctatatcgccagcggcaagacccacgattttgaggaccttgtgagcagcgccgaccacatcatctttggtctgtaccccacggccctcatcgagtggttccgcacctacggccatctgctcaagcccggctgcatctttacggatgtttccggcgtaaagaccggccttgtggagccggtgcaggccatgtgcccggcgggcgtggagttcattgccagccacccgatggcaggccgtgagacttccagcgtggagcacgccgccgaggtgaactttgccccggccaacttcatcatcacccccacggaaaagaacacgccagaggccattcagtgggcaaaggacctggccgaagtgctgggcttccaccacatctgcaccctgacggtgcaggaacacgacaagatgatcggctatgtgagccagctgtgccatgccatcgccgtgagcctgatgtgcgccaacgataactcttcgctgtgcgagtacaccggcgactccttccgtgacctgacccgcattgcacgcatcaacgataaaatgtgggcagagctgtttttgtggaacaaacagaacttgatcagcgagatcgaccagttcgatgctgcgctgcagcagatgcgcgctgcccttgtggccgacgaccgggataagttggaagagatgttccgtctttccacccagcgccgcgcggcgttcgacaaaaaactgcccgaataaaccggaggtgctcccatgcccaagcaggaaggccagaaatccaagcttttgacccttttgcgcattctggaacaaaagaccgacgaagaacacctgctcaatgtaccgcagctggtagagctgctggaacagcaggacattcttgccgagcgcaaaagcatctacagcgatatcgacaccctgcgcagtctggggtatgacatccagctgcggcgcgggcgcggcggcggctactggctggccagccgcacctttgagctttctgagctgaagctgctggtggatgccgtacaggccagcaaggttgtgtcggcacgcaccagcagtaaactcatccataaactggaagccctctgctccgactacgagggcacccagctgcagcgtcaggtgtacgtggatggccgccccaaaagcgacagccacaccctgctttacagcatcgatgcgctgcacagcgccatcaatgcgggcagaatggtgcggttccgctacaaggacagcggcacccgcaccgtcagcccgtggcagctggcatgggaaaacggctgctactaccttatcgcttatcaggacgagaaagagcctgcgggcatccgcaactaccgcgtggaccgcatgtcttccgtgacggtgctgggcgatgcccgccggggcaaggccgagttccgccagttcgacctgcccgcctatctgcgcaagcacttcaacatgttcggcgggccggagtaccgggtcactctgcgctgcaccgccgacctggaaagcgccatgcgcgaccgctttggcaaaacgccgctgttcgtgccggaggaagacggtgcatattttcactttgatgtgccggtatgcgtcagcccccagttctacggctgggtgtgcggctttggcggcaaggtagaagtaacggctcccgccgaggtgcgcaaggggatacacgatatggtgcaggcccttgcgaagcagcacgattaaaatggcctccgcttcgctctggccatcatcagatgaaatgatatttataatcaggttccggaaaaatctgcggatttttccggaaccttttttcacagggaaggcccggaccgggagatgcagcgttccggcaggaaataatttcacggcaccgtcctgccctgtggagccagagcgccagatgctgctttccgatacgactccatccgtgaaaaatgcaaaccccggcaggccgcagcctgccggggtttgctgttcctataaataattcttccgctgagcatggccagagcgaagcggaggccattctgaatctctcactcctcaaattccagatcgccgggcaaaatcagatccagctcggcggcaggttctgccacaaggcggcggctctggtggaagatggccttttccagcgtgttgcgggcaagacggccgttgccggcggtgcggctgtccagcgcctgacggcgcttgtagtagcccaaaagcgggaaggtacagccctcggcaaggcggtagcccttgccctttgccagcacgttggtgatgtccagcagctcgtctgccgtgtagtccgggaactcgatcttgttggggaagcggctggcaagaccgctgttggcagtaaggaacacctccatctcccgggtgtagcccgccagaacgaccaccagctcgtcccggtggtcctccatgcccttcacaagggtgtcgatggcttcgagcccaaagctgtcctgctcgccgcggtagaggctgtaggcttcatcgataaacagcacaccgccgagggcactctcgatgacgctgtttgtcagcggggcggtgtggccggtgtagcggcccacaaggtcggcacgggtcacttccaccagctgaccgcccttcagcgcgccgatggccttgaggtactttgccaccagccgggcaatggtggtcttgccggtgcccgggttgccggtgaagatcatgtgcatggaaaggctggtggtcttgaagcctgccgccgcgcggcgctgctgcacctgcaggttatccgccagaccgaacacatactccttgaccgccccaaggcccacaaggccgttgagttcggcgcggatttcatctacagcgcccgtgtactcggcaggcagcagggcagacagctcctgctcgggctggtcgttcaggcaaaaccatacgccctccggctttgcggtcagggtgacggtgccggtaagctttgcatcagtctgcaggcagtattcactcagggcacggaacattttattgcagcattccgcaaggcccgccgcacccttttccttagagcactgggcggctacatagtcccgcacatcggccccggcagagagggtcagcccaaggcgtgcgctcaccttctgggccagcgcattcagttgctgcgccgccagcgctgcaaggtcctcccgggcaaaggcgctggtctcgcacacatcgcccaccgctgccacaaagggcgcaccgaacttatccgccagcgcgtcccggcccttgcgggaaaagaagatgaggtacttgccgcagggcgtgatactgctcaccgcgcccggtgccagcgccgtgcctgcatccacaaggatgccctccttgttcacaagataccggctggaaagcggtgcgctgcccttcacagcaagatctgcaagggtcttgaggaaggccgcatggcagctctcgtaatgctcaaagatcacgatctccccgggggcgtgcagggccgcatacagatcctgcaaaaacagcttttccgcaccggaattggggtagagggcaaggtccaccaccgcggttttgtcgctctgcaaaaggccccgcgccgccatgatgcgggcggtctctgccagcgcaaaatgccgccccgtaccggctccgccgcacagcaggatcacattgcgtgctgccgggcgctcggtgcccagcacaaagggccggcgcatggcgcgcaccacgctgtccacaaaggcatcctgcccgagaacggtctttttcacctcggcggcaaggccctcaaagctgccaaggtgctctgcggtcacatcggcagtgcccttggcaagcaggccgtccgcttccatatcccgcagcatctggcggctgtcctccagagcagactgcaccgcagtgtcctgcgttttcagctgggcgttctgttttttgagcagggcatccagctgcttctggttttccagcagagcagcgttcaggtccggcacggctgaggtcccggatttctgtggctttgcctccggctgggcggtgccgccaaagcgcggcctgccccctgcaccgaacacaccgttcataaggttttcccaatcgtcggtatatgccatggtttgccctccgtttttgtcgttttcttccagtatagtgtacccggacaggttttgcaattccctcttgcaaaaaagaccgccggtgtttacacttatatctgataggaaatctgcaagaaggaatgaagaaactatgaccgtcaaaacgcccgccgaactgaaaacgctatacgagagcatctcctttgaccttcaaaccacctacaccggcccgctggggcaggaatatgctgtttccggcacccatctgcgcctgtgggcacccacggcgcagagggtggaggtcagcctttaccgcaaaggcagcggcggtgagcccataggcactctgccgctggagcgggggcagcagggggtgtggagcatctatctgcccggcgaccagcacggacgatactatacctatacggtcacagtggatggcatttcgcgccagaccggcgacccttacgcccgcgctgccggtgtgaacggcacccgcagcatgatcgtagatcttgcccgcaccgccccctccgggtgggagcgggatgtgcgtccggtcatcccgccggagcagcgcgcggtgtgggaggtgagcgtgcgcgacttctcgcaggacgctgccagcggcgtgcgcccggcatggcggggcaagttcatggcctttacccagcagggcaccaccctgcacggggacggcatccaccccacctgcctgaactacctccggcgtctgggcgtgaagtatgtgcagctgatgcccatttttgactttggcagcgtggacgaggcaaagccgctgttgcggcagtacaactggggctatgaccccaccaactacaatgtgcccgaaggcagctattccaccgaccccacccgcggcgaggtgcgcatccgggagtgcagggaaatgatcgcagccctgcacgcggcgggcatcggtgtggtgatggatgtggtgtataaccacatgtatcgcaatgagaacccgctgaacgacactgtgccctgctactttttccgccagaacgaggacggcagcttttccaacggcagcggctgcggcaacgaatttgccagcgagcggcccatggcccggcggtatatgatcgattccatcctctactgggcgcaggaataccacatcgacggcttccggttcgacctgatgggcctgtacgacgtggagaccatcaacgcggtgcgcgccgcgctggatacgctgcccggcgggcgggatatcctgatgtacggcgagccgtggcagggcggcggcagccagctgcaccggtacgaggccaacaaggcgaatctggccatgctgaacgatcgcatcggcatcttctgcgacgacacccgcgacaccatcaagggcggctgcttcaacgcccgggagccgggctatgtggagggcaggcccggcagcttctgggacatcggtggcgcagtggcggcatggtgccgcagcgaccgtctgccgccccacgcgcccagccagatcgtgagctatgtttccgcccacgacaacttcaccctgtgggacaagctgctgctggtgcggtacgaaaagccggagttcacggcggcagacagcaccgcccttgcccagaaccggctggcggcgggcatttacctgaccagcttcggcctgcctttcctgcaggcgggcgaggagtttgcccgcaccaaaaaagggaagggcaacagctaccgctcttcgcctgcgctgaaccggctggactgggagcgggccgaaaaatatcatgcactggtggactactaccgcggcctgctggctctgcgggcaaggtttccgcggctttccagcaccgacccccacgcgccggatgccctgtactttttctcactggagcagccgctggtgggctggcagctgcccgcccagtggggcgacggcgcagcatggcaggcgctgtgcgtgttctataaccccaccgagaccagcaaggtcgtgccgctgccggttgggcgctggcagatgctgagcgacggcatctcgtccagcctgtggcgcggcccggcaagggtgtacgagcacgagaccgtgctgatgccttacagtgccaccatctttggacagatataaaaacaggagcggatggaaaactctcatccgctcctgttttctattttgctcagctgttggaagccgtcttttcgcccagtgtcacattgaccgtctgcatctggccgtcgcgtgcaatggtgatggaaagcgtatcgcctgctgtgtgcttctgcatcagggtgccaaggtcgtccttggaggcgatctcggtgccgtccacgctcacgatgcggtcaccggcctgcaggcctgccttttcggcagggccgcccttgaccacctccacaacgtaaacgccgtaggcattcacgcccagttgagaagcagtctgtgcgtcggtcacggccagataggtgatgcccaaataaggccgtccggtcacatagccgttctccagcagttcctgtgccaccttgatggcatcgttgatggggatggcaaagcccagaccctctgcatcgctggaagaggattttgcattcacaatgccgaccagctcaccgttcatattgaacaggccgccgccggagttgccggggctgaccgaagcatccatctggatcagggacatggtgttcacagagctgctgccctgaatggtgacgctgcggttcaaagcgctgatcatgccgccggtcacggtgccgcccagctcacccagcgggttgcccacagccatcacgctctggcccaccttcaggctgtcgctgttgcccacggtggcgggggtcaggccgtcagcatcgatcttgatgaccgcgatatcgctggtggtatcttcgcccacgagggtggcggtgtagtccttgtcaccaatggtaacggtgatggtggaagcgccgtccaccacatgtgcacaggtgaggatgtagccgtccgagctgatgatcacgccgctgccggcaccgctctccacctgattctggccgtaccacgaccactgagagtagaccacctgctccgtagtgatgaccaccacgctggggctgaccagatcagccacctgttcagtggtcaggctgctgccgctgctggaggctgcggtgatggaactatccgaaccggatgcactgtcggccgtagaggaaggtgccacctgctgaatgaccaccttgccgctgccgccaaactttgcccccacaaagccgcctgcaaagcccatggctgcggccagcaccagcgccacggcgctgcgtgcaacgcgcttgccattgaactttttcttctttttagggggctgcgcgtcctgcggctgtaccggatgtaccggcggcgttgcaccgcctgcgccgttgtctgtctgcggggcggtgtaagcggtctccggttccggctgcgggtcgttgtactggttggcggtgttcatgccgctgctgcccacattgggataaccggtatctccgctttcgtttttatcctgagaggaataatcatattcccatttgttctcattgtccatgctgatacttcctttccgtaagggatacgtccacaggaaccctgttcctttgagctgctcctattgtaaccatcaattgtgaaaatcaatcgcgcgcgccgtgaagaaactgtgaaataaagacgcactttccgcccttgacagcggcctttgcgcttgctattgtaaaagcgtaaattcaggaggaacacaccatggaactgcaccgcacagacgagggctttgccctctataaggaaaaaacacagatcggcttctgcgcgctcacgcccgccgcaaagggggctgccatcaccgcgtttggcatcgaaccgcagtggcggcgcaaaggctacggctcctatctattaaaagaaactttgcgcgcctacgccggatacgaccgcgaaaaggctaccgtatttaccgccccgctgcccgccgatgccgcagagcttgcgttctgggcaaagttcggctttgcggcagaaggcaggcagctggtacgccgccgcacgccggacctgaccgccgtcaagttcgtgcaggactttctggccgcacggctggcacagccgcgcctttgcatcgatgctacctgcggcaacggcggcgacacggccttcctgtgcggcatcaccgcgccggaaggaaaggtagtcggctttgacgtgcaggaagctgccattgcatccacccggaagcacctggagcagctgggcgtgcctgccgcccggtatgagctgcactgccaaagccacgcagaccttttacaggttgtgcagcccggcacggcagatgcggtgatgttcaactttggctggctgcccggggccgaccacgcagtgttctccaccgcgcagagcagcatccccgccctgcaggcggctttggaagccgtgcgccccggcggcgtggtgagcgccatcctctacagcgggcaggtcatcggcacggatgaaaagcagacggtgctggaatatctccgggcacttccgctcaaaagttttaccgttctggtgtgtgattttgccaactgggccgaaaccgcccctctgccctgcatcatcctgaaaaaataacgaaaacacttgcattatggagcgttttcggataaaatagggtacgtatgtgtaaaaagacggcctcgccctctccgtctttgcttcgcaaatccacctctcccaaagggagaggccttggcaaaaagatgcactttgcgtggactgccaagggctcccactttgggggagctggcgcgttagcgcctgagagggcgagcccggcaaagtccaaccggacatactaaatgcaaaaatccacttcctgctccacagcaggtttatcaggagatctacagtttatgacaaatcgtgaagaaatcgagcgccgccggacgtttgcgatcatcagccatcccgacgccggtaagaccactctgaccgaaaagctgctgctgtacggcggagccatcaatcaggcaggctccgtcaagggcaagcagagcgcaaagcacgccgtgtccgactggatggacattgagaagcagcgcggtatttccgtcacctcttctgtcctgcagttcaactacgcgggcaagtgcgtgaacattctggacaccccgggccatcaggacttctcggaggacacctaccgcaccctgatggcggcagactctgccgtcatggtcatcgatgccgcaaagggcgttgaggcccagaccatcaagctgttcaaggtgtgcaccctgcgccacatccccatcttcaccttcatcaacaagatggaccgcgaagcccgcgacccctttgagctgatggagaacattgaggagattttgggcatcaagacctaccccatgaactggcccatcggctgcggcaaggagttcaagggcgtgttcgaccgcaacacccgcaaggtgctggcattttccagcgacggccgcgccaacggcgtgaagaaggtggatgagaccgaggccgagctgggcgatcccgcactggacgagctgctcaccccgtatctgcaccagcagctggtggatgaaatcgagctgttggacggcgctgccgaggaatttgacctcgacaaagtgctgcgcggcgagctgagccctgtgttctttggttccgctctgaccaactttggcgtggagccctttctggagaacttcctgcggctcacccccaccccgctggcccgcgtggacagcctgaccggcgagaccgtggacccctgccgcgacgagttctctgccttcatctttaaaattcaggccaacatgaacaaggcccaccgcgaccgcatcgcctttatgcgcatctgctccggcaagttcgagcgcggcatggaggccttccatgtgcaggagggcaagaacatcaagctggccaccggcacccagctgatggcgcaggaccgcgccatcgtggacgaggcctacgccggcgacatcatcggcctgttcgacccgggcatcttctccatcggcgacacgttgtgcaccggcaaaaagaaggtccagttcgcaggcatccccaccttctcgccggagcactttgcccgcattgagcagaaggacaccatgaagcgcaagcagttcgtgaagggcatggagcagatcgcgcaggagggtgccatccagatcttccgcgaagtgggcggcggcatggaagaagtggtggtcggcgtggttggcgtgctgcagctggaagtgctggagtaccgcctgaacaccgagtacaacgtggagatccggatgcagcagctgccctttgaacagctgcgctgggtgcagaacgaccccgacacctacaacctgcgggatctggacctgaccagcgacaccaaggctgtggaggatatgaagggcaaccgcctgctgctgttcacctccgactgggcggtgcgctgggctgagacccacaacgaaacgctgaaactgagcgagttcggcaatatctgagttgaaagagagctgcggtgcgggaatatcccgcagctgcggttcttttttcataaaacgcaaaaaatacaacgaagaatgccagctacggaatgcgctgctcccattgcggggaacactgctggcatggagggaaaatatatgcaaaacatcaatattggcaaaagcggcattcaggtgccgtttctcggcatgggcacctgggccatcggcggcggctcctggtggggcgacaacgacgacagcctttccgtcaaggccatccagactgctgtggagcagggcatccagtggatcgacaccgcccccatctacggcctgtaccacagcgagaccgtggtgggcgaggccatgaagcacatcgaccgcgacaaggtggtgctttccaccaagtgcggtctggagtggcggcatgaaacaccggtgctgcacaaggtcgtggacggcaccaccgtttaccgcgacctttctgcaaagagcatcatcgaggatgtggaggacagcctgcgccgcctgcacaccgatcatctggatgtgctgtacacccactggcagacccccgatttcggcatctacccactggaagagacggtggaagccatgatgaagctgaaggagcagggcaagatccgtgccatcggtgcatccaacgtcactgcggacatcatccgcggctactgcaagtacggtcagctggatgtcattcaggaaaagtacagcctgctcacccgccgtgtggaaaagcagctgctgcctacctgcaaggagctgggcgtatcggtgcaggcatactctccgctggagcagggcctgctgaccggcaaggtgaccatggacaccacctatcccgagggcagcacccgcaactcgaaccccagcttccagcccgcccgccgggcacaggcgctggacatgctggcaaagtggggcgacctgaccgagaaatacgactgctctctggcacagctggtgatcgccctgaccgcccgtatgatccccggcctgcatgtgctgtgcggtgcccgcactccgcagcaggtgatggacaacgccggtgcgctgaacatcaaactggacggtgccgatgccgtccgcatgaagtgggacgtggatgccatttcctgatggtttgaccatcggaacagcctccgcttcgctctggccgtatttagaggaattattcttttatgtttgggtcctgaaaagcctgcgggcttttcaggacccttttttcacgcaaaagatcgaaaccggcagatgatgccggttttctttatgactctttctgtgaaaatgcaatgccggacagcccgcaggccgtccggcattgctcttataaaaataaaaattccgctgtttatggccagagcaaagcggaggccatttaaaatcgtcagctgttctccttccagaacaatccgccgctggtctggaacagcatccacgggttcacgctcttgctgccaagcttgaagtccatggtcagttcctcgcccagcacgcctacagcctgccccttttccaccgtctgcccggcggagacggaaagagtctgaagcccgtacaggtagctgcgcatcccgcagccatggtcgatgaccaccgtgttgccggtaagggccagctctgcggccagcaccaccacgccgtttgccggggcgcggcagggctcgccgggaatggtataaagctttgtggagttggaacggctgccctgcctgccgttcaccaccctgacctgaccgtaatccacaagggtggtgtagctttccaccgggttcacaaagccaccctgccacattttttcccgcgcgggcgcttcgtacaggccccagactgcattgcggaactgggtgtttgccgcatccgatgcatccggttccggctccgcatccgccgtgccaaaatccttgggcagcacgatgatgctgcgggtgatggtctcgccgttcacggtaatgttcacctcatgcccgccggaggaagcgttgtatgccgccgggatgtaggcccgccagccatcggctgcacgcacgcactgcacattgccaaggtcggtctccacagtgggtgctgcatcgccggtcatgccggagatgcgcaagcccacaatgccgccctgctccgcccgctcggcggaaagctccacctccgcgctggcctgcagggtgaaccggaaggcataacgataccagccggtgggctttgcgggcttttccagccccagatttttgcgcactgagccggtgctgccgccctcaaattgggtggccatgccgccctccggcacccgccagaccgatagctctgccttatattcgccgttggtcgggaacaaaaagctttgataatcgcttacactgcccacaaatacaatgctgccataggcgttctggatggtgagggtggtgtagctggcccagtccggcagggtgatggccgggtgggccgtgtacagcgtgcccagcttctgcaccgtgagggtggcggggctggcaaacaccttatcgagctttccgccgatgagcggcacctgccagcaccagccgttgggttccagcgcttcggtgccaaactgcgcggtgctgtccgggcagccgccctcggtggtaaaggcatagctcacgcccatcaccgcgcccagaaagatgcctacgcccagcaccacacccacgagccagagcagaaaacgcttcatgatgcactccttctatgtagcaaaaagggcgcaccggcacagccttttgcagactgccggtgcgcccgaaggtttacggttcgtgtttttattctgcagcatcctctgcaggggcagcctcttcggcagcagcctccggctccaccgttgcagcatcgtcctcgccgaacagcagacgctcgtactcgtccagctccttctcacggcggtgcaggtaaacagcaacagcagcaagggcaccggcaacagcggccagaacagtgatcacagcgaccagacaagatttcttcataggttcaatacactccttttttcgttgaaacgatgtttcagctttcattccagtgcttgttggcttttattatacccgttcctgtcaaaaattacaaccattcaggtcaaaaaggccaaaatttcatactataagcttcctgtatgccttgaatgcgccgggcagcgtatactcggcctgcagggcttcccggcttgcccacacgcagcctgccggggcatcttgggcgggcacatgcagcaggatgccgttcatatgccactcgatgtggctgaagatgtgctttgcagcgggcagcgcttccggcgcggcggtgccggtatccactcccatggcctgcaggcgggcaaggacctctccggcggcaagggtttcaccctcccacagtaccggctgccacagcccggcaagcaggcccttttggggccgctgctgcaaaaggaagcctgccgggctttccagcagggccagcgtcacaggctgcagtctgcggggcttgggcgctgctttgcggggcagctccaatgcagtgcccgcagcacgggcggcgcacaggtgggcaagcgggcatttttcgcacaggggcgcaccgttcggcacgcagaccagcgctcccagctccataagggcctgattgtagtcgccgggcgcatccggcggctggtgctccatcacgcgggcggtgaacgcttttttcactgctggttccgtgacggcagcggggtcgttgtacaaacgggagaacacccgcagcacattgccgtccacggcgggcaccgggatgccgaagctgatggacgcaacggctcccgccgtgtagtccccgatgccgggcagggcccgcagggcatcatagtcggcgggcagctgtccgccgtactgctcgcagacgatgcgtgcagccttttgcaggttgcgcacccggctgtagtagccaagaccctcccagagcttgtgcagcttttcctcttcgcaggcggcaagggccggaatgtccggcagggcggcgagaaagcgttcgtagtagggcagtgccgccgagacccgggtctgctgcagcatgatctcgctgagccacacatggtaggggctggggtcggtgcggaagggcaggatgcggtggtttttgtaaaaccagtccagcagggcagaggaaatgttttccacttgttttgtgctccttatcaaaaaacgggccgccgcaaggtgcagcagcccggtaaaagtatgcgcgcttatcagaagccgtatgcagtgcgggggaagggcagcacgtcacggatgttctggatgcccgtgaggtacatgatcatgcgctcgaagcccaagccgtagccggcgtgctccacgccgccgaacttgcgcagattcaggtaccagtcgtagttggtcttgtccatgcccagctcgtccatgcgggccaccagcttgtcgtagttctcttcacgctggctgccgccgatcagctcgccgatgccgggcaccagcatatctgcggctgccacggtcttgccgtccgggttctgcttcatgtagaagctcttgatctccttcgggtagtcggtgacgaacacaggcttcttgaacaccacctcggtcaggtagcgctcgtgctcggtctggatgtccacgccccactccacagggaactggaacttcttgttgttcttcttcaggatctcgatggcctcggtgtagctgatgcggccaaactcgcagtttgccaccagctccagacgctcgatgaggcccttgtcgatgaactggttgaagaaggccatttcatccgggcagttgtccagcacatagcggatgacgtacttggtcatggcctcggcggtgtccatgtagccggacaggtcgcagaatgccatctccggctcgatcatccagaactcggcggcgtgacgggtggtaaagctcttctcggcacggaaggtggggccgaaggtgtacaccttgccgaatgccatggccatggcctcggcttccagctggccggaaacggtcagattgaccggcttctcgaagaagtcctgggtgtaatccacagtgccgtcctcgttcttgggcacattctccagatccagcgtggtcacgcggaacatctcgcctgcgccctcacagtcggaagaggtgagcagcggagagtgagagtaaacgaagccgttctcctggaagaacttgtggatggcgtaggcagcggcgctgcgcacgcggaaagcggcgttgaaggtgttggtgcgggggcgcagggtgggcatggtgcgcagatattccatgctcatcttctttttctgcagcggatactcgtccgccgggcagtcgcccaggatctccacactgtcggcattcagctcaaagggctgctttgcctgcggggtgagcaccagcttgcccttgacgcgcaggctgctgtacagaccggtgtggatcacctcatcgtagtttgccagcttgcctgcttccagcacgacctgcagggtcttgaagcagccgccgtccgacagggcgatgaagccgatgttcttggagtcgcggatgttctttgcccagccgcagacggtgatctcggtgccgtcggcgggggtgtttttgaacagcgaaacgatctcagtgcgttccatagtgtttgttctccctttcgatataaaatgaaaaagacagctttgttctccctgaaagttcagggcgaacaagctgtcttgtaatgtccgcggtgccacctgaattaccggaagtgtccggtcgctcacgcgctcaataaaagcgctgcccctgtaacgcagggcctgcggcgcacctactaatggcagctgccatgttcagtttgctgctcccgggtgttcgttcacgcggcgtgcgggcgcggctctcagctgtgccgcactctctgggccggacggcccgcgctacttttcccgatctttgcattttacctttaaaaaatagcactttggcggcgttttgtcaagcaccgcccagcaatgcggcagcaaggccctttgccgccagctgcccggcataaagagcctcgttcaggttattgccgtgcccgccgatctcaatgagcaggctgccggtggtcagatcctgattgtagaaccggtagctgaacagcaccggccgggtaaaaccggggtacattccttccatgctgcgctcccacgcagcggcaaagcgcaggttctgccgccagcccggcagctgaacggtggtgccgttgtcgcacccgcagatgatcatgacctgtgcggcctgcctcccgtccaccgtgcacaccggggcatagcggctgccgctttccgtctcgatggcatcccggtggacatccagcaccaccttgatgctgggataccgggccagatactgctgcaccacggcccggctgttggcatagctgccggtgtagctggggtagtcgttcagggtctcgtcgtgcagggtgttgatgcctgccgcattgagggtatcggccaccacacggcccaccgcgcacatgttcacgctgcagtcggtgctgcgggcaccatcgccgggggcaaaccacagcccggccgaaaggcggtagtcctcggtggcgtgagtgtgcatcaccagcacctgcgggtcgggactgttcggctcaatggcaaagggcagcggattctcgatctccgccgcaatgtctgccgccgtctgccgggtattgtttttgatgctgcccgccccgcagggaatgtacttttcgccgctgccctgcggataatttttttcaatgacagcacccgcatccgccgggcgggcttcctcgcccagcagcggcacaaggtagtcctcaatgttcccggtcagcgcctgcacggcctgcggcagagaggatgccgccgctgccggtgtgctgtccggtgcggcttccacctgcacagatgatgcgggctgctcctgtgcggactgccgccccagccagaaaagagtttcggctattggcagcggtgcagtaatggccgcagccagcatcagtgccgccgtgcgggcaaagatgcacagtgcggcaaacagagcagccgcttccagaaacggcacgatatgcccctgcgcccgggcgggcggcagtgctttgctgcgcataaaataacctcccttccggcccaccggtgttaccccgccagccagaacagctgcgccacgctgagccttggctgcaaggcccggttgatggcaccggccagaagagccgagccgtgggcgatcacgctgtccagcgcccggggcgtgaccacaagatctgctccttcgtccgaatccatcaaggtggggatgcccgccgcgatcaccggcacgcccagcgctgccgcgtccagatgctttgcatgatccgcctgcgccgggtacagcccggtgtcggagaactgcacgctgcggcccagccgcgcgccctcggcactgcaaaggctgtccacgcagatcagggccgccggccgcaccgcttccaccatggccccggccagctggcgcagagtcagcccggtggaggccgacacccccggcgcaatggcggccaccggccggatgccttttaccggcagcgtgtgctgcggccccatggtgactaaaatcttctgcgccgtgcgcggaccgagggcatccgccgtgacccgccggtttccgatgcccagcaccagcaccggcccttccggcggcagcagggcgcgcagttctgccgcacaggtctcgatcaccgcagcgtcccgctcatccagcacgctgacgctgggcatttccagcgtgacataccgtccgcggggcttcgccagcccttcgcgcgcgatctccacccgcgttattgtgaccccgccgcgctttgctgtggcaagccttaccccggcaggcagcgccccctgtgccgcgccaaacatctcgtctgccatatcggtaaaacgcatttttctgctcctcctgcctgttttggggccaaatgccctctctgcacgcagaaagtatggaaaaaataaaacttttctaaacaaaaatcaaaaaaacgcttgcgctggtacgcgaaatatggtatcatagggtgcgctgttataggtagccaaggaggtggaacgaatgcctaacatcaaatctcagaaggaccgcgtcgtgcaggctgctgcagagcaggctcacaacaaggccattaagaccaacctgaaaacagtcgtcaagaaggcagacgctgccatcgatgcgaatgccgctgacaaggacgcaaccgtcctggctgctgtttccgcgatcgacaaggctcgcgctaagggtgtcatcaaaaagaacaccgccagccgcaagatcagccgtatggcaaagcgtgctaacaagaacgcttgatcgctttctgattgacgaacaaaacctctgtaccgggttcccggcacaggggtttttgttttgcccgcttttcagggcacggcagcaggccgctcaaaatcgcacagggtggcaaaatcgaaccccggtgcctgctccagaagctgctccggcggcaggccgtcgggcggctcggccagcagcgcccacgcagcccatgccgtgggcaccgccgccgcaagggccagccccggcagcgccagtgccgggcatgtatggaacgcactgcccggcggcagggctgccaccgcgcacaaggcctgtgcagcccaaagctcccacaaaagggtcgtccagcggtgcttcatccgcatcacctcctgttttgcacagtttaccgcagtgcggtggaaaaacagggcgaagggtggcggacaaagtgacaatgttctggtgtatttcttcttcagttctggtcgtgacttttgcccacccagctgcacaccacgccgcacacaaggctggtggtaacaccggccgcagcggcggtcagcccgccggtgaggatgcccacagcaccttcttcctgcagcgcggtgcgcacgccctttgccagcagatggccgaagcccagcaggggaaccgtggccccgcacccggcaaactcggccagcggggcataccacccaatggccgaaagcaccacgcccgccaccacatatccggtcaggatgcgggccggggtcaggccggtcaggtcgatgagcagctgtcccgccacgcagatggccccgcccacacagaaagcccagaaatagttcatcttacttctccttttccggcgcacgcagctccaccagatgcgccaccgccgggatggtctccttctgcaaaaaggtggtctggctcatcagggccccggtggctgtgaacagcacccgcttctggctgccccggcgcaggcgcggcaggatgtgcccgcacagcaccgccgcgcagcagcccgggccggagccgccgctctttacgctctgctcgtttgcatcgaacaggatgcacccgcagtctacatggtttttgatcaacaagccttctgcggccagcagctcccgcagcagctgactgcccacctgcccaaggtcgccggtatagatgcagtcgaactcctgcggttcggtgccggtatccttaaaatagtgcagcagggtggaagccgctgccggggccatggcagcccccatattgttgatgtcctttacctgataatcctgcacacggccaaaggtggcagcggcaatgccaacgccttcgccctgcggctgcaaaaggcagcatccggcagcggtggcagtccactgggccgtaggcgtgcgcaccgcgccgtagctcagcggcgtgcggaactgccgctctgccgcgcagaagtggctggaagccatggccagcagattgcgcgcagcaccgccctcgcacagagcagcgcccagcgcaaggccctcggccatggtgctgcaggccccgaacagcccggcaaagggcacgcccagctcccgcatggcatagctggatgccgtgcactgggcctgcagatccccggcaagggccagctgcaccttttcctgcggaagcgccgccttttgcaggcacagccgcgcggcgcgcagctgcaggtatttttccgcagcttcccagctggactggccaaagcggttgtctgcgctcagctcgtcgaactctgccgccagcgggccttcgctctcttttttgccgcccaccgctgcacccgcagcgatcaccggcagtgtctggaacagcagggtatccccgcaccggaccgtcataggcaaaatttctccttcgtggaaaatagatgaaaaacgttccataaaatgttgtataataacatcatgctgcaatcttatggcacacttgcccgtgtttatgacagcacaggcacacccgccatgcccagcacccacagcaccgcgccgtacaccaccgccgccagcgtgccgtacacgatcaccggcccggcaatggtgaacatcttggccccggtacccagcacccggccctcggccttgaactcgatggccgcgctgaccaccgcattggcaaagcctgtgatgggcaccagcgacccggccccggcctttgcggccagcttctggtaccagcccagcgtggtaagcaccgctgagagcacgatcaggctgcagctggtcagggtgccggcaaggtcggcttccacgcccatggcaagatagctctggcgcagcacttcgcccagcaggcagatgccgccgcccacgccaaaagcccacaggcagtccagccccaagggcgagtgcggcccgatgcgccgcacccggcgcgcatattcctgtgctgtcattttcatattgtttcccctccgggcatagcttgcccataggaagcaaactctatgcacatccaccggaaagaaggtattccagatgaacctgtctgtccatcctcatcaccgccgccatctgcggcccgccgtgcggcgcgtgctcaccgttaccgtcgtggcctgcattgccgtgggcggggcctcgttcgtgctgcacagccgttccgctgtgcctgccgcctcggcaacttccacgtccagcgcctcggcagcatcagaggcagaaagcagtctgctgaccgcccggcaggcgcaggccattctggatgatccccgcatggtgctggtgaaccacacgaacaaaatgccggacgatcatacctttaccaccaaggcgtgcggctcggccaccgctgtgaacaagaccctgcagaccgaagccgccgatgcgttcctcgccatgcaggccgccgccgcaaaggacggcgtgaccatctggatgcagagcggctaccgcagcgtggactaccagaagaacctctacgaccaaaagacccagtatttccgcaataagggcctgagcgaggccgaagcgaaaaagcaggcggcaaatatcgtgaaccctccgggctactcggagcacaactgcggccttgctgccgacctgaacagcccggagcacactggccttgacacgggctttgaaaagacggctgccttccgctggctgaaggctcacgctgtggagtacggcttcatcctgcggtaccccaaaaacgcagaagccgttaccgagatcacctacgagccgtggcactggcgctatgtggggccggaaaatgcggccctgatccagcagagcggcctgtgccttgaggatgccgttgccgtgctgcagaagcttgctgcaggggagaagatcaccggttaaaaatccgtaaaaccgaggggcttttcgttgcattttgcacacagttatggtaagataacaatagtctgccctgatgcaggaccgctttgggcagctacaaaaatgttttgaacaaaagaaggaatattttatgataaatcgcacaaaaatctttacaattgctctcaccggcgcgctggctgctgtcgctcttactggctgcggcggttccgccagctcttcggccgctccctcctccgtttccaccgctgctgcggaatctcccgcttccagcgccgccgcatccgctgttgtggacaatgctgccgagaacggctctgatgcactggacggtgttttcaatgctctgctggaagccgaccccatctccaaccagttcgagatcgcagccatgaacattgagtacgatttcggcctgcaggcagatgatgtggtaagctacaagggcgtgaagagcaacgacaacggcgatgccggtctggtgctggtgctcgaagctgccgacggcaaggccgaggacgtagccaaccagctggcttcctaccagcaggatcaggtggccttctacggcaactacgccgagtttgctcaggcgcaggataacgtggagaacgctgtcatcgccttcaagggcaacaccattgtcatggtgatcgcatccaacgagtgcactgccgatctggacagcgccgtggacagcgcactggcagactgaatctggatccacccaaggccggtgccatttgcggcatcggcttttttcggctaaaaggaggctgacgctttggttttcagcaccatcatctttctgttccggtttctgcccatcacgctggcgctgtattaccttgcgcccgcaaagctcaagaacaccgttctgttcctctgcagtctggtgttctactgctggggcgaggtacggtttttcccggtcatggtggtcctcatcctcatcaactacatcagcggcctgtgcatcgagcacttcgaccaaaagccggccctgcgcaggacatttctgctggtggccctcattggcagccttgggatgctgttctacttcaaatacgcaaactttgtgctgcgcagcgcaaacgccctgctgggcaccgcctttgccgagatccagggcattggcactctgccgctgggcatcagcttttacaccttccagaccctttcctactccatcgatgtttaccgccgggatgtaaaggcagagcgtaatatcatcgactttggtgcctatgtggtcatgttccctcagctgatcgccggccccatcgtgaaataccgcgatgtctccaaccagctgcacgtataccggcaccgctacagcctgcagcagctcgaagaaggcatgaccctgttcacctttggcctggccaaaaaggtgctgctggcggatgccatcggtgctttgtggaccgacatcatcggcgttgcggacagcccttccaccacctttgtgggccttgccaatgcatccaccccgctggtgtggctgggcatcatcgcctacagcctgcagctctactttgacttttccggctactccatgatgggcattggcatgggcaagatgctgggcttcgacttccccgcaaacttcaactacccttatatctccgcatccatcaccgagttctggcggcgctggcacatgaccctttccggctggttccgggagtatgtgtatatccctctcggcggcaaccgcaagggcctgaagcgccagatcttcaacctgttcgtggtggagctgctcaccggcatctggcacggcgcgaactggaactttatctgctggggcctgtactattttgtgctgctggctgtagaaaagctgttcctgctgccccacctgcaaaagggcagagtgtggccccacatctacaccttgttcctcgtggtggtgggctgggccatgttcgtgggcaacgatacgggcgtaagcttcggtctgctgttccacaaactgttcgttccttccggcggtgtttcgccgctgtacttcctgcgcaactacggtgtgctgctggtggtcagcatcctctgctgcaccccgctcattgaaaagatttggaacctgctcaaaaagaatgccgtcacccgctgtgccgccattctggcgctgctggtagtctccaccgcctatgtggtgggcagtaccaacagcccgttcctctatttcaacttttaaggaggcgtgaagatggacaagcattccaaaaagtcttcctcgctcctgcactacccggtgctggtggtgttcagcctgttctttcttggtctgttcgcactggaccttattacaccggaccgcgcctacagcgagatggaaaacaccaccctttcccagcgcccggcgctgacccagctttccgccaaggggctgaacagctactttaccgcctacacaaagtacgtgaaggatcaggtgttcggccgcgatgagtggatcagcctgcagagcgtagtggagaccaccctgctgcagaaggagcagaacggcggcatcctgctgggcaaagagcacatgatgttcccccgcaccttcagcctgctggacagcgagaaccgcaccctgcccaagaacaccgccgccgtggaagcactgtgccagcgccacccgggcaaggtggatgtgctgctggccccggcagcatcggtcatttacccggaaaacgtgcctgcaaacgcgccgttgctggatgaggatgcctatctcgaccagctttccgccgccgtacaggccgccggaggacgctttgtggatgtgcggcagacccttgccgaacacaaggacgaatatatctactaccgcaccgaccatcactggacgagccttggcgcttattacgcctaccagcagctgtgcggtacgctgagcctgacccccttcgaccccgccgcgcacacggctctgaccgccgaaaatttctacggcacccactactccaaggcccgcacatggaatgccgtgccggatactatcacctactacgacctgccgaacagcctgaccatctataatgtcaccgctgcaggtcagcccgcagacggccagaccaccggcctgtacgacacggacaagctgaacgtgtacgataagtacgccatgttcctgcatggcaacaacggcctgagccgcattgagggcgacggtaccgggcgcattctggtcatcaaggacagctacgccaactgctttgcaccgtatctgacggcaaactacgcccagatcgatgtggtggacttccgcaactacaactacggtctggatcagctgatcgcggataacgattatgaccagatcctggtgctgtacagctttgacagcttcaagagcgacccgtacctctaccgtgccggtgtggccgggtaaacatggcagcgccttttccgcaaaggaaagggcgctgttgttttatgtcaaattattgcagtcttttttcacaaatttttctagttcttttcggaagtctctccagtttttgcgcactctgcccattcaccccttgcaaaaaatcaacgggtgttgtacaatggcgatatagagcagttgctcttcatcgatggttcgatctggtgtgaacagtgcatagaatgtgctgatacgatctttgattcaaaggagtgttattatggaaaacaagatcatgatgcctgcttcctacaacgttctttcctgcgaagagatgacctacaccgagggcggtgctacctttacggaagctctgctgaactggattccgcccattggctggtacatgggtgttaccgccatgcgcaactaccgcaagagccaccccaacgactggctggataccggtctggatgctctgagccgcgatatggattccagtgcgcagaacatgctgcgtgatctgggacgcatcgtctgggtcaccgcgaccagcgctaccggcgttggttttctggtcaatgctgccatcgtcctgctctgaccctgctcataagatccgtccggagagaccaaagacccctttacccgcggccttttccgccagagagggccgcgggcttttcatcaagcagaaataagaaatcggctgcctgagcactgtataccgtctgaacggtcttttgcctgcagagaacagcactgctttccttttcctgcaagcaactactcgcgtcatgcggcggcgcgccctgctttatgagaacgatctccaagcgcatatcccggtttatttttgggttttaaacagtgcgatcttgcactgtctggatagctttgattcaaaggagtgttattatggaaaacaaaatcatgatgcctgcttcctacaacgttctgtcctgcgaagaaatgacctacaccgaaggcggtgctaccgtcggtcaggctgtcgctgcatggctgtggcccggctacgctacggttatcggcatcaacacctgccgtgaagcacgcaagaaggatcacgacaactgggtatccaacgtctggagcgatatcaaagccgactgcaagggcaatgtgaccaacaccttctaccatgccggcatgatcttctggaatgctgcatcgaccatcagcagctttggcctttctgccgttatgtctctgggcatcatctacttctaattttcaggagtacaccaaagggctttttgcggcggctcttcaacggaagagccgccgctttttttatcaaacctaaaaaaggagttttgctttatgacgaacgccattacttatcctgctgcatacaatgttttgtcctgcgaagaaatgacctacaccgagggcggcgtaggtgttgtggaagccgccatggcatggttcccgctgtacggctggtacaaggctgtttctgccatccacgattaccgcaaggcaaatatcaactccaactgggtggaaaacggcatgaacgctctggttgcccatgctgaaaaaagccccacgaacaccatccatgacatcggctgcagcttctggttcattggttcctgcgcaaccatcatcggccttgtgcccaacgccctgttgatcttcggcaactaagtcccggtctctgttctgaaaaagcaaaagcggcggcacctcccgtttgggaagtgccgccgctttttatgttatgcggttttcagtctcagttgttgaacatgtccttcagctttttgaagaagcccttgcgcttttcgtagttttcttctttcagggtgccctcgaacttcttcagggcctcccgctgggtcttgttcagcttcttggggatctccacctcgcacttgacgtacatatcaccgcggccgcggccattcaggtactggatgcccttgccgcgcaggcggaaggtggtgccgctctgggtgccctcgggcacggtgtactccaccttgccgtcaatggagggcacctgcacggtatcgcccagcacggcctgactgtaagtgatgggcacagtgacccacacatcgtagccgtcgcgctggaacacctcgctggggcgcaccgtgaccatgacgatcacatcaccggaaggaccgccgtttgcaccggcatcgcccatgccgcgcagtgcaaagctctggtcgtcgtcgatgcccatggggatggacacctccagcgtctttttagcagccaccttgccgctgccatggcagaccttgcagggattcttgaccagcttgcccttgccgccacagcgggagcagggctgctgggtctgcatcacgccaaagggggtgcgctgctgacggatcacgaagccgcggccgccgcagtccgggcaggtctcggggctggaaccggcggcacagccgctgccgtggcactcggtgcactcctgctggcgggtgatggtgatgttcttcttacagccgtgcacggcctcgtcaaagctcagggtgatgcgcacgcggatatcctgacccttgcgcggtgcgttggggttcgcctgacgggacgaaccgccaaagccgccgaagccgccgccaaagatatcgccgaaaatgtcgcccagatccacgccgtcgccgccaaaaccgccaaagccgcccgcaccggggccgccgccgttctgtgctgcataggcagggtcaacacctgcaaagccgtactggtcgtacagctggcgcttcttcgggtccgaaagcacctcgtttgcttcgtttacttccttgaacttttcctcggcatccttatcgccggggttatagtccgggtggtatttcattgcaagcttgcggtatgcctttttgatctcggcatcggtcgcagtcttggatacccccagcacttcgtagtaatcacgcttttcctgtgccatatccactcacctctccgggaacgtttgatccgggaaacgccccggttggttcctcgctctataaccagcaagagccgctccggcaaaaccggagcggcttttgctattccacgcgtgcgtccgccggtttggccgggcacacactgctgtgttttttatcagacttccttgaagtcggcatccacaacgccgtcatcacccggcttctgctggttgtttgcacctgcgtcggggccgggctgtgcaccggcggcctgctgtgcggcagcggctgcctgatacatcttctcaaacacctggctcagggcttcctgctttgccttgatgtcgtccacgttgccggactgaacagcggtcttcagatcggccagcttgctctcggcctcgctcttcacgtcggcgggcagcttgtcgccgttctccttcagcatcttctcggtctggaacaccatctggtcggcaccgttgcggatatcgacctcttcacgcttcttcttatcgtcggcagcaaactgctcagcttccttcacagccttgtcgatgtcctccttggacatgttggtggaagcggtaatagtgatgttctgctccttgccggtgcccagatcctttgcgctgaccttcacgatgccgtttgcatcgatatcgaaggtaacttcgatctgaggcacaccacggggagccggagcgatgccgtccagatggaagacacccaggctcttgttgtcgcgtgcgaactcacgctcgccctgcagaacgttgacctcaacagagggctggttgtctgcagcggtggagaacacctgactcttgtgggtggggatggtggtattgcggtcgatgatcttggtgcacacgccgcccagagtttcaatgcccaggctcagcggggtgacatccagcagcagcagacccttcacatcgccctgcagcacgccgccctgaatagcagcgcccacagccacgcactcatcggggttgatgcccttgaagggctcgcagttcagttccttcttgactgcatcgtagacagcggggatacgggtggaaccaccgaccatcaggaccttcttcaggtcagagggacgcaggcctgcatcctgcagagccttgcggacggggcccatggtgcgatcgaccagatcagcggtcagctcgttgaactttgcgcgggtcagggtcatatccaagtgcttcgggccggtagcatcggcagtgatgaagggcaggttgatctggctgctcattgcgctggacagctcgatctttgccttctcggcagcttccttcaaacgctgcgcagccatcttgtccttgcgcaggtcgatgccgttctcggtctggaaggcatctgccatccagttgatgatgcgctcatcgaagtcatcgccgcccagatgggtatcaccgttggtggccagaacttcggtaacgccgtcgcccatctcgatgatggacacatcgaaggtgccgccgcccagatcgtagaccatgatcttctggtcttcttccttatcgatgccatatgccagagaagcggcagtaggctcgttgatgatacgcttgacgttcaggcctgcaatggtgcctgcgtccttggtagcctgacgctggctgtcgttgaagtaggcaggaacggtaatgacagcctcggtaacaggctcgcccagataagcctcggcatcagccttcagcttctgcaggatcatagcgctgacctgctggggagtgtactccttgccgttcagggtcaccttgtggtcggtgcccatgaagcgcttgatggaagcaacggtgttctccggattggtgatggcctgacgctttgccacctgacccaccagacggtcgccggtcttggtgaagcccaccacagacggggtggtgcgtgcaccctcagagtttgcgataacaacgggctcgccgccctccatgacagccacgcagctgttggtagtaccaaggtcgataccaatgatcttactcataatgaaaactcctctcgaaagaacaactcttattgtttatgtgatgctcaaatgtttgtaagcggatgttatattcaaaaccctttcgggtttctgctttgttattcggccaccacaacggtcgcatggcggacgatcttatcgcccagcttgtagcccttctggtagaccgtgatgacggtgccgctctcctgtccgtccggggcggggatctgctgcactgcgttcatgaagttggggtcaaagggctttcccagcgcttcgatctcctccacatggagggcatccagcgccttggcggccttgtccagcgtcatggtcacgccctttttgtagttctcatcggtggtgggggcgttggacgccatttccagcgtatccagaatgggaatgatctggttcaccgcaaaggaaatgccatcgttgaacttctggtcggcttcgcgggtggagcgcttgcggtagttctcgtactccgctgccatgcgcagcagctggtctttggcctgtgcagcgttggcttcggcagcgtccagctttgcctttacggcttccagctcacgggccttcttgttgaaccagccgccatccttcttcttgtcatccttcgggtcggcagcttcggcagcaggttcctgttcgggtgctgcctgctgggccttttcctcgggagccgtttcgggctgctcagcttcctgagccggagccgtcttttttgcttcttcgctcattccagatcctccttatagatcacagtccgccggggtacggcagcctgtggggtgtcttttcgtttgccgctcatgccctcgcccagctggtctgcaaagtaatgcagcagcggcatcagcttctggaagggcatccgggtggggccgatcaatgcaatggagccccacaggcctccgcccaccagataccggtcgctcacgatgcacaggcccgggatctgcggttccagatcctcgcccagcagcacgctctcactgcgttctgccggaggtgcgatcaggccagcggcctgctcctcgtcgttcagcagtgtgaggatgtcgcccaccttgccgtccagctggggccagtccagcaggtactgctcgccgcccagaaatacgtggggcttgacggaatcctgcaggatggcagccgctgcactgataacgggcaccagctccgggtcgatctggctgcacagctctgccagcagccgggtggaaagatccaccggcgctacaaaggtaaggttgcggttgagcagtgcggcaagtgctgccgcattctcgcgggaaagaccggtgcgcacccgtgccacacgggtacgaacgtaaccggccgtggtaacggccagcacagccgctgcgctgcggcccacctgaaccacttcatagtgggcgatgcacagatcctcggcacacggggtgctgatggcggcggtgcagccgctgatggcggccagcgccttggcggcacctgcggccagcttttccggctcatggtcgaggcttgcgaacaccgcatccacacgggcgcgggtcacacgatccagcggctgatcgtcggtcagcagattatcaaggtagtaacggtagcccttggcgctgggcacacggcccgcgctggtgtggggctgctccagcagacccagctttgtcagcgccgccatctcattgcgaagcgttgcgctggaaactgccatgtcaaagtagtttgccagcacgctgctgccaacgggctcgccttcgagaccatacagcgccacgatcgcctgcaagactcgctgcttgcgtgcatccattgtcatagcgcctgcctcctttttgcgttcgctttgtttgtttagcactccttgttcctgagtgctaagaccattatagccaattttccggtgctgtcaagccccttggaaaaatgttttaaaagattcataattctgtcataaacgaagaaagcgccctccttattataaggaaagcgctccggcatgttctttactcttccatctgccttgccagaaatgccgccgccacattcacggccttgagctgggcggcatccggcgtggccgtgcggtcttcggtcagcagggccaccacgccggtcacatcgcccgccgcaatgatgggtgcggcgcacaacaccacccggggcgagccttcgcagggcaggatgcacttttcggcaatgccctcgctctggtacaacctgcggccatccatcagcttttccagcggctggctgatgctgcggtcggccagctcccgccggccggagccgctcaccgtaaggatgcggtcgcggtcggccaccagtgtggtcagcgcaaagcttttgctgagcacctcggtatactgggccgctactgcgttcatctcgccaatgggcgaatactttttaaagatcacctcgccgtcgcccgtggtgaagatctccagcgggtcgccgcggcggatgcgctgggtgcggcggatctccttggggatcaccacccggcccagctcgtcgatgcggcgcacgattcctgttgctttcatgtttttgctcctccgtttccttaaaaatgcctgcagcactagtatctgtcaggccgggccatttatacctgccgcccccgcgcaaaaagacctgcacggaaagctgcctcttcgttgcgtttccggcagggttctgctacaatgatacaaaaagccgttttcataagcacagcaccccgcttatgaagacagctcctaaaattctactgagaaaggcaggtgtccggatgccgaacatcctcattctgggcggcggtgccgccggtcttgcagccgcgctggcggcggcacaaagtgcccccgctgcacaggtcattgtgctggagcgcaacccgaagccgggcaaaaagctgcttgccaccggcaatggccgttgcaatctggataacaccggcattgcaccggagctgtatttcactgccgacccggcagcacttcgtccgctgctggatgccgtaaataccgccgacccgctgcgctggttccatgcgctggggctttatacccgcaccgacgaggcgggccgggtgtatccgtactccaatcaggcggcggacgtgctggccctgctggagcatcaccttgcgcagcaccatgtgcagctgcgcaccggctgcaccgtgcgcaccctgaaccagagccgcagcggctacgccgtgcagttcgagacggcaggcggctctgccgaaacgctgcgcgccgatgccgtcatctgcgccatgggcggtgaggcagggccgcagttcggcaccgacggctttggcacccggttcgccgcccagtgcggcggcagggtggagccgctgtacccctgcctgaccgccctgcagtgcgcaaagccccgcaaagcgctggctggcatccgtgccaaggcagcagcatccctgctggacggtgcccgtgtgcttgcctgcgagaacggcgaggtacagttcaccgattacggcctttccggcatctgcatcatgcagctgtccggcctgctggccccgggccgcggccccaaggctcctgctgtggagctggacctcttcccggcagtggacgaaaccgcacttgccagcctgtttgcggcccacgccgcccagacggcagggggcagcgctgctgacttctggctgggcctgctgaaccagaagctgggccgtactgtgtggtctgccgccgggctgcaggacagcgacgcgcctgccgtgctcaccgccgcacagtggcagaagctggcccacaccgccaagcactggcgctttgaagggctgaccccctgcagctggaagcaggcccagaccaccggcggcgggctggccctgcgggaggtggatcagcacttccagttcaagggctgtccgggcctttactttgtgggcgaaacgctggactgcgcaggcagctgcggcggttttaacctgcactgggcgttcggctccggccttgtggccgggcgcagcgctgcaggccatgctgcagcaggccgtgctctgccaaaagcctccgcgcccgcaaagagcaggaaaaagccgcacaggtaaaaatgagctttaaattttcaacaaaagcttgacatcttgtgcagatcgcattatcataaagacaataaaagtttgttcagaggattgagcagaacaagcaaggggagagtcgaaaggcccttttgtttgtcctgctctttttcttttattcggcaaacggagcgatcaggaggtttttatgctggatgtagcaattatcggctgcggtgtcattggtgcggcagccgcctatgagctgtcccattacccgctgcagaccgccattttcgaggctgaaaatgacgtggcagactgcaccaccaaggccaacagtgccattctgcacgctggctacgaccccgaaccgggcacccggatggcgcggctcaacgtggaggggtccgcactggccaaggagatctgcgcccggctggatgtgccgtacctgcagtgcggcagtctggtgctggccctcagcccggaagagctgccccacctgcagaaactgtatgagaacggcatcgccaacggcgtgccgggcatccggctgctttccgcagaggaaacgcttgccatggaaccgaatctggcccccactgtcgttggcgcgctgtatgcgcccagcgccgccatcgtcagcccgtgggagtttgcgctggcaatggcagaagtggctgtgcgcaacggcgtggagctgcaccgcagctgccctgtgacccgcatcgaaaagaccgccggcggctgggcactgaccaccccctccggaattgtggaaacgcgctatatcatcaatgcggcaggcatctcggcgcaggccgtgcacgatatggccgcaccccacaaatttaccatccagcccacccggggcgaatactacctgctggataaatccgagggcagccgtgtgcaccacgtcatcttccagtgccccaacgaaaacggcaagggcgttctggtggcccccaccgtccacggcaacctgatcgtcggcccgaacgccgaccccgtggaaggggacgataccgcctgcaccgccgccgggctggccttcgtcagcgccgcagcgcgccgcagcgtgccgaacatccgcttcagcgagtccatccgaaattttgcgggcgtccgtgccaatgtggacacgggcgacttcgttatcggcgaagcggaaggcgcacccggcttcatcgatctggcgggcatgaaatcgcccggcctttccagtgcaccggccgttgccagagaagccgtcaaaattctggaagctcacggcgatctgcccgcccccaaggcggattacagggatggccgcacccaggtgcgcttcaaggagcttccgctcgaagaaaaagcccggctcattgcaaaggaacccgcctatggccgcgtgatctgccgctgcgagacgatcaccgagggcgaaattctggacgctctgcacgaagagatccccgccaccaccattgacggtgtcaagcgccgctgcggtgccggtatgggccgctgtcagggcggcttttgcgggccgcgcgtgctggaactgatcagcaaaacgctgggcatcagtccgctggacgtgctgcaggataaggccggcaccaacgtcttactgtgcgaaaccaagcaggagggagagcaccatgattgatctggtcatcgtcggcggcggccctgcaggccttgccgcagcttacagcgcatggcagcatggtctgcgcgatatccttatcttagagcgcgacaacgagctgggcggcatcctgaaccagtgcatccacaacggcttcggcctgcaccgctttggcgagcagctcaccggcccggaatacgcaggccgctgcattgaactgctgcgctccaccggtgtccgggtggagctgggcacgatggtgctggaagtcaccccggacaaaaagatccactgcgtcagccgggaaaagggctatcagattttggaagccagaagcatcatcctctgcatgggctgccgggaacgcacccgcggtgccatcggcatcccgggcactcgccccgccggcatctacaccgccggtgctgcccagcgctatgtcaacatggagggctatctggtaggcaagcgggtgctcatcctcggcagcggcgacatcggcctgatcatggcccgccgcatgacgctggaaggtgccaaagtactggcctgcgtggaggtcatgccgtattccggcggcctgacccgcaacatcgtgcagtgcctgcaggacttcgacatccccctgtatctgtcccataccatcgtggatattcagggcaaggcccgcgtggaaaaggccaccgttgccaaggtggacgaaaaccgccgccccatcccgggcaccgagatggaatttgatgtggacaccatcctgctcagcgtcggcctgatcccggaaaatgagctgacccggcaggcgggcatccccatggacccccacaccaaaggcgcagtggtctacgagaatatggagaccggcatccccggcgtgttcgcctgcggcaacgtggtgcacgtgcatgatctggtggacttcgtttccggcgaaagcgaccttgccggtgcttctgcggcggcctatgttttaaagggcgaagcctccgatacggttgtgcttgaccttgtgccgggcaatggcgtgggctacaccgtgccgcagcgggtgcgccccgctgatgtggacaggagcgtgaacatttccttccgtgtgcggcagaactacggtcccagccagatcaccgtgacctgcggcggcaggcagctggcccggttcaagcgccagcgcatggctcccggcgagatggagcacatcgcactgcccaaagtcctgctggaaaaagcagacggcccgctgaccgttgcggtagaggaggttattgcagaatgagcagcatcaaagaagtcatttgcatctgctgtccctgcggctgccacttgcaggtggacccggaaaatgattataatgtaactggaaacgcctgccccaacggtgccgcctacggcagggaagagctgacccaccccactcgcatcatcaccagcaccgtgcgggtggagggcgggctgtacccgcgctgcccggtaaaaactgcgcaggccgtgcccaaagagaagatgaccgaggtcatggctgcgctggaccgcgtcaccctgcacgcacccgtccgcaccggacaggtggtgctggcagatgtgtgcggcaccggcgtggacgttgtggcgacgcgaaatctgtgatacacactcctgaaacgatacggaggtagcaaaagcatgagtacaaaatatgttctggcgttggatcagggaaccaccagcagccgtgccatcctgttcgacaatgagcagaatatcattgcggtgcagcagcgcgagtttgagcagatctatccgcagcagggctgggtggagcacaaccccatggagatctggtccacccagtatggagtcatgaacgaggtggtggcccagagcggtgtcgatgcccacgatatcgccgccattggcatcaccaaccagcgggagaccaccatcctgtgggaaaaggccaccggccgccccatctacaatgccatcgtctggcagtgccgccgcacggcaccgctggtggatgaactgctgcagcagcccggcatggcagactacatccgggagaacaccggcctgatgcccgatgcctatttctccgcaacgaagatcaagtggatcctggacaatgtgcccggtgcgcgggaacgggccgaggcaggggagatcctgttcggcactgtggacacatggctggtctggaagctgaccggcggcagagtgcatgtcaccgaccgcaccaacgccagccgcaccatgctgtataacatccgcacgctggactgggacgacaccctgctcaaagcgctggatatcccgcgctgcatcctgccccgcgtgacggattccagcgaggtctacggcaccaccgatctgtgcggtgtgcagatcccggtggccggcattgccggtgaccagcaggctgcgctgttcggacagagctgctttcgcaagggcgaggccaagaacacctacggcaccggctgctttttgctgatgaacaccggcgataccatctgccgcagccggaacggcctgatctctaccatcgccatcagcctgaacggtaaggtggagtacgcgctggagggcagcgtctttgtgggcggtgccgtcatccagtgggtgcgcgacggcctgcgcatgatccaggagagccgcgatgcggaatactatgcccagaaggtgccggataacggcggcatttacatcgtgccggcctttactggtctgggtgcaccgtactgggatatgtacgcccgcggtgccattgtgggcattacccgcggcaccacccagaaccatatcatccgcgcggcagaggagtccattgcctaccagagcgccgatctcgtggctgctatggaaaaggacaccggcgtgcccatcacctcgctgaaggtggacggcggtgcatcccgcgaccagttcctgatgcagttccaggctgacatcctgaacaagaccgtgctgcgcccggccatccgggagacgaccgctctgggcgctgcctatctggcgggccttgccaccggcgtatggaaggaccgggacgagatccgcagcctgtggcactgcaatatgacctttgccccgcagatggacgaggccgagcgcacccgtctgctctccggctggcacaaggctgttggccgaagctgcgactgggcagagcattgatagttttcgcccgactttatggttcacgcacaaaatattttttaattgtttagtttctattgacattttgttacaaaacgctatactagaagcatcccaagagaagtgagatggggatgcactgtatcgtccagatgcagtgtgtccccatttttattacggaaaaatcagattcaaaaaggaggtcccaagcatgtcgtatcaaaaaggtaggttgaaaaacagcaaattctggttgtgcctgtcactgattctttgccttgtaagtgccatcgtagcgtccgctgtacaaacttctggtgggatcaggatcaaggaaatgagctgggaaagtccctctggacaccagctggccgcatacctttacattccacagaatgcaaccaaagacacaccggcgccgggtgttgttacaatcgaaggatggtataacaacaaagaaatgcaggacttgtatagtattgagctggctcgccggggatatgtggtgctggcacttgatctgcacagtcatggcgactcggaaagcctgtcgattgcagaactttacgatggtgctgtgggcgtcgatggtgcagttcagcttattgcaagccttccgtacgttgacacagctcgtattggcgttacaggccattccagcggcggtacagctgctaatatggcggtagagatcgataattcccgggaaactcctttgattgctgctgttctgcagcaggctggtgactggcaggatgacaccggcggtgatcatagcggagattacggctcacgcagtgtaggcattattgccagtacccatgatgacttttactttggaacctatgatgacgctggaaatatgctgaccaatccggcagccttcatggaaacagatggtgctaaaaaattcctgaattttaatgaggacggctttgccggtatcgcagaaggcggcaaatattatacgcgcgattttgatggaaagaccgcttatcgcgtgatttatcggccgaacatgatccatcctctcgttgctttttctactacttgtgtcggctatgccgttgatttttttgatacaacgctcggcgctccaaagcccctgcctgccagcgatcagatctggcccattaaagcggtgttcaacagcctcggcgtgatcggtcttttgatcttcatggtcagtttcacgctggttctgcttgatactcccgtattttccgctctccgcagtggtgaaattgtacagccagcccctgtgcaggacagtggagccaaggcatggtactgggttctgctggttatcggtgcagttttttccggttcaagctttttgttctgcatgaataccgtttactcaaagacaacaaacttctttgtgcagaccggccccctgacgatcggtacatgggctgctctttgcggcgtctttgcaatattctgctctgctgttttttacggtgcttatggaaaaaaacacggttggagtgctcgaagagcgggtctttatttgaatctggagcagctgtggaagaccattgccctcgctgttatcgtgatcgttgtttcgttcggccttgtttttgcagcacactatttcttccaagttgattatcggatgtatgtcgttgcgttcaaaaccttcggcgctgataaagtgctgatcgcacttcgctatctgccattcttcctgctgttctacgttatgaactcgatctcggcaaattgcttcaactacaacaccattggcggaaaaaatggcaacatcttgatttttgcattctttaatgcgcttggtgctatttttgtggttgcaagtcaatatatctacttctatacaacgggttatcagctttatggtttgaccgaaggccagcgcattggtcccatttggctgttcccctgtatggttcttctgtttgtcacgcccatcatgtcccgcatcatctacaaacgcacccgcaatccgtacattgcaggtctgataaatgcaatgtttattgtaatgatcagctgttccaatactactaccattctgggcggcggtgagctgattgcaaccacattctgataaaacctagattttacattacagccgccgtgtaacttatttacatggcggcttttttgtagaataatataaatcaagtaattgataaaaaaggagtcttacc

SEQ ID NO: 1180 - DNA, 2996 bp, Unknown
  gut microbiota DNA sequence
cctgactgctgcgctggcttcgccctgcagcgccgtttttctgctggcgagcaccctgctcaccgtagacggtctggtgcaccgcatacatgatgccggaaaactggccgtggttcacatcgaccttgtggacggcctttcgtcgcgggagatcgcggtggactccctcaacgccctgtgccacccggacggcatcatttccacccgcccgaccctgatccgccgggcgcgccaccgcggcctgttgaccgtccagcgggcattcatcctggattccctctcgctgaccagcctgtccggccagctggagcagggcaagccggattttgtcgagatccttcctggcatcatgccccgagtcatcgccgagatcagcgcccgcacacaggtgcctgtcattgcaggcggcctgctgcgggacaaagccgatgtcatggccgccatgcgcgcaggtgccgccgcagtttccacctctgcgccctccctgtgggatatctgagccagaacaagatcccagctgaagtacgaaaagcataatcgtatcctggtgttttattggatatgcccgcccaccgatggagccggatctccacggtgagcgggcattttttcgtttttattcgattcgagtgaatctattcagcctgcggattaactcgataatttaaagcaatcctacaagtcgcactccccttaaagtctttctgcttcctgcatcttagcatcatactggatggcagagattggcacgaagccctcgatcatatccagtttgctgttgacaaggtcatcatacacatctttgatggacaacgtaatggaaggctccagctgttcatttgcaattacgctttccaccagtgcttgtttgtttttcagtttccgcgccatatcgggcaggaagtgataattttcaatcatgcgcagaatgatgtttgccataaaatttccgcggatgctgctcaactcgatataaatcgctccggcatcctccacggaaatttgtgcgatgctcatcaggtaatcagccagagtcgtttgcgtatcgttcaaaattccctgacttgccatactgcgttgcaggatattcatttttcgatagtcctgaattataccggtttttatcagtacattccactactttatgccgtcacatgggtggcattctctttcaccgaattgatcgtatccatcagttcactgcctgtttttccatcaaacaggcgggtaaacaggatgggttggtcaaagggtggtttcatcagcaccgctttgctttccacataaccgttctgctcgatgtaatgaatgaccttctgcacgaacgcgatctgcttcgcattcagcgattcgtcgttgatgaacttggaaaatgcctgcatggcagcatcgtggtccagctttgccactttacgcaccagcagaccaaagggtgtatcccgaaactcccgtgcatagtcctctttgctgcccagctcacaggtgaagatatgttccagctcggtatagtcgccccgggaaagcggaatgttctgggtcagcttgtggatggccagcgtatcgctgcggtgctccatgatgtagcggttcacacgttcccggtactcgccaaaatcgtagccggaatccagcgctttgccctcggtctgttccagtaccgggtcggcaagggccgtgtagacaggcttttgcccctctacaccgtccaccagaaacttgatgagttcccgcagttcctgccgcatttcctcaaagcggagcagatcatgcgaggtcaaaaattcgtctgtctgcacctcccggatgaggggcagctttgcctgcacctgcgggatggtagccttcccttccagcaatgccgctgtgctgcgcagctgtttctgggcgcggctcagccccggcagaccttccagttcacagagcagcaagccatacacaaagttatcgaaccgcttggcggcctcgtccttatcgtccagcgagatgagcggtgccacctctttcatcagagtacccttgtccgtttcggtcaggctgacaaaggcttccggcttttgatagtgttccacggcctgtcggtgcagccgcacggataccagctctggattcagcgctcccacttcggcacggcaggtctccgttaagatcttgcgccagttctggtaactttcgtccgcataggctccatcctgcagcgcggcggcgatccgcacctgcttgcagaaaatgctctcggacaggcttttggtgtccgcgctctcgtagccgttgggtttctgacggaaaaattcaaagttgccgcagtagtcgaagatcagaaaccgtcgtttgcccgtatattcgccgtcgatggcatccacgcaggcaagggatgggcagagccgcgtaccacggccgatcatctgccagaacttcgttttgctgcgcacttttttgaagaacaccagattcacgcactccggcacatcgatgcccgtgtccatcatatccaccgagaccgcaataaacggcggcttgtccggctgtttgaagtcgtcaatgatggactgtgcataggcgtcatcgcagaccacccgctggatgaatcccgggtactgggtctccagctgcgggtagagcttgccaaagcgttcccggataaactccgcgtggcgcttgttctgggcaaagatgatggtcttgccgatgcggtcgccgcctgccgtctggatgccccgttccatcaggtcttgcagcaccgtgtccacggtgttggcgttgaagatgaacttgttcagcttttcggacgggatgaaggtgggcagggtatcgtcctcggcaaaatcgtcctcatagcgggccttatcctccggtgaaagctggtcgtagtggatgccctcttctgtgaatttcgtcttgacctcgtagttgtagtaaggcaccagcacatggtcggtgtagaccgccgtgtcgtaatcgtaggcgtaggtgggtatgccgtgctccatatcgaaaaa

SEQ ID NO: 1181 - DNA, 1632 bp, Unknown
  gut microbiota DNA sequence
atcagcccggtcggtattatctgtggttccgtgctgggacttatcacggtttggttcgcggcatcttctccggcacggcgggcggcaaaagcttctccgatcacagcagcaactgggaatgcggtggaaaatgcagcggattctccgtgtcatgctcggttgtttggaagtcgtgcagagctttctttgggcgtgagccatgcaacctcgtccaaaaagaacttgcttctgatgacaggttcctttgcgttaagcattctcctgtttttgagcttttcggttttgcttcgatgggttggatttgcgctgaatccgttgcagccctacacaccggacttatcggtggctgaaacatccgggcaaaatgtccttgacccggtgctggtggagcagctggaagctctgccggaagtcaaacacgcattcggacggatgtattgcccgctcccggcggaatatcagggaaaacaggggtccatcgacctgatttcatacgatacgatacagtttggctgggcgaaaaaagacctgattggcggaacccttccgcaggagccggagaatggcacataccctgtgctgacggtattcgacaaaagcaattccctgaccgtgggtgataccattcagctggaggatgcaaagctcacagtcgtgggtgtattgaacgacagtccgttcagtagtaccgattccccgattgttatctgcaccgaagaaaccttccatcagctgaccgggcaaaaccgctatgcggtgatcgatattcaattaaaagataccacagcagacgcagccattgcacaaatacacaccctgctgagcgacacgttaaacaagcaggttgttttttccaaccgaatcgaaggaaatcggatgatacaaagcacctactgggcgttccatctggtggtctatgcgtttctcatcgtgattgcaggaatcaccattctgaacatcgtcaacagcatttccatgagcgtgtcggcacgaatgaagcagtatggcatcctgcgtgccatcgggatggatgatgcacagctgaaacgcatgatctctgccgaagctggcacctatgcggtgtccggtcttgtggtaggcattgcgctgggtcttgtgctgaatcggaagctgtatatcctgctcatcacccattatttcggtgcagcgtggcaggtgccgtggggctgtcttgccgtgattgtcgtagtcgtgctggcggctgtggtgctggcagtatataacccggtaaggcgaatcctcatgcagcccattactgcaaccatcagtgaattataaaccagaacaacagatgcccaccagcttatggcgaaaaccataggtcggtgggcatcgtgttcttttataggggcttaatcttccggtctgccgtggtcacaccccagcgacagatagtgctccatctcccctctcagcaccatctgtgcatactccaagggcttattgtagagcagccagtccagctctgcccgctgtgccggggtattgccgtactcatcctcgacggcgatgcagtcgatggaaagagtggtgtatgacgttcgcaaacgtagcaatggccaaacccctttagcatataatatgattgagtgcttttaaatttaagcgctt

SEQ ID NO: 1182 - DNA, 1626 bp, Unknown
  gut microbiota DNA sequence
agcacaacaacatggcacaatttgagcctgcgctgctgatgaaatggatcttcaaaactgccatttcggtctggatgatctccaacactttcgatatcatcatggcggtgttcgacgtgactcagcaggtggtggcaaattccagcggcattatttctggcaacacgcgggtgaacgacatcgggctttccatgctgcaatccagcatgatgcagatggacgtcggccccctgttcgggctgttcttgcagtccttcttcatcggtatcaccatgcgcatcctgtccatcgtgattttcgtcatcgtctacggaagaatgattgagatctacatgatggtcagtctggctccggtgcccatggcaacatggggcaaccatgagcaatcccatgttggacagaactatcttcgttctctgttcgcgctgggatttcaaggtttcctgatcctgatctgcgtggcgatctacgctgttctgctccagaatgttgcaatatccggggatgccatcaactcgatctggagcatcgtggggtataccgtgctgctctgcttctcgctgttcaagaccagctctgtcgccaaaactctgctgggtgcccattgattcggaggtgaaattttggcagcttatatttccgtgccgcgcgatttcagcaaggtgaagtccaaagtagccttcaatttgaccgcccggcagctcgtctgttttggtgcagcggcagtcgtaggggtgccgctgttctttgtcctgcgggataccgcaggcaattccggcgctaccctcggcatgatggcggtcatgctgcctatgttctttctggccatgtatcagaagaacggtcagccggctgaaaagatcctgcggtactactttcaggcgcgctttgttcgcccgaaggtgcgtccgtaccagacccgcaattactatgcactgcttatgaagggagatgacacccatgattccgtttctgaaaaagaataaggacggcaaaaagccgcccaagtccacggtgccccgcacggcacaggagagcattccgttccagcggatgtttgaggacggcacctgccgtgtccgtcccggttactacacccgcaccatccagtatcaggatatcaattatcagctcgcgcagcaggaggacaagaccgctatctttgaggaatggtgcagttttctcaactttttcgacagctctatccactttgagctgtcctttgtgaataccgcaaccgattccgcagactttgaaaagtccatccgcatcccgtaccagcaggatggttttgacgatgtgcgagccgagtacagccagatgttgcggcagcagctttccaagggcaacaacggtctgaccaagaccaaattcctgacctacggcatcgagggcgatagcatggcgcaggtcaaaccccggttggagcacatccagaacgacctgatgaagaacttccaccggctgggcgttctggcaaagccgctggacggcacggagcgtctgcggctgatgcatgggatgctgaacatggatggagccaacaagttccacttcaactggaaagaccttgtgcccagtggtctgtccgtaaaggatgccattgcccccactgcgctggcgttt

SEQ ID NO: 1183 - DNA, 29824 bp, Unknown
  gut microbiota DNA sequence
ggtcagcataccgcccagccagcgagcattgacatagtgcatgccgcagcgcagagcctcgtcacggatggactcctgagcctgcttcttggtgccgacgaacaggatgtcgccgccctcagctgcaacttccttcacgtagttgtaagcctcgtccagcttcttcacggtcttctgcagatcgatgatatagatgccgttgcgctcggtgaagatgtactttgccatcttggggttccagcggcgggtctggtgaccgaagtgcacacctgcttcgagaagctgcttcatagaaacgactgccatagtaaaaatacctccagatattgttttgcctccgcacaccgtgatcccgggccgtatcggacggttcgggactgccctccacccatttgggcacaaaagggcatagtgatgcgtgtgtaatgccttgttataatatcacaaacaaacgccggttgcaagagtttttctctgttttttacaaagaaatcgtctgtttttcgctcatttgcctgtgtccacgccgctcaggcccgcaaggcccatgcgctgcagggcgtatcccctgccgaacatcaggtcgtactgcaaaagccagtgctctgcgctccaccgctgctggaactcggtaggctcctgcgtggtggtgccgtccagattcatggtggttccgcgggtattggtgcggctggccacacgcagctgacggttcaggaactggaagtagagcggctcttccagaccgtaaatgtccatcatcaccggcgagatatcgtaagcggcaatggtgccaaggtccacctgctgctggctgtagttggaccacatcagcagcgtggtctggtgcaggcgggggtctgcgctggaatcgctggcatagccggtagtggtgtagacatcgtaattggaatcgatggggttatagtggtcgccccagaacaccagaatgaccggctcgtccacctgcgagaagtattcggtcagtttgcccatcatggcatctgcatcccggatgccggtagcaaagtcctccagtgcacccacggtgctgggcttgaggcccgccgggtgggacagcaccttcacccgctcgtcgtccgggtagttgtccttgttataattggtatggttctgcatggtgacagcgtgcaggaagatgggcttgtccgagctggacttcatgctctcgtactgctggatgatctggtcggccatggaatcatcggtgacaaggccgctggtccagtagtgcttgcgcaccttggtcacgtcatgcatatcctcaaggctgataaaatcgtcaaagccgaggttggggtaagccttgtcgcggctccagtattttgcccagaagcagtgcacggctgcggtctggtagcccttgagcttgaggtaattgggcatggcgaacatgggcttggtcacatgctgctggtagggcttgctgccgctgggcaggaaggataccgagtagccggtaagggcttcaaactccacatcgcaggtgccgccgccaaagctggggctgtaggcccggccataggcgctggtctgctgcaaggcgtgcaggttcttggagacatcggtatcaaaggtgatgccgtactgttccagctccgagacatcccagtaggactcgtccatcacatagatgatggtgggctgcttcacctgctcgtccttgggggtcacggcgctgtagctggtggagtacagcgggctggtggcaaacttctggctctcgtccacattgtccagcagggcatccactgcttcctgcgagtattcctcgggcttcgagatctccagattggtgaggttggtcataaagccggtgatcacgccgtagtagcggtagtagcggtcctgcatccatgcatccggcgtaatgcccagcacctgcgtgacagcgggctgcaggtacacgccgaacaccagcaggcagagggccgctatagtggcggcactgcccgccagccggggtagccagcgctgtttgtgacggccgcggtacaggaaaaagctgcccgccatcagcaccagcaccacgatgatggtcaccaccatgctgggctggatcttgaggcccgcagcggatgccacaccggcagcctccgacacctgtgtcagatcccatggcaggaacggctcgccgcgcagctgcagggtgtaaaagttcaccgcgcagggcgcacagcccagcaccgccatgcccagcgtggacagcggcggacagcggaacacccagtccagcagcagccacaccagaaacagcagcagccacgccagcagataagccccgatgtgcgggaagataaaacttgcaaaaacgtctgcgctcaggctcccgcgggcgatcccctcgcccagcagcagcacgatcagcgatgccgccagcgggaataccatccgcagcgccaaaagcggtttgggagttttcataattcctgttcctttcctcatccttgagacctcagatcaaacgcaaaagcacgtttctttacgctttttgcacaaagcttctgcgattattatagtcacttccacaaaaaagtccaccctgtttttgcaaaaaatttacaaacccagcttcacgcgcagcttttgccaccatttgagctgttccggctgcggcggcgtttgcggcagggccgtgtgcaccagcaccgcatccgtgccaatggtctcgatctcctgccatggaatggtcaggctatcgtcccggccaagcaatccgaacagccttggccgccccagcaggatcaggctctgcagccgggcggtggcagggtcaaaggtcaggtcatcggcccggccaaggcagacgccctgctccagctgcaccacctctttttcacacagttcccggatggtcaatgcccttctcccctttctgccacagcttatgcagccgccgggcacatcatgcaaaaagcagtggaaaccgcatggcagattgtggtatactgtggtcagagcattccatgagaaacagaggaaattttaaatgtataaaagcatcgtgtttgatctgggcggtgtcatggtggattttgccccccgcgcctatctggtagaccgcatttgcaatgaagagatcgaagaacaggtgtacgacctgacctttggcagcgaggagtggaaacagctggatgcggggcttgtctcccgctttgacggcaatcaggccatgctgcgcaacgccaaggccgccgggcgcgagtttgaggtgcagggcgtgctggacgactggctgcacatcctgcgcccgcgccgccggatgcaggagctggtgcgccgcctgaagaaccatggctacagcgtgtactatctcagcaacatcccggaggacgtgctggccctgctcaaggagcgcggcgtgctggaccgctttgacggcggcgtagcctcctgcgaggtgcacatcaacaagcccgacccccgcatctatcaggccctgctggacaaatacggcctgaaggccagcgagtgcgtgttcatcgacgacaatctggccaatgtgcaggccgcattcacgctgggcttcgtgggcatccggatgaaggagagcgtgggcaccctgatccgcagccttgccacctgcaatgtggccctgcgctgacctccgtgacccaaaacagctcctgccggaaatgctctggcaggagctgttttgctgctttaggaattactttttctcgtagctctggcagtagtgcggggtctccacctgctgcgtatcgcaggtgcactgctcggtcactttgatctggggcaggtcgcacttgcagccgctcacattgtggcagcactcgcagacatcacaggtaacgccgatgttttccatatttatcacctctctgtccacagtatggcctgcgggcagggtgtttattctggaaaaatcagccagcctttttcgcttcgcgcttctgatccaggttcttcgggggatcctgcatgggacggggcctcctgtttaccatgcagccagatctgcacccagcttgcggcatgcagcctgaacatcatcgtccggggcctcgttgcagatcaggccctcaccgttcagcacctgtgcgccgtcgccctgagcacgctccacccagtcacgcatccactggccgtcgccccagccgtaggagccgaacagggcgatcttcttgccgttcagagaaccctccagatcagagaacatcggctcgaactcgctctcctccagctgctccgcgcccattgcggggcagccaaaagccactgcatcaaactcagccagctttgcggcgttcatctcgctgcagggcacgatggtgccgtttgcaccctctgccaagcagtttgccatggtctcagtgttgccggttgcgctccagaatacgactgctactttgctcataaagatcgtcctctctcaaatcaatattagttagatatatctaactttatgttccatgaaaatgcgtccaaccacgcagacgcatccccatttggttagtatcttctaaccaccgatagaataccacagcttcccggctgtgtcaagccttttatgcaaaaagaactgccgcggccgaaagtacgccgtagatcaccggctggtgcagcagatacagcaaaagcgagtgccggcccatccagcccagcgccgggcacaccgggcggcgcagcggttccatgcgtctgcggcccaccgccttgtgcaggtagtaccccgcccagaacaaaaacagccacggcagcagggcaaaataatcggtggaataaaaatcgaagggcagaaagccgaaaaacgctgtaaagtaattcgcgtaccatgcatccggcaacgcaaggcgcagcccgccgaagccgagccaacgctcgtccagatgataagtcagtgcaaacagcaccgccgaaaccgccagccctgcggcgggcgggatctttttcagcagcggttccagcacaccggtgagcagcatggcgctgcccagaaaggtcagcacaccgaacaccacccggtcctccggcatgaagaccagcgtcaccaccgtgaccagtgccccggcagcaaacacctgtgcgccgcgcttcagggtgcggtgtcccagcggcacgcagaagccggacagcagaatgaacacccagcagatggtctgctgccacagacgccccggcattcccgcgtaccagtccatccagatgccgaacaggaacatcatgtcccagcaggcatggtacagcatcatgctgaccagatccagcccgcgcagttcgtccagcagggcgtagcggctcgccggggccttttgctgcactcgtcgttcgttttccattttccatattcccctttgctgtgtttcgcaatacgatatgacaaattataacccgccgccgctgtgcctgtcaacggaatagttccgtaggttgaacaaaaaaaccgctgcacagcggcaaagccatgcagcggtcagaatggataaccggggaaaccttatcagacttcggtgttgaagtagcgcttcagcaggccctcaaagccgcggccgtgacgggcctcgtcctttgccatctcgtgaacagtgtcgtggatggcatccagattcagggcctttgccttcttggccagatccatcttgcctgcacatgcgccgcactcggcctcggcacgcatcatcaggttcttcttggtgctgtcggtgacaacttcgcccagcagctctgcaaagcgggatgcgtggtctgcttcctcgtaggcatagcgcttgtaagcctcagcgatctcggggtagccctcgcgctcagccacacgagccattgccagatacatgccgacctcgctgcactcaccctcaaagtttgcgcgcaggccatccacgatctcctgcggcacgccctcggccttgccgatgcccacaacatgctcggtgacgtaggtgttgccggtcttctccacaaaagcggaagcaggagccttgcagacggggcactgtgccgggatctcgccttcagcaatataaccacaaacggtgcaaacgtactttttcataagaatagacctccatcattctttttatatcagttagaaaacaggctgggcggtgttggtactcaccggcccttgtcatggctctattatagcgaattattcctagttagtcaaggataattttaagaataattactatttattttgccttacagataaattccggcagggtcactaaaaaccatcctcaaaaactgtgtgctttgccctgtgcaccttaaaaacagcaaagccgccctgcacacacaggacggcttctgccttgttcttccttcttctatgggagatcagacctgcaggttgctgctggtagcggcttcggagccgtcggcagcatcaaactcgtagtcgttgccgggcaggatagcgttcagcaggatgcctgcgatcgcggccacagccagaccggacagattgatggtaacacctgcaacggcaaagctgacaccgcccacagagttaaagcccagtgcgcacaccagaatgacagcggccacgatcaggttgcggctgttggtaaagtccacgcggttctccaccacattgcgcacaccgatggcagagatcatgccatacagcacaaagctgatgccgccaatgatgccggtggggatggtgttgatgacagcctcaaacttggggctgaagctcaggatgatggccaggacagccgcaatgcggatgaccagcggatcgtagatcttgctcagagccagcacaccggtgttctcgccgtaggtggtattggccgggccgcccagcaggccggccatggtggtagcaaggccatcacccagcagggtacggttcaggccggggtcgttgatatagttgtggcccacagttgcgctgatggcggcgatatcgcccacatgctccatcatggttgccagtgcaatggggatgatggtgaacagtgcgctgatgaactccgggctgccgtcgatggcaaacaggcccatggcctccttgtgcagagggatgcccacccatgcagcctcagaaatgcgctggaagtccactgcaccggtcaccagtgccactgcataggacaccagcacaccgatgaggatgggcaggatcttgaccatgcccttgccccagatgttgcacacgatcacgacacccagtgccacaaaggccaggatccagttggactggcagtttttgatagcagagggggccaggatcaggccgatagaaatgataatggggccagtgaccaccggcgggaagaatttcatgatgcggcggatgccgaaggtggagatcagcaggctggccaccagatacaccagaccggaaaatgcgatggctgcacaggcgtagggcagcatcttggtattggccacggtcaggttgccgtctgcatctgccagcatgggggccacgatggagaagccgcccagatacgcaaaggaggagccgaggaatgcaggcaccttctttttggtaatgaggtggaacagcagggtacccagacctgcgcacagcagggtggtggaaacgctcaggccggtgagcagcggcaccagcaccgttgcgccgaacatggcaaacatgtgctgcacgcccagaatgaacatgcggcctgcgcccagctggcgcgcgtcgtaaatgcctttggagtaatcgatcttttcgctcatgaagtttttctgcctcctacagaactcgcagcccaaaaaaagaggcaccgccgtcagcaaaacggcaatgcccttgaaatttgggaacaatgattccgcccggaaatgagaagtgcaatacagcgcagtcgatgattcttgtgcagcatggtgcgctccccctttcattcaggctctttccaaaccgccgccaaaagccccgcaaaaggccgcagcgagcagtccttcaagagattatagcagactttttgccgccgtgcaaccattttgcttaattctcctgtatttccagcccggaagtttgcgccgcttctcttgcaatccggcccaaagcgcactataatataacctaccattgtaatctgtattataagagaattatcaggagagtttatgatctatctggattattccgccaataccccggtagacgaagcggttttacagcgcttttgcgaggtggagcgcaattgcccgggcaatgccaattcccgccacgcagcaggcactgccgcaaaggctgccatcgatgccgccacccagagcattgcccgcagtctgaatgtgcagcctgccgaggtcatctatacatccggtgccagcgaggccaacaactttgccatcaagagcatcgcccggctggagcgccaccatggcagacacatcatttccaccccgctggagcactcctcggtgagcggcagcctgaccgccctgcaggagcagggctatgagatcgaccttgtggacatccggcaggacggcacggtggaccttgcccacctgaaagaactgctgcgcccggacaccattctggtggccgtgactgccgtggacagtgagctgggcgtggtgcagccggtggccgagatcgcggaaatgctgaaggcctgcccccactgccacttccatgtggatgccacacaggccgtgggcaagctgccggtcagctttgcgggcatcgacaccatgagcctgaccgcccacaagttctacgggctgaacggcatcggtgtgctggtcaagcggcgcggccttgcgctggagccgctcatccatggcggcgagagcaccaccctctaccgcagcggcacccccaccgtggcgctggcctgttcgctggcgctggcgctggaaaaggcagtgagcgagctgcccgcccgggtggagcacatccgcgccctgaacgcccgcctgcgcaccgggcttgcccaataccccaaggtgcgcatcaacagcccggacaccgccgtgccgcagattttaaacctgagcgtacagaacgtgaagggcaccgtgttccagcgggagctggatgccaggggcgtatgcgtctcggtcaaatcggcctgctcttcggacggcctgccctcccgcgccgtgtttgccgtgagccatgaccggcgcaacgcgctgtcctcgtggcgcatcagcctgagccacctgaccacggaacaggagatcactgattttatgcaggcgttcgatgcctgttacaacgccctgacgcaataaaaaggagtattatgaagcaagatccccccgccggccagcagcgaggggatcttttttactgtttttgaatgccgaacagtctgcgcagaatgccgcgcagcgccttggggcttcggatcacaactacctgcatatgctccccgcctttccgttttctggcccatcctatgcaggcaggggccggaacgttccggcaagggcagcagcgctcagtctgcgatggtctccaccaccaccagcgcaccgctgcgggtggagatggtgatgcagtccgacccggcagcgtactcgttgctgacgcccagcgggtagctggcggtcagctccgcatcggtcagctcatagtaggagccgcgctcgcacacgccctgcgccctgccctccatcgggaaggccgagaagaagaagtacttctccttcgggtagcggcgggtctcgccgggcatcacgtaggtgatgcggctgcgctcatccagcagggtggtgcgcacaccgcgctgttccagcccaaggccggtgcacaggtttgcaagggtgtgctccacccgtctgccgccaaggccgcccagcagcagcacctcgtcaaagcccttttccgagaccagctttgcggcatactcggtgtcggtatcgtccttcacatggggcagcacgatgatatcgtcgtcctgctgttccgggcagggggcggtgtcaaagtcacccacgatgatgttgggtctacgccccagaggtgcgcagttgcggtagcctgcatcacaggcaatgataaagtcgtccggccgcagggcctctgccagctccggagaaaccgggcaggccgaaatgatcacacagcgtgacatgaatctcttccttatcctttatactttcgggcgctgccaatccttcacgtccttgacttcctcgtacatggcgcagtagctgtcgtaccgggtctgggagagcctgccctcggccagtgcggcgcgcacggcacagcctttttcgctgcggtgggagcagccggtgaactggcactggcccagataaggcccgaactccgggaacgcatgctccagattttccttggggatgaacccggcgcggttcgcttccagactggcaaagcccggcgtatccgcaatgcgcccgccaaaggcttcaaagatcgtcacctcacgggtggtgtggcggccgcggcccagcttctggctgatggcactggtctcgcgctctgcttccggcagcagatggttcaaaagggtggattttcccacgccggagttgccgcagaacgcacacagcctgccgctgatccactgcttcacctcgtccagcccgccgccggtctcgtaatcgatgcggatgaacggcagggtcgatttttcgtaggccttacgcaggaattccgcctcggccaagtcgcccttggtgcacacgatcaccggctgcacgcccttgtccaccgcaatggcggcaagcttatccagcaccagcgtgctgggcgtgggctgggtggtgctggccacaaggaacagcacatccagatttgccaccggaggccgcacgaacacatttttgcgcggtgcgatctcggcaatgacggctgcaccgttctcggtctccagcgtcacctcatcgcccgccaccggcgtgatcttctgtttgcggaaaatgccgcggggcttgcattccacaatgccctccggcgtttttacatagtaaaagccgccgatgccctttgtgatatatcccttcatgcacgcctccgtcagctcagcagcgaggaccaccagtcggtcagcggtttctgcgaagggtcgccgctgcccgctgtgccctgttcggtgccggtctcggtgctggaagaagaggagctgctgccaaacaggccgctccaccagtcgccgccggtggtgctgtcgctgggtgcttccggttccggtgcaggctccggccctgcgcttaccacaatgttcacgcggccgttcagctttgtggtagagcctgccgctgggttctgactgatgacagtgcccaccggctggtcgctgtactgcccggtctggctgccaaggcccagatggttctgcaccagcagggtgcgggcatcagcggtgctcatgccggtcagcgagggcaccttggtggtggttgccacctgcgggcggctgatatacatcaccacagtgctgcctgcagccacctgactgcccgccgccgggtcggtgcggatcaccgcgccggatgccacagaggtatccacagcctgcgttaccagcaccgagacacccagctccttgagctgctgctctgcatcagcctgcacatagttggtcaggtccggcacggtaacgtactgggtgccaaggctcacagtcagggtcacattctggccctcgcgcaccgtgcggccggacaccggcgactgcttatagatatagcccgccgcatagttactgttgtactcctgctcccaggtaacgctgatctggccggagaccacctgctcggtggcagcagcctcgtcctgcgtcatgccgatataatcgcccagcgtgatatcggccttgttgttcatcaggttggaggaatcgttcaggatcatccagcacagcgcaaggcacgccagtgcaaatgcaatggtaacgccgaacagtgccggcaggaagatggtgcgctttttcttgcgcggtgcggcctttttgccgcgaggcgcaggcttttcggcctgacggtttgcacggttctggttcatggtacgtttcaccaccttttcgggagcatcttctgtaatatacttgtactcaaacatcacggaggggttgtgcacgtaggtgtccagcgcatccagcatttcgcgggcggatgcgtagcggttctgcggcagctttgccatggccttttcggtgatctccaccagtgcattcggcacctccggcgcgatttcgtgcaaagacttcggcttatcggagatctgcttgatggcaacttccaccatgtcgtctgcatcaaagggcagatgaccgctgagcatctcgtacatcatcacgcccaccgagtagatatcgctggtgcagtcggtctcatcgcccttggcctgctccgggctgatatagtgcacgctacccatggccttgccgctcagcagctggttctcggcacgggagatgcgcgcaatgccaaaatccatcatgcgcagctggccgttgtccaaaagcatgatgttctggggcttgatgtcccggtgcaccacaccgttggcgtgggcatgttccagcgcctttaagatctgggagatgaagtgcacggtctcccggttggtcagcctgccgccgcgctggttaaggtactcgcgcaatgtcatgccgtccacatattccatcacgatatactgcagatcatcattcaccgatacatcgtacacttttacgatgttcgggtggttcagcagcgagatggccttggattcatttttaaagcggcgcacaaggtccgggtcgtgcatatactcctgccgcagcacctttaccgccaccacggtaccggcaggcaccgggccgttgtgccccagcatgaccgccttgtagacgtttgccatgccgccggaaccgatcagctcccgcacctcatacaggccgtccagctttttgccgatcaggttgtccatcagcgcacctcctccacacacagcagcagcgcggtgatgttatccgggccgccgttctcgttggccgtgcggatcagaaggtccggcaggtcgtagaacctgccggtgcgcagcagctgttccagctgttctctgggcacggcattggtcaggccgtccgagcacagcagcaggatatcccctttctgcagcggtgcggtggtgaactccgagtccagccggtagtccacgcccagcgccttggtgatgatgttcttctgggggtggtgctcggcttcctccacggtaatggtgccgcagtccaccagctcctgcacataggagtggtcgtgggtgagctgggcaagcctgccgtcccggtacaggtacgcccgcgagtcgcctgcatgacacaggaacaccttgccgccgcgcaccagtgcgcacacagccgtggtgcccatgcccgccagcgattcctcacgcagggccttctggaacacaaagcggttggcgctgagcaggctctttttcaaaaaggtctcctcttcgccgggcaggcacttggaagcatactgctcctgaaagcagcgctcgatcacatcgcacgcgctctggctggcttccctgccgccgcgtgcaccgcccatgccgtcgcataccagcagccatgcggcatcgccgggcagttctcctgcgcgataatcgtcctgattatcctgccggaccctgccgacatccgtttttcctgcaagtttcataggcttctccctttaatatttacgctttcccgttcatttcgtcacggcgcagctggccgcatgcggcgctgatctcgctgccaaggcggcggcgcaccgtagcgttcacgccaaggctctccagcttctgctggaagcggtgcacgttggctgcatcggtggccgagtacgggctgccgtccaccgggttgatggggatcaggttcacatgggcacccatgccccggatcaggtttgccagctgtctggcgcaggcatcggaatcgttgacaccgcgcaccatggaatattcaaagctcacgcggcggccggtggtatcctgatagcggcgcacggcctgcatcagcacttccacgggataggcatcgttcaccggcatcatgccgctgcgaatttcattgttgggtgcgtgcagcgacaccgagagggtcagctgcagctttttctcggccagctggtcgattttgggcaccagaccgcaggtagaaaggctgatgttgcgcatcccgatgttcacgccctcgggcgaggtgatgttctccagaaacttcatcacttcgtcaaagttgtccagcggttcgccaatgcccatgagcacgatgtgggaaatgcgctccccgatatccttctgggcggtgtagatctcagagcagatctcgcctgcttccagatcgcgcacgcggcctgcctgggtggacgcgcagaagcggcagcccatgcggcagcccacctgcgtggacacgcacaccgtgttgccgtagtggtagcgcatcacgacggtctcgatgcagttgccgtctgccatgcgcagcagatattttaccgtgccgtcctttgcttcctgcctgcgctcgatcttgggcgcggcaatgtagaagctttcttccagctttgccagcagggtcttgggctggtcggtcatggcagaaaactcggtgaccagcttctggtgcacccagtggaagatctgctttgcccggaagcccggctgacccatcgctttcagttcagcggtcagctctgccagcgtaaaggaagagatacagcgtttttgttccattgtgttctcctattgttttttacgaacaagccacctgtttcattgcagcttttccccgtttttctgcatggcacacaggaaaaagccgtccatgccggtgcgggtgggcaccgaaagcgcgccgtgctcccctgccgtcatcccggcgggcagcgctgcggcaggctccaccaccgtaaactccgggtggcgggccagaaatgccgcgatctgctgctggttttctgccgggtcgatggtgcaggtggagtacaccagcctgccgcccgctttcagcagctgtgccgccgtatcgaggatggccgactgcgtggccaataattcagcttcgcgggccggttccagctttttgtagcgcagatccggcttttttgccagaatgccaaggccgctgcagggcacatccgctaaaatgcggtcggcctgcggcagggccgggtttcccttggtggcatcgttgcacagggcttccacattggcaaggcccatgcgctgcactgccgtgcggatcaggcccacgcggttctcggcggcatcgcagctgtaaagcctgccggtgctgtgcatctgctcggccagcaggatggtcttgccgccgggcgcggcgcacaggtcgatgactgtttctccgggctgtgggtccacgcagagcgccgccagctggctggcctgcccttccacatggaagtacccctgccggaacagctcattttccgccgggctgccctcgaaccgggccagcacactgccgggcacaatgccccgctttgcttcctttgcgccggaagccagcagctttgcacaaagctcatcggcactgcctttcagcgggttcgcccgcaggctggtcatgccgccgtcggccttgtaggtaaggatatccagtgcctcgtccgggtagtttttgtgcagaaattccgccacatcccgcccggcagagccaagcaccatgagccgctccacttcgtttttgaagcttgcggtgctcaggtcgtagctgcacgccttgcgcagcacggcgttgaccagaccggatgcgctggattttttgaaggcacgggtcagcttgacggcttcgttcaccgcagcggacaccggcacctgcatatagcgggcctgcgccagcgccgcgcgcaatatttcgcgcaccggtgcatccagcttggcaaggcccttgggcaggaactggcacaggatgtagtccagcgtgccccggtgttccagcaccgtgtaaaagatggcgctggcaaaagctttatcgcggccttccagctgctggcgcttgagttcggcatccagaacaaggttggaaaaaccatcctgctcctgccgcaccagcgccgccactgccgccgcgcggggattcgccgccatcagaggatatcccccgttttcaggcgctgaccggccgcaaaggcggtgccgtccatgggctttttgccttccggcaccacattcagcagctggacggccccctcaccgcaagccaccgtgagcggctttgtggccagcacggtgccgggcgcttcgccgtgagcttccacggcacggcactccatcaccttgagctttttgccgccggaggtgacgaaccatgcaccgggccacgggttcatgccgcgcacccagttgtggatgtgggcaactgattcggtcaggtggaactctgccatctccttgttcagcataggcgcaaggcaggcgttctcatgatcctgcggctggggtttcagcgttccggcggcgatggcgggcaccacctcacacagtacccgtgcacccacggcagtcacgcggtcaaacagctggccgctggtctcctccgggtcaatggcgatcttctcgcagcagagcacatcgccggtgtcaaggccctcgtccatctgcatgatggaaacgccggtctcggcatcgccgttcagcacagcccactgcaccggggcgctgccgcggtacttgggcagcagggagacatgcaggttgatgcagccgtacttcggcgcttccagcacagacttcggcaggatgcagccgtaagccaccaccacgatcagttccggggccagtgcgcggatgttctcgtcctcgctgccgtcccgcagggtgcgaggctggaacaccggcgtgccgtgggcaagggccacttccttgaccgggggtgcggtaagcacctgcttgcggccaaccggcttgtcccgccgggtgtacaccgcgcagatgtcatgcccggcggcatacagggctttgaggcactctgcggcaatatccggcgtgcccatgaacaaaatgcgcattacttgtttcctttcgcttcgcgggcagcttttttgccctcttcggtatcctcatagaaatactcgctggactgcatgatggtaataccgtccagatggtcgttctcgtgctggatgcagcggcccagcagattctcagcttccagctcgaaccactcaccgtggcggtcctgtgcgcgcaccttgaccgcggcggggcgggtcacagcgccgttgtggcccgggaaggacagacagccctcgtaggcggtctcctcttcctcggatacagccagaatttccgggttgacgaagtcgatgaacttatattcgtaatcttcggggatctcctcgggcgcgtcggtggtgtcccacaccacgaacagacggcgcagcatgcccacctgcgggccggccagacccacgccgtcggcggcgatcatggtctcgtgcatgtcgtccagcagggtagccagacggtcatcaaaggtggtgacggggcggcagaccttgttcaggatgggatcgccctcttttacaatgttacggatagccatttatggtacctccaaatcagatgtcaccgtccgagtgcaggtccaccgcaacggtggccttggacggaagtttttcctgttcgtatctttccagtgtgctgcgcacgaggtcgcggaagcggcggtcgttgcggcacttgatggtaagcttatagcgataagtgtcgttgattttttcaatactgccgggcgtggggccaagcacccgcagcggcaggtccggctgttttgccgcctgctgacccagcagggccgcaaagcgcgccgccgcccgtgccacctcgatctcctttgcgcctgcaaagccaatgacgcacagcccgcagaagggcgggtacaggcccagcttgcggtaagcgatctcctgctcaaaaaaggcatcgtagtcctgcgcagcggcaaggttcagcaccggattatcggggtcggtggtctggatgatggcaaagccggggtctctggcccgtccgctgcggcccaccacctgcgtgatgaggctgaacacgttctcatacgcgcggaagccctgcgcaaacagcagcgagtcgatgcccagcacgcccacaagggtcacatcctcaaaatccagtcccttggccaccatctgggtgcccaccatgatgtcatattcgtgatctgcaaaccttgccagcagcttttcgtgggcgtccttggccgcggtagaatcctgatccatgcgcagcacccgcgcatccgagaacagctttgccagctcttcctcggctttctgggtgccgaagccccggtactgcagcttgccgccgcaggcggggcagacggtgggcggttccatctggctgccgcagtagtggcacaataccttgtgcgccgctttgtggtacaccatcggcacgctgcactttgtgcacttgagcacctcgcggcagtcctcgcactgggccatggtctggtagccccggcggttcagcagcaaaatggtctgcttgcctgcatccagattgcggcggatggcatcttccagcgacagactgatctcccgcgggttgcctgccgccagctctgcgcgcatatccacgatctgcaccgtgggcagcgggttgccgccgtagcgctgggtcagccgcaccagctgggtgcggccatgctgggccgcgtaaaagctctcggtgctgggggtggcgcttgccagcagcagcaatgcaccgttttccgccgcgcgctgccgggccacctcgtgggcagaatagcggggcgcggattccgagcggtaggtgtgctcctgctcctcatcgatgatgatgagcccgatgttttccagcggcgaaaagatggcgctgcgggtacccaccacgatgtctgcgccgccgtcctggatcatctgccactgcaaaaggcgttcggtgtggttgagggcagagtgctgcaccgccacccggcggccaaactggctcttgagccgcaggatcatctgcggggtcaggctgatctccggcaccagcaccagcgcacgcctgccctgctccagacagcgggcaatgagctttaaaaacaccagcgttttgccgctgccggtcacgccgtagagcagcgccgagtggggtgcatcatcttccagctttggcagcagagcatcgtaagccgcctgctgctcctgcgtgagggtgatcggctcgtttttcagcggaatggacgaatacaggtcgatagatttattcaccttgctgcattccagcacgcctttggcgcacaggttatccagcacggcacggctgatgcccttgtcttccagctcgttcagggtgcgcggcccaccgcccagcagcgccactgccgccaattgcttggctgtcggcttcggctttggcggcagcccgcccacaaggcggtaggagttctcggtgtggcgggtgagctgcttttgcagcaccggcgttacgccgtctgccgccacggcaggcttgtactgtgcaccatagggaatgaccgccttgaccgcttcgtaataggtgcagaaggtgcgctccttcaaaaagtgcaccagccgcagcagttccggggtcaggcaggcggatgccggggccacgtcgaaaagatatttcagcttcgcgctttccggttcggcatcgcaggccagcaccacgcccatgcgggcgcggctgccgcggccaaagggcaccagcaccatgctgccaagttttaccgcattctgctgatccggcatgacggcataggtataaagcttatcaaagtggaaggtcgcattgctgacggcaacgcctaccgttttgggcattcgtccagctccttcaaaatgttattctgcggcaccaatgcgctggcagatggcctgatacagtgcatcggcgcaggtatcgacctggtcgttgaccagcttcagggtgaatttatcctgctgggccagctcctgtcgggcggtggcaagacgctcctgaatgctgtcctcggtctcggtgccgcggccgcgcagacggcgctccagctcctccaccgacggcggcagcaggaacacggtggtcgcgcccgggaacatgcggcggatgttcgctgcgccgtgcacatcgatgaccagaacgaccaccttccgggctgcaaggcgcttgtccacttcctcgcgcagggtaccgtagtagttgccgttgtagaagttgtgctccaccacctgatcgttctcgatcagctgctggaactgctcccgggtgcggtaataataatccacgccctcctgctcaccgggacgcggtgcgcgggtggtggcggaaacagtcttttcgatctccgggtgtgcttcgcgcagtgccttcaccacgctgtccttgccggtaccggccgcgccggagaccacaaacaaatatttatcgttcgccatgggtctgttcctcctctgttggtgttttgccctcctgccctgccgcacggttggccaccgtttccggctgaagcgccgagagcaccacatgatcggagtccatgataagcactgcacgggtgctgcggccataggatgcatcgatcagcattccgcgctcccgcgcttcctttacaaggcgcttgaccggggcggaatccgggctgaccactgccaccacacggcctgcactgaccatattgccaaacccgatgttgatgagcttcataaacccctccgaattttctgtatcactccagattctggatctgttcgcggatcttttcgatctccgccttcatatccaccacgatgcgggtgatatccagatcctgacacttggagccgatggtattggtctcgcggttcagctcctgcgtcaaaaagtccaacttgcggcccaccggctcgtccagcttgaggatatcgcggtactgcgcaatgtggctgcgcaggcgcaccgtctcttcatccacagcggtcttatcgccaaaaatagcggcctcggtcagcacgcgggcatcgtcgatatcgcggtcctccagaatgaccttgagcttctcgtacaggcggttggtgtaggcttccacgcggcctgcgctcaaagtctccaccctgcccacgcactcctcgaggaagttcaggcggttttccacgtctgccttcatcttggcaccctcggcggcgcgcatctccacaaagcggtccagcgcctgtgcggtaacggcagaaacatcttcccacagctgttcctcgtccacatccgcgtggcgggtggtgagcacatccgggaagcgggtcagcacgcccgcagagatatcgttcttgacacccagctgttccgaaatatcccgcatggcctgctggtagctgcgtgccagctccatgttgacggccaccaccgtatcggcagcgtccacattctgcacggtcatgctcagctccaccttgccgcgggtgatgcgctcgttgagctgctttttcaggcggctgtccagatagctgcaggtgcgcgggatgcgcgaagaatactcaaagtagcgggaattcacgctgcgcagctccaccgtgatctcacggccattgcgcacagcagtcccccggccaaagccggtcatgcttaagatcataacgctctcctgttcttacattttcagtgtttcagcttacaagtttcggtatacgtatccgcctttgggtacacaaacccatgttacgatacatatagtttcattttactattcttcggcccaaaattcaaggtgcactgttgcgtgccgccgccaaaaccggccgcaatacacggtgcaaagcaaaaaagctctgatacaaaatcttccgatcctgtatcagagcctgtttcagttggttttatatacgcaggtcacgctgttctgcagcagatttgcgttcagcagtgcgcgctccacccagtggatattgtccgcaatggtatcgcgggagacaccgtattctgccgcaatgttctccatgctgcggtactcgcggcggtagagcaaagtcagcaccagcttatcctgcattgtgatcttggtaaaatgcggcctgcgccggtgctccttgcaataagccgcattcagtgcttccagcatctgggcaaattccttccgggtgatgccgaaggtaaattcataatcctgctctgtaaattccgcaaggcgctgtgccgtgatgcttctcatgcagatcacctcttctttttccggggatgcccgggtgtcggctgcatccattttgattcattataaaatggatggattttcatgtcaatgagccgccgcccatttttggggccagatccggtgcaaaacacaaaaaggagcctcccgccgcaaaagcgggaagcccctgaatccgttatgaaagatcagacgggatgagactgattggtgtagtccacatggtcgccgtccacgccctgcttcttggcattgcgcttttcaaagaacttgggtgccacctgcgggaacattgcgtaggtcagcacatcctcttcctgcgttgcccacttggcagcttctgccttcagcttgtccatctcaggagccagagtatcagcaaagcggcaggtaatgggctgctcgtcgcccaggatcttcttggtgaactcgggcttgatgggagcgggagtcttgccgtaatcgccgtggaccagacccttgaactccttggtgaccatcttgtagcgctcgcccagaatcacgttgaacacagcctgcgtaccaacgatctggctggtgggggtgaccagcggcggatagcctgcatcctcgcggacgcgggggatctctgccagcacttcgtccagcttatcttccttgccggcatccttcagctgtttgagcatgttggagaacatgccgcccggcacctgatacagcagggtgtttgcatccacgccgaggctcttcgggctgatctggccgttggcaatgtacttctcgcgcagctttgcaaagtatgcgcgcacaacgttcagctgcttcagatccagaccggtgtcgtaatcggtgccctgcagggcagcgaccagactctcggtgggcatgtggctggtgcccaggctcagggggctcatggcggtatcgatgatgtcggcacctgcctcgatgcccttcaggatggacatggaagccagacctgcggtgtagtggctgtggatgtcaacagggatgctgacggtctccttcagcttcttcaccagatcgtagcaggtatagggggtcagcagaccggccatatccttgatgcagatggagtttgcgcccatctcctccaaggtcttggcgtaggctgcaaagtactcgttgttgtgcacggggctgagggtgtagctgatgcagccctgcacatgagcgccttccttgttggctgccttgatggcggtctgcaggttgcgcggatcgttcagtgcatcgaaaatacggatcacgtcgatgccgtttgcaacagacttctgcacaaagtactcaacggcatcgtctgcgtaggggcggtagcccagcatgttctggccgcggaacagcatctgcagcttctggtggggcagttccttgcgcaggatgcgcaggcgctcccacgggtcttcgtccagaaagcggatgcagctgtcgaacgtagcgccgccccagcactccacggagaagtagttaatcttatccatttccggcaggatgggacgcatctcatccatggtcatgcgggtggccagcagagactggtgggcatcgcgcaggacgacctcagtaaccttgatcggctttttggccatgattgtcacctctcccttagttcatggaaaccagaacgtcaccggagttgacggtgtcgcccttgttgacgttgatggaagccacagtgccatcctgcggagcaacgatctcgttctccatcttcatggcctccaggatcaccagcacgtcgccagccttcacggatgcaccggccttgaccttgacatccagaatgttgccgggcatgggagccttgacggcaacggcaccagcagcgcctgcagcagccttgggagcagcagcgggagccggagcagccttaggagcagcgggtgcggcaggagctgcagcagcaaccggagcagcaccagcggcagtctcctccacggagacgctgtaagcaacgccattgacggtaatattgtagtacttcatggaaggatcctccaaatcaaaatcgtatcaaaaagatttatacagacgattacagagccatgttgccgtgcttcttgggcaggcgggcagcacgcttggtgctcagcagttccagtgcggcaacaacgcttgcacgcacattggctgcatcgcaggtcaggtcagcagcgccgcaggcaactgcatttgctgcgctgcacacctcagcggtgtaagcagcagcctttgcgttggtggctgcaatgatgttgtcggaagcatcgatctcttccttgtacaggacgctgaccgctgcgctgggttccagtgcgctgacggtgcagccagccacggcaatgcgcagatcggcagcagccagagcggtgtaaacagggccgacggccttgccagccagcacagccacctttgcggtggtagcgtcggcataggtagcagccagacgggcagcctcacggatgccgcctgcaatgtcatcggtcgcgctgggcacaaagccctcggtatctacaatggtgatcaccggcacgctgaaggcatcgcacaggcgcacaaagcgggaagccttggccacgcagttgtggcacagggtcttgccggtggccacaacgcccacggcgttgccgcccacggtggcaaatgcggtgtaaacagacttgccaaagcctgcatacagctccacagcgctgtccttatcgaccacggcagcagcagcctttgcaggctctgcaccggcagccagagcagcagtgggctgctcgaactcaaagatcgcagggccggtcaggttgttggccggcagcaggcccacgatgtgagcagctttctcggcagcttcctcagcagtgggtgccacaatggcggccacaccagcctttgcagcggcggctgcggtgccggcatcggccaccttgtcgcccttggcagcagaggtgaacggagcggtgaagaacagctctgcgccctcagccatgatgcagacatctgcattggcagcgctcagtgcgctggtgccgccgcagacacccagaacaacagccacctgcgggatcacgccggaaacctttgcgatctgcgcattcagctttgcgctggcggtcagcacgtccagaccctcagccagctttgcgccgacggagttgtagaaggtgacgaccgggcagccagtctgagctgccatctccagaaccttgatgttcttttcaacatcctttacggtaacagcttcgccgttctggtaaacagcgtaagcctgctgacctgccgcatagccgcaggcagcgctcactgcaccgtcagcaaacagtgcagtgtattccccgtcatcaaaaaacttggcgaggatttctcccttattgatctttgaagccatggtaagacctcctggttgtctgtgtgagctttcaaaattagttttattatactgaattttccataaaaatgcaagagattctataaaagtccatgcgaatcaacatctgtcggcaaagttctacaattttttaacgattcatcgtttctccgctttctcgcctttttgcgggcattttgcgccgcacactcagctgccaaaaattctcttttaattttgtggattctgtctgcccctgctgcattttattttataagaagttatgttacactatatttaatatgtaaatttttttcgcagaacagcccgccgggaagcttcggggcgggtcattttgcagaatataaaaggaaggccatgtcaaattgaaagatctgctcacttcactccgcgcctccaacgaaacctacaactccatgaagcactccgcccgggctatcatccgccgcgccgagatccccctgctcgcggtcatcgtcctgtataaggctgcaacgaacctgctgttcgtccccctgatgcagcagctctggtcgctcacactgcggttcgcacccatgcactacctgagcaacaacaatgcttccgatatcttttcctcccccgcgatcatcctgtgcatcacgctcattgccatcctgaccgcgttctgggcgctgtatgagttttccgtcctgctgcatgggctggatcttgcccgcaagggcgaaacgatccgcctgcctgccctgctgcgcacctctcttgcagatatccgccacgcattcctgccgcagaactggctcgttctggtctacagtgccgtgctgatcccgttcaccaattttttcctcgcctacaactatatcacgcagcttgccgtgccggaatacatcatgggtgtcatccaggcaaacagccggtattacctgctctatctggctgtcggtgccgccctgctgttcctctgtgtcagctgggtgctggtgctgccgctgttcgtgctggagcgcaaaagcctgtggcagtcggtaaaggaaagcttttgctgcatccgcaggcgcgtcttccgtgcttttcttttgctgctgcgctggaacctctcggtcgtcctgcgttccctgctgctgacggcagcggttgccgtgccgctgtacggcatcatcatcgcggtcgggctgcagagcacacaggccatgtttgcactgtcccgcgcggcgctggccattgagatgcctttcttccagttcctgatcgactgcgccatcaccatggcgcagtgcacgatcctcgccatgctgcactgccgcctgcgggagtctctccgctctgagccggagccggtccagagcggaaagcatcaccgttccaccggcaggctgcttctgggtgcatcggttgcgggtgctactctgctcacctttgcgctggcattctgttaccttgccctgcccagagacgacgagctgctctccatgctgggcggcgttgcgccggtagtcaccgcgcaccgcggctactccgctgccgcaccggaaaacaccctgcccgctttccagctggccatcgatcagggctgcgagtgggccgagctggatgtgcagatgaccagggacggcgtggtcatggtgacccacgataccagcctgcgccgctgcaccggccgcaacgagaacatctacgacctgacctgtaacgaggttcgcaagctggatgccgggcactggttcggccagaagtacactggtgccaaagttcccacactggaagaagtgctggacctgtgcaaaggtaagatccagctgaacattgagatcaagcccaatgccgccaccccggagctggaagcggaaaccatccgcatcatccgcgaaaaaggctttgcgcaggactgcaccatcacctcgcagagttatgaaaccctctgcaaggtcaaggagctggcaccggagatccggaccggctatatccttgcactgggcgtgggcagttattacgacctgcctgccgcagatttcttcagcgtacagtccacctttatcacctccggtatggtgcagcagatccataagcgcagcaagacgatctccgcatggaccgtcaaccgcgaagaggatgccagcgaactgctgagcatcggcgtggacgacctgatcaccgataagccggatatgatccagcagctgctgagcgaggatgccgaccttgacaacagcctcgtcctcctgcgcgacttcatccgtgacctgttcgctccgtccgatgtcgatgaacccactcctgaggaagagaccatcgaagaagccatcgaggacccggacgaattgctggatgcgtcgtaatcgcggctaacatcaagtattctgttaaactacccgtacacacataagaagccccctgccagttcatcaccggcagggggcttacaagtttacctgatccagttttatcaagtaagatcattccggttcggtaagcttggatctttacgaagcaatttatttcataaatcggtactgtgaacaaatcacttacattccttcttcatagcagaataaccgatgagaacggtccacacataggcacaggtcttggggatcatcagcataccgatcatggggacggtattggcccaaagaacaacgggaatgtagaacccgaagctcagcacgatggtcatccacatccagcgaaaagccgagtcgtcatgctccttggcactgcggtagaacaacacgatgatcagcaggcccatcagtgcaaaaggaatgttacggtaaatgccccaggacagcggggattcggcgctcagccactggttctgcggcatcatgcacaggataacacgcacggcagccagaccgtagacggcggcagtcaggccattgttgcccttgacccggtagcgctcacgccagacatagtacagcagcacataaaagacagtcattgtcacagaggtgatccacttacccagacccagaggaacggtaaagttttcaaagcccgtggtgcatagagccagagcacggggaatcagatggaacgagtcgccggcacccagaacgacagccatcagaccgaacagcttgaactggtggttgcccttgcagccacaaatcatcaggataccgatggtgatgacggataccagatacacagcatcaaaaacagtttctacgattgcttgcatagttgattgctccttgttgatagattaaattgattgtaacactgcattttttgcagggccgacttcgtttttacggtcatcaagggcttgctcggcaaagttgcatccaaagcgcaggatgttgaagcttgcattcctccacacaagacaggcgagcagcaacaggatattgcgatgaactttcctatgagtgtctcccttgagtgaacagtgttcattttggacattataaaattcccacagcagtgtgggaagaaaatgcagtcaatataaggttctgcgcacgatttccagcacagcggcggggtcgtagtcctgccgcagcaaggcagacagcatcagcgaaaatagaacatcggcaaatttttcaacggtgaattgcgcattaaaagcgtcaggacggattttggtatcctgttgcagcaccgtacacagaccatttaagatatggtgccagatttgctgcatgtgccgtttgccatcggccttgtcctcctgcataaagccgagagagtgcagtgtgaagaatccaggatactgctcacagccgtaggccatgcgctcgtacatccatttgacacaggtctgcacatcctgaaatacagcctcgtcctgcgggcggtggaaaatttcgcaccagacgctctcgaccgtggcgctgataagctcagccttggagtcataatagttgtagatcgagccgaccgagaccccgcatgccgaggcgacagaacggatactgaccgccgcccagcccttttcccggataagctcacggctgttttttaagatatcttccttggaggttacgattgtattcatgtggtcaccctcaatatgaacaatgttcatttttattatactgcccgttcccactttgtcaagaggatttcataaaaggtttatattttgcggattaagacattgaatgcaaacttacaaaaatcataaaaggagtatatgtatgatgccaccttactgtcgattcagtatcatctattttcgataatgtcagggcattttcttaatgtcaataatgtcaaaaagccccggaaagaaacgtaaactcgtaactttccggggctttcaaattattctcaaatgttaaaccgaaccagtgatccgggtggctccacaatgaagttttccgcggcttagtgtcaaactaatgtcacaacgcgatttttctttcgattttgctcatag

SEQ ID NO: 1184 - DNA, 1742 bp, Unknown
  gut microbiota DNA sequence
catgcttgacctcattgacgatgcggctggtgacagtgcccagaacatcccagggcatattatagctctctgcagtcatgaagtcggtggtggtcacagcacgcagcgccacagcgtaatcataggtgcgctcgtcgcccatgacgcccacactgtgcatgttggtcaaggctgcatagtactggctgatctccttatccagacccgcctttgcgatctcctcacgccagatcgcgtcggcatcctgcacgatagccaccttctccggggtcacttcgccgatgatgcggatgccaaggcccgggccggggaacggctgacggctgaccagatattcgggcaggcccagctcacggccagcctgacgcacctcgtctttgaacaggttgcgcagcggctccaccaactccttgaagtccacggtgtcgggcagaccgccgacgttgtggtggctcttgataacagtggactcaccgcccagaccgctctcaacgacgtccgggtaaatggtaccctgtgccaggaaatccaccttgccgatcttcttggcctgctcttcaaacacacggatgaactcttcgccgatgatcttgcgcttgcgctccggctcggtgacaccagccagttttgcaaagtagcgttcgcgggcatccacacagataaagttgatatcaaagccgttggcattgcccgggccgaatacagaacagacctcttccttctcgttcttacgcagcagaccgtgatccacgaacacgcaggtcagctgcttgccgatggccttagccagcatagctgccagaacggaggaatccacgccgccggacaaggcgcacagcaccttgccatcgccgatgcgctcacgcagggccttgacgttgttttccacaaaggagtccatcttccagtcaccggtgcagccgcagacgttgtacacgaagttgcacagcatcttcttgccttccgcagtgtgcagcacttccggatggaactggaccgcgtacaggcccttctcagcgttctctgccgcagctaccgggcagttgaccgtgtgagcagtgatcttaaagccgggcgctgcctgctcaatatagtcgttgtggctcatccagcaaatggtggagggctgcacatcggtgaacatcttgctgttcgtgtccacgaacacctcagtcttgccgtactcgcgctccggtgcgcggcagacatggccgcccagcagatgcatcatcagctggctgccgtagcagatgcccagcacaggcacaccccagttgaagatctcagggtcgatcgtgggggaatcttccagataaacgctgttggggccaccggtaaagatgatacccttggggttctttgccttgataaccgacagatcggttttataggaatagatttcacagtagacattgttctcgcggacgcggcgcgcgatcagctgattgtactggccgccaaagtccagcacgatgacagtttcatgctgcatgaagttctctcctcccttatccattcaatgtgtttctacagataaaatcagtatagcacatctgccaaataaaagcgacatcatttgtgaattttcctgtttttatttttcacgtatgggatgccgcaacaccgttttcagtgttcccggtgcagcgcggcgaggatcactcagataaatttcgtggtggaagcgtgtctctgaaaaatccggcatacacccctgcccttacggacagaggatctaaaac

SEQ ID NO: 1185 - DNA, 4214 bp, Unknown
  gut microbiota DNA sequence
gtttaacctttagccttaggaaaggcgcgaagggtcaaaatcactcaatgatcttgccaacaacgccagaaccaacggtacggccaccctcacggatagcgaaacgcaggccctcttccatagcaacaggggtcagcagctcaacgtgcatcatgacgttatcgccgggcatgcacatctcagtgccttcgggcagagtgatgataccggtcacgtcggtggtgcggaagtagaactgaggacgatagttggagaagaacggggtgtgacggccgccttcgtccttggtcagaacgtacacctgagactcgaaagtcttgtgggggtgcacagaaccgggcttagccagaacctgaccacgctcgatctgggtacgatcaacaccacgcagcagagcgccgatgttatcgccagcctcagcgaagtccagagacttacggaacatctccagaccggtgatggtggtgctcagacgatcgggcttgatgccgacgatctccatagcatcgccaaccttagcaataccacgctcaacacgaccggttgcaacagtaccacggccagaaatggtcatgacatcctcgatgggcatcaggaagggcttgtcttcctcacgatcggggttggggatataggtgtcaacagcgtccatcagctccttgatgcaagcatactcgggagcattgggatcagtggaggtagactccagagccttcagagcggaaccacgaatgatcggggtgtcgtcgccggggaagtcgtactcggtcagcagctcacggatctccatctcgaccagatccagcagctcttcgtcgtcgaccatatcgcacttgttcatgaacacaacgatatagggcacgccgacctgacgagccagcaggatgtgctcacgggtctggggcatgggaccatcggtagcagcaacgaccagaatagcgccgtccatctgagcagcaccagtgatcatgttcttaacgtagtcagcatggcccgggcagtcaacgtgagcgtagtgacgagcgtcggtctgatactcaacgtgagcggagttgatcgtgataccacgagcacgctcctcaggagccttatcgatgttggcataatccatgaagtctgcgtcgcccttcagagccaggtacttggtgatagcggcggtcagagtggtcttgccgtggtcaacgtgaccgatggtgccgatgttcacatgcggcttagaacggtcgaactttgccttttcagccattggaatatcctcccttaatttaggttttgatatttggttacaacaaccctgcaagatgcagacattgcattgcaaggctattctactaaatttgccctgtaaaatcaagtgcttttacaggaaattttgccgaggttacactaccccggcaaaatctttatccatttttcaggaatcagcccttggtgcggccagcgataatctggtcagcaatgttcttgggcaccggctcgtagtgagacggctccatgacatactggccacggccctgagtcttggaacgcaggtcggtagcgtagccgaacatctgagccagaggcacaaatgcattgacgcgctgagtaccagccatagcttccatgccctggatctgaccacggcgtgcattcaagtcgccgataacatcgcccagatactcatcgggaacgataactgcaaccttcatgataggctcagtgatgataggatcagccttgcgcatagcatccttgaacgccatagaaccagcaatggagaaggccatttcagaggagtcgacctcatgataagaaccatcccacagggtaaccttgacatcaacgacaggatagccagccagaacaccggacttcatagcaccctggataccgttgtcgatagccgggatgtattccttcgggatggcaccgccaacgatggcgttgacgaactcgtaacccttgccgggctcgttgggctcgatcttgatcttaacatgaccgtactggcccttaccaccggactgacgtgcgtacttggtctcctggttggcctctttgcggatggtctcacggtaagcaacctgaggtgcacccacgtttgcttcaaccttgaactcacgcagcagacggtcaacgatgatctccagatgcagctcgcccataccggcgatgatggtctgaccggtctcttcgtcagtgtaggtcttgaaggtcggatcctcttcggccagctttgccagcgcgatgcccatcttctcgttgccggccttggtcttaggctcgatggcaacgcggataacaggctcggggaacttcatggactccagaatgatgggatgattctcatcacacagagtgtcaccggtagtggtgttcttcagaccgacaacagcagcgatatcacctgcgtagcagcagtcgatatccttgcggtggttagaatgcatctgcaggatgcggcccatacgctccttgctgtccttcacggagttgtagacagtggtacctgcctcaaccttaccggagtaaacacggaagtatgccagcttaccaacgaacgggtcggtagcgatcttgaaggccagagctgcgaagggagcgtcgtcagaagacggacgggtctcctcttcctcagtctcgggattcacgcccttgatgtcagggacatcggtaggagcgggcatatagtcaacgatagcgtccagcagcttctggacaccacggttcttgtaggaagaaccgcagacaacgggaaccagcgtgttagcgatggtctccttgcggatcgcagccttcagctcggcacgggtgatctcctcgccctcgaggtacttttccatgagctcttcgtcgttctcagcaacagcctcgatcagaatgttgtggtactcctcggcctgctcacgcatatcctcggggatgggctcagtgcgcatgtcgttgcccatgtcgtcgtagtagacctcagcgttcatatcgaccaggtcaacgataccgcggaaggtatcctcctgaccgataggcagctggattgccacgccgtttgcgtgcagacgatcgtgcagcatcttgatgcagcggaagaagtcggcacccatggtgtccatcttgttgacgtacaccatacggggaaccttgtactcgtcagcctgacgccaaacggtctcagactgcggctcaacaccgccctttgcagccagaacggtcacagaaccgtccagcacgcgcagggaacgctggacctcaacagtgaagtccacgtggcccggggtgtcgatgatgttgatgcggtgacggttcttcttgaatgcaaccggatccttctgggtctcagagtggctccagtagcaggtggtagcagcggaagtgatggtgataccacgctcctgctcctgaaccatccagtccatggtagcgccgccatcatgaacttcgccgatcttgtggttgataccggtgtagtacagaatacgctcggtagtagtagttttaccagcatcaatgtgggccataatgccgatatttctcgtcatctgaagagaaacttctctgggtgtagccatgaaattaacctcctacagaacagatcaataacggaaatgagcgaaagccttgttagcctctgccatcttgtgagtatcctcacgcttcttcacggcgttaccagtgttgttggcagcatccatgatttcagcagccagacgctgagccatggtcttctcaccacggctgcggctgtaggcagtcagccagcgcagacccagggtctcgcggcgagccgggctgacttccagaggaacctggtagttagcaccgccaacgcggcgggtcttgcactcgaggctgggcatgatgttctccatcgccttctcgaaagtctccagaggatcgttgccggtcttctcctgaatcatggagaaagcttcgtaaacgatcttctgagcgacgcccttcttgccatccagcataacgctgttgaccagacgagtgaccatcttggaattgtaaataggatcagctaagacatcgcgcttagcaatgttacctcttctaggcatctttcttccctccttcacagaatgatatcatcggtactcgaaagtaataaaactcccgttgtgtcacaaagagctgacctttacataaactgttgccctccgctttgcaagcggacttgttatttatataatggaaagccgtttatggcggttgtcctcaattacttcttt

SEQ ID NO: 1186 - DNA, 13143 bp, Unknown
  gut microbiota DNA sequence
ccgcaacccggggcactaagcaacagcccactgggctgattgcttaccctgctgcgcagggccatgctgttcgattcccgtgcgggtcaaattaaaaacgcccttgcgcaatgcgcaaaggcgtttttatgacccgtacgggaatcgaacccatgttacagccgtgaaagggccgtgtcttaaccgcttgaccaacgggccttagaaatacagagcttcgctaaaacctccgacttccatcgtccactactgcagacgaccgtccccctaaccttagcgaaactctgtaaaagtggtagcggtaactggatttgaaccggtgacacttcgggtatgaaccgaatgctctagccaactgagctataccgccacatattgtttgtgcacttgaacagtgctttattattatacccacagataccccttttgtcaacacatatttttaaaaaaatcatattttttcgtgtcatccaaaatacaaacgaagatacgcaaaaatcccgctttccattgaatagaaagcgggatttttcaaccatttatccgagccttgtggaaaagccggtcaattcttcagcccttcttgtgggtgggaaccatgaccttcaggccgcccatatacggctgcagcacttcggggatggtcacggtgccgtcggcctgcagatggttctccaggaaggcgatcagcatacgcggaggtgccacgcaggtgttgttcagggtgtgggccagataggtcttgccgtccttgcccttcacgcggatgtgcaggcggcgtgcctgtgcatcgcccagattggagcaggagcagacctcgaagtacttctgctggcgggggctccatgcttcgatatcgcagctcttcaccttcaggtcggccaggtcgccggagcagcagttcagctgacgcaccgggatctccatgctgcggaacagctccacagagttcttccacagcttctcgtaccagtcagcgctctcgtcggggcggcagaccacgatcatttcctgcttctcgaactgatggatgcggtagatgccgcgctcctcgatgccgtgagcgcccttttccttgcggaagcaggggctgtaggaggtcagggtcaggggcagagtggcctcgtccagagtctggtcgatgaagcggccgatcatggtgtgctcgctggtgccgatcaggtacaggtcctcaccctcgatcttatacatcatggcatccatttccgggaaggacataacaccctgcaccacgttgccgtgcatcatgaagggagggatcacataggtgaagcccttgttgatcataaagtcgcgggcataggccagcacagcctcgtgcaggcgggcgatgttgcccagcagatagtagaaaccgttgccggccacgcggcctgcagcgtccatatcgatgccgtcgaagctctccatgatctcggtgtggtacggaatggggaaatcgggcaccacaggctcaccaaagcgctgtgcttccacgttataggtatcatccgggccgatgggcacgctgggatcgatcatctgcggaatggtgtacatgatctcctgaatgcgtgcggacagggtctcttcttccttttccagctcagccatcttgtcggcatcggccttgacggcggcattgttggcatcgatctgagcctgcagctcagccttctgtgcctcatcggtgcacttcttcagctggccgaacagggggccgttggccttgctcagcttgttgcgggcagccttgagggcttccacttccttcaggcatgcgcggtacttggcatccttctcgatgacctcgtccaccagcgggagctttgcatcctgaaacttcttcttgatgttttccttgacagcgtccgggttttcacggacaaatttgatatcaagcatgattgactctccttgctctatttcggttcgcacagaagatcccctcccctgtgccgttcaaagacggtcgcccgccttggatcgctttattcttcgttctggtactgtcccagcaggttggcaaaggcccgcagctgctcgtctgaatagaaatgcacggtcagcttgcccttgccgtcgtggtaggccacgttcacctcgctgcccagcacctgcttgaggctttcttccacctccaccggcagagtgccccgcggcttgggttctctgggctcctttgcgggctttgccagctttttgcacagcgcctcggcctgacgcacgttcagctggttgtccgcaatgatctgcgccgcctgttcctgcagctccggcgtgggcaggctcaggatcacctttgcgtggccgatattgataaagccgcttttcagcagttccagcacgttttccggcaggttcagcaggcgcaggctgttggccagtgcgctgcggctcttgcccagcttctgtgccgcctgctcctgcgtcaggccgcagcgggtcatcagctcccggatgccggttgcttcttccaccgggtccagatcctcgcgctgcaggttttccaccagagccagctccatggcctgctcgtcgctgacttccttaatgaccaccggcacatcgttcagccctgccatacggcaggcacgccagcggcgctcacccgccacgatgctgtagccgccgcgcgggcgcggacgcaccgcgatgggctgcagcagaccatgctctgcaatgctggccgccagctcgcccagcgcctgttcgtcaaaggtcttgcgcggctgttccgggtccggttcgatctcacgcaggggcaaggtgtctacctttgcaccggactcaaaaaccggggcggcatcttcaaacagactgtccagcccgcggccaagccctccttttcctcttgccattcatgttccccctgaggtttaatcttccagagcatttttcgtctgctctgcgacgggtgcacttttgcggcgggcctttttgggctcgtgcgggcggttgttcttgacaaattcgattgccagatccatgtacgcttcgctgcccttgcccttgggttcatagaaattgatgggctggccgtagctgggtgcctccgaaatgcggatggagcgcgggatggtggtcttgtacaccttggagccgaaatacttctgcacctgctccaccacctgcacggtcaggttataccgcagcgagaacatggtgaacaccacgccctcgatatccagatacggattgtactttttgcgaatggtctttaaggtgctgatcagctccgaaagaccctccagcgcgtaatactcgcactgcaccggaatgagaacgctgtcgcaggcactcaggccgttcagggtgagcaggtccagactgggcggacaatcgataaagatgaagtcatagtccttctgcacctcggccagcgccttgcgcaggcggctctcacgagcgggcaggtcgatcatttccagactggcaccggccagacgggtgttggagccgatgacatcggtgcggtactcggtcttacggatggcctcggaggcccgcgcttcaccgatcaggatctcgtaggttcccttttccacgctgcgcttcgggatgccgtagccggtggtggtattgccctgcggatcaaggtctacgatgagcacccgcttgcccagcgccgcaacgcaggacgacaggttgacggcggtggtggttttgccaacgccgcccttctggttcgcaattgctacaatttttgccacgcacaattcttccttccgggaaaatttaattgttccatgtggaacattcgcagtcatgcccgccggtttcccgtccatacaggcaccttaacacctagtatagcacatccaaatcggtttttgaaccatctgaagcgtttttccgctggatttttaacttttagaggtgggaaaatcaaaaactgcacggttttgggagccgaatcaacgatttggaatgcgcgccgggaagctggctagccctctcagtcaagccctgtcgggcttgccagctctcccaaagggagagcccttggcataacggcaaagtttccgggcaaaccataacgctttccggtttcgccagaggctccctctttgagggagctgtcgcgcagcgactgaggggcttccaatcggcggaacacaaaaaatcctttagcgaagcgacttggattttttgtatggagcccaacagctttggggttactaggggcgagcagcccctagttcgtgcctcccgcgcctcgaaagtagcgggtgcttttctggttctcttttggcacgcaaaagagaacgtacccggcggcaatgctttagcaaaaggcatgaaactttaaacacgcgactacgctctgcacgggagtttcctgttccacatggaacaattttaccgttcggcggcggtggttgggatgcgcaccgtatattcgatatacccgtccttctcctcccggtgggcagtggcgggcacaccattatcggtcatcagacggatggcatggtcgatggtgttcacaaaaatacgcacatccttgaccatcgagatgcggtgcctgccttttgcaggggtgttgagcagctgttcaatgtagaggtcggtctgccgggcgttcatgcggcgcttggcaatgttgatcaatgcttcactgcggcggttctccggcagacgcagtaccgcccgggcatggcgctcggtgaggttgttgtccagcacgaactgccgctggtcggcgttcaactgcaaaagccgcagcttgttggcaagggtaggctgcgccatgcccagacgtttggcagcctcggcctgggtgcagtcccacagcaccatcacatcctttaagccctgcgcctgctcaaaggggttcaggtctgcgcgctggatgttttccagcaggcccagcgcggcggtgcgctcatcgtcgtaatcacagaggatggcagggatggtgttcattttagcaaggcggcaggcacggagccgccgctccccggctaccagctcgtagccgccatccgacacttttcgcaccgagattggctgcagcagaccattttcacggatgctctgggccagcgcagccagctcctgctcgctgaactcccgccgtgcctgaaacggcgacggcctgatctgatcgatgggcaggaaataaatcttgcccgcctgctttttgcgttcaaacatggatacacggctcctttcgcgtggtggatgggttttgtttttcacattttcccgggaaagcgtggaaaactcaggcttcaggcacagtgtatcacacaaataaaagccctgccagaagtttcgttcggcagggttttacaaaattctatcgatatttcgttatttcaacgggcttttcgcaatttttccgccgtttctggggtaggctgtcggagtctgcgaaatctttttgcacaggatcagagtgcgggtgtcgccgcccggaaggtgcagagtgcgggtctctttgtactcgccgcccagctttttgatggcaccgcgcgctgcggccagttcttcctcaccggaagagcctttcatggcgaggaaattgccgcccacctttaccagcggcaggcagtattcggccagcatgggcagcgcggccactgcacgggccgaggccagatcaaactgttcacgccacgccttgcgggcggcttcctcggcgcgctcctttgcaaactccacgccggtcaggcccagctgggcacaggcgtacttcaaaaactccacccgcttaccggtgggctccatcagggtcaactccagttccggcttgtagattttggtcacgatgcccgggaagcctgcgcctgcgcccacatccaccatgcggcccgccacttccggctggctggcaaacagcaggctgtcgaggaagtgcttatcctcgatcccctcggggtcggtaatagcggtcaggttgaccttctggttgtagtccaccagaatttcggcaaaggcatccagctggtccagctgggtgccggtgagagtgatgttccatgtggaacattttgcttcaaggcgcggtttatcgatcatacgcaggttttcctttctgttattcgccggtcaagtgaacgaagatcggctcgtggtgcacggcaggcaggaaagtttccagcacatctgccgttcgcagcttgagcgaggaggtgttgatgcaggggtggcagccgaggtactcccctgcctttatgtcctcatccatcagcagctgcaccttattttcagcatcattggcaaggcccataatggaggaggagccgggcgtgcagtccagatactgctccatatcctcgggcgaggcaaagctcaggcgggcaatgcccagctgatgggaaagctctttggttttgaagggcttgtccccgggcatcatgagcagatagaagttcgtcttctgccggttgcacaggaacaggttcttacacacggtggcattcaggcaggcatcgatcacatggcagtcctccatggtgtcggccttcatccagccgtggtcggtgcgccagaattggatacccagcttgtccagcaggtcataggtacggatctctttttccagccgcccggtgcagtcggcaggacggccctcgtaaagcttcagttcttccattggttgcagcttctttctatgtttaacgatttcaaatgccctccgcgttgctctgggcaaattcatcggaaaaattatttttatatttgcaaatcaggaaaatctgcggattttcctgatttgctttttcacacggaaggtcgtaatggtaaacggcatctactgccgctgactccctgcgggagcattcacgcagcagaaaatgcacaagtttatccgcacggcgcgtcgcgcaagcgactcgaaatcggcggaacacaaaaaatcctctagcgaagcgacttggattttttgtatggagcccatcttctttgggattattaagggcgagtagcccttaattcgtgcctcccgcgcctcgaaagtagcggagaccttgccgcgctgaacacgcggcatttgctgcgcaaaccggtctgcggcttaaaagccccactggggctttcatgccctgcgggcaccgccgtcctttctggttctcttttgcaaccaaaagagaacatacccggcggcgatgcattttgcaaaaggcatgaagcccgccccacacgaatactctctgtgcgggaagcagacttacttcctcgctgccagtgcaatgctcagctgcgccacatcggagggcgatacgcccgggatgcgccccgcctgaccgaggttcttcggccggatgcgggccagcttttcgcgggcttccagtgtcaggccggtcaggtcggaatattcaaaatcatccgggatcagggtcttttcatgccgggccacgtcccggatcatccgatcctgccgggcaatgtagcccgcatacttgatctcggtctccagccgctcagccaacatgggggtgatctgctcgccccagccgatgacaccggccagcagcggatagctgatctccgggcggcgcagcagctcttccgcaatgccgccctcggcagcaggggcaagaccggccgcttccatggcggtgcgcaggtcggcggtgcgcagatgcgtctcgtgcaggcggcggcgctccgcttccagaatgctctgggtgtgctggtacttggcccagcggtcatcctgcacaaggccgtattccctgccgatgggggtcagccgctggtcagcgttgtcctgacgcagggtcaggcggtactcgctgcggctggtcatcatgcggtaggggtccatgacccctttggtgaccagatcgtccaccagcgtgcccagatagctggtgtgtcgcggcaggatcagctgctctttgcccagcgcattgcgggcggcgttcagtccggccagcaggccctgggcggcggcttcctcgtagccggaggtgccgttgaactggcccgcgccgtacaggccccgcaccaccttgctttccagcgtggcttccagactggtggggtctacgcagtcgtactcgatggcgtaggccgggcgcatgatctcgatattctcaaagcctttgatgctgcggtagaaggcgttctgcacatcctccggcaggctgctggaggcaccctgcagatacatctcttcggtgttctcgccgcagggttccacaaaaatggggtggcggtccttgcccgcaaagcgcaccaccttgtcctcgatggaggggcagtagcgcgggccaacgccctcgatcatgccgccatagagcgggctgcgctggatgttatccagaatgatcctgtgggtctcggggttggtgtaggcgatccagcactccaccttgttgtgcatgggtgcatcggtcataaagctgaagggctgcagctcattgtccgggtcgccgggctggcattccagcttggaaaaatcgatgctgcggcggtgcacccgggcaggggtgccggtcttgaaccggcgcagcggcagcccggcagccttcaggctgtcggtcagggcgttagcggcgtgcatcccgtccgggccggaagcgtaccatgcatcgcccacaaaaattttgccgccaaggttcgtgccggtggcaatgaccacgcatttggcgctgtattccccgttcagctgggtcacaacgcccttcacacggccgttctcggtctcgatgctcacgacctcagcctgatggatggcaaggccgggcgtgagttccaatgcatgcttcatatattcatggtagcgcttgcggtcggtctgcacacgcagggcgtgcaccgccgggcctttgcccttgttgagcatccggctctgcagataagtggcatctgcagcaaggcccatcacgccgccaagcgcatccaattcacgtaccagcgttccttttgccgttccgccaatgctggggttgcagggcatgttgccaatggcatccagactcatggtaaacacggccgttttcgcgcccagtgtcgcggcggcgtgagctgcctcgataccagcgtggccggcaccgatgacgataacgtcataatctcctaagtggttcatatactttcgggtttcctctaacaaatgatttaaaatgccctccgtttcactctgggcatgttcagcggaaatatattttttaaatttgtaaatccgaaaagcctgcgggcttttcgaatttactttttcacgggaaagggtcgtaacaggaaacggcatattgctgctgtcagcctgcagctgtcgcgcagcagataacgcataaacttgtccgtatggctcgtcgcgcaagcgactacaaatcggcgtaacacaaaaaatcctctagcggagcgacttggattttttgtatggatcccatctcttttgggattattaagggcgagtagcccttaattcgtgcctcccgcgcctcgaaagtagcgggtgcttttctggttctcttttggcacgcaaaagagaacatccccggcggcgatgcattttgcaaaaggcatcaaactttaaacacgcgaccacgcttcgcgcgggaagctcttcgtcactttcccacgcagaaacgttcaaacacctgttcgatcacagcttccgaggcgttctcaccggtcaggtcgcacagggcggccagtgcgtcgtccacacagacggaaacggcatccagcccaaagccgcctgcggcagcatccagtgcaccggccacagcgtcccgcgcacgcagtgcggcggaaagctgacgctggccggacagactggcggcatgggggtcgatctggctggtacccagcaggcgggccaccgcagcggagatcaccttgcggctctcctcttcctgacagcacaccggcagcaccatggcaaagcagggtgctatccactctgcgtcaaattgtgtcggtttatcctctttgttgataagtgcaatggctggacggcctgtgcaacgctgtgcaagctccagatcttcccgcgtgggcggctcagagccatcgaacacagccaggatcaggcctgcctcctccagctttttccagctgcggcggatgccctcggcttcaatggcatcttcggtctcgcgcagaccggcggtatcgaacagattcagctggatatcccccagctgtaccgcctgctccaccacgtcacgggtggtgccagccaccggcgtgacgatggccctgtcgaacccggccagcaggttgagcagtgtggatttgcccgcatttggtctgcccacaatggcgcagtccacaccttcgcgcaggacggtatccgcctgataattatggatcaactcgtccagctctgcctttaccccactcagtacgcggtgcagatggtcaccgtccagctccggcacatcctcttcgggaaaatccacccatgcggcaaggtgagcctgaatggcggtaagcgcttccttctgggcactgatcttctttgccagcgcaccgcccagcgcggcattggccagcgcggcaccctgacggccatccgccgagatcagatccatcaccgcttcggcctgcgtcagacccagcttgccgttcaggaacgcgcggcgggtgtactcgccgggcgcggcaggctgagcaccggcagcaagacaggcttccaccagacggcgggccacggcgctgccgccatggcaggaaagctccaccacgtcctcgccggtatagctgtggggcgcgcggaaaaacagggccaccccctcatcaaatgcttcgtccccttcccggaatgtgccgtacatggcggtgtagcctttggcatcctccaccttttttgcggcgttggccgggcggaacacccgggctgctatgggatagctctccgcaccggagagccgcacgacggcaatgccgcctgcgcccggcgctgttgcaatggctgcaatggtcgtttcctgcatggttttttctggcttcctttccgcgcccggtctggccgcttgctcccatctgcccacagcagcgagaccaatacaatttcattgtaccacgaaatgctgcggaatggtactgttttttcaaccaattcccgggaaacggttgaaaatccgcccgtttctcacacaaaaaaggggctttccgtcccaacacggaaagcccctttttacaggaaactgttttttagaacttggcgatatccgccgtggtgatggccttgccaggcagcgtgcgtgcatcggcattctcattcagggccagcttgccctcgcgcagcagctgcacagccttctggtgatcggcagccttccagttgttgcccacgatcttccagttgttgttcacgtgcggctcaatggtgccgcccttcacggtgcggatgtattcgcccagcagctcgcggataccgcccacgtcgccgcgcacatcgatctccaacagcttgggcagctcttcgcccggcaggaagatgtccgcagccgtcagcagctgggtggtggcgcggtagttgttcactgccacaacaaaggtgtcggtgtccttcacggccttgccgttcggccacttgaggttcttgatgcggtggcccggctccttggagatgtccagctcatagttgacgccctcaaaagcatcgtacaggtagtagcgcaccgaggggtcaaaggcgatggtcacttcatccggcttccatgtcttgaagaaggcagcagaccactccatgaagcggcgcagctgctcgccggtcatctgcagcttgtacagggtgttctggtaggtgtagatgctggccatatcgcacttgcggatggtgcccgcgcgcatctgggaggtcatggaggtcagggcggtagcagagacctgcgcaccggtgtagtacatctgcacttcgttgatgaagtccagcagcgcggtatcctgcaccatggcctgcggcaggcagtcgatctcgttttcgggggccagatcgccgcccttcagctcgccaatgggggtaacagcgtcttccttggcacgggtgtcgtaggaggccagcaaagcggtcagctccggatcgggctcgtactccttgatctgcaggttttcagaggtgcggttcacgaccttccacttaccgtccagctggcgctccagatagacgtggatctcggacagggtggcaccggcgttcttgttctccaccaccagcacgttgttgatcatcatgttggggatgctcctgtggccgtggccgcccacgatcacatcaaactccgggcaggcattcgccagatcggtgacgccggagccatagacaccgtactcgttctcggtatccatgtgcatgacgccgatcagaacatccacctgatccttgatcttatcaatgatcttgcggctctcgtccacagggttggtgaccttccagccctccagattcttggcatcccagcggatgatgttgggggtgaccatgccgatgacaccgatcttgacagtgcccttcttgatgatggtgtagccgtcggccagcggggtgccgtccggtgcgtaaacgttgccggtaagcaccttggccttctgctgtcccatgacctttttcagcacatccatgccgtagttatactcatggttgccggtggtccagatatcatagccgatggcattcatggcagcgatcatgggatgcaggtcatcgttcaggaacagctctgcggagttggcctgaatggtatcgcctgcatccaccaccagcgtgttccgggtgcggcactgcttgatggcagtcgcctgctgggccacactgccggaagcatctgccttgttggcagcgtagtcccaggggtcgaatttgccgtgggtatcgctggtagcaaggatctgcagatccatgctccacagagacttgatgtcacaggcggctgcagagggtgccatgcagctggcggctgcgatggttgcggatgcccctgcaccacgcaggaagctgcggcgggagatcttgttctgagccatagttgaatacctctcttttcatcattctgtctgttcttcacgaacagaacgctcttgactacagtataaatcctcgaccaattgttttacaattgccatttaagagaaagatttcggcaaaaaacaggcagtttctccaaattttgagaagaatgacttttgacaggctcagtatagcagtatgggaccgtggctgaaaccagctctgtg

SEQ ID NO: 1187 - DNA, 380 bp, Unknown
  gut microbiota DNA sequence
taggaaagctgatggggcgagatgttgagctgctttgcgaggatctgccggtctcctgccgcctgattcagcatgatgatcatgtcactgttctcgaaaatattctcgacttcacgggaagaaagaaggtctttcacgttctgggtcagccccgtgggaataccaccccacttgcggaaacgcttccagatctccacggaatacgccgcagtctgctcctctttcagaagcaggtgcatctcatccatataataccgtgtggactttccgctgctgcggtttgccgtgacacgcccccagacctgatcctgcacaatgagcataccgagtttcttcatctgcttgcccagttccttgatgtcgtagcagacgatgcggtt

SEQ ID NO: 1188 - DNA, 3123 bp, Unknown
  gut microbiota DNA sequence
cctatcggccttgacagctctcccaaaggctccctccttgagggagctggcgcggcgtaagccgcgactgagggagttcccccttgacatctctcctcttctgcactataatacttcaaaaatgaatcattcaaagatgaaaggacagacctgctgtgaacccgaatatcgaattttccatcaagaccgcgcaggcgtacaatgccgtctgcaaaccgttgtgtcaggagcttggcctgtcgcagacggcgctggatatcctgctgttccttgccaacaacccggactataaaacggcccgggacatcgtggaggtgcggcatatcaaggcgaacctcgtctccatgaatgtggacaagctggtgcaggagggctatctggaacgctatgccgtggccagcgaccgccgcaaaacaaagctgctctgcaccggcaaggcagacccgatcatccgcaaggggcgtgtggtgcagaatgcctttttcaagcgcctgctggatcatgtggagccggccgatcaggaggtctttttccggaccatggagctgatcgggaaaaatctggacgaaattataaaggagaacgcataaaatgaacgtgttgtttacggttcttgtcaccttttttgccggcatgggggccggccttggcaccggctttgccggtatgagtgcggctgcagttatcagccccatgctcatcaccttcctgcacatggacccctatatggcggtgggcatcgccctttcttcggatgtgctggccagcgccgtttcggcctatacctaccacaaaaacaaaaacctggatatcaaaaacggcctgatcatgatggccagcgtgctggtgttcacggtggtgggcagctgggtggccagcagagtgccctcggccaccatgggcggcttctcggtgttcatgaccttcctgctgggcgtcaagtttattgtgcgcccggtcatgacgaccaaggaagctatgcagggtgtcagcgccaaaaagcgtgccatccagtccatcgtgtgcggtgtgctcatcggcttcatctgcggcttcatcggcgcaggcggcggcatgatgatgctgctcatcctcaccagtgtgctgggctacgagctgaagaccgccgtgggcaccagcgtgttcattatggccttcaccgctctgaccggtgctgtctcccacttcatgatcggcggtgcgcccaattggttcgtctgggcgctgtgcgtggcgttcaccctgctgtgggcgcgcattgccgctgtgtttgccaataaggcagaccccaagaccctgaaccgtgccaccggtattgtgctggtggtgctgggcgtggtcattatgggattcaaccttctgagctgatatcccctgcccttcaaatgaaaaaagaaagcccgtgcagccggaaactgcacgggctttctctgtatcagaacttacttttcttcaatggtggagtgctcgatcacccagtcggcagccttgcggatgccctcgttgcggcgcatggcgggaatatcagatttttccttgatctcttccagcgtctttttggcgcgctctgcacgagcggccagagcattatcgatatcttcctcggtgggcaccagattttcctgctgtgcgatctgcagcagagccatgtgcacacgggcggtcttctcggcagaagagcgcaccttggcagtaaagctctcgcgggtctcgtggatctggctcaggtagcgatccaggctcaggcgctgcatctgcagctgctgctggatctgctccatctgctgctggtaggtggtctccaccagcacgctgggcagttcgccctcagaagcatcggccagctgggtcaggatctgatccttggcacggttcagcgcaccggcatgctttccgtcgtgcagctgctgcttgacctgtgcacgcagctcgtccatggtgtccagattggcaaccttcttggcaaagtcgctgttcagagcagggatctggcgcacacatacgtcgatcagcttgatcttgaacaccaccggcttgccggccagatcctttgcgtggtaacggttcgggaaggtgacgaagacctcgaattcctcgcctgccttgtggcccagaatgccctcttcaaagccggggatcatgcggccgctgcccagctggacggcctggttctttgcggtgccgccctggaagggcttgccctccagcagaccttcgtaatcgatatgtacgatgttgccctttacggccggacccttgtgcggcaccagctcggcggcagccgcgcggcggcgctccagcacattgtcgatctccttgtcggtcacttccggggtgacgcactcggcggtaaagccggtggtcttggtcaggttcagctcaggctgcagggcaacagtggcagtggccacaaagccctcgtcctttttcacgctcacaagatcgtacacaggattgtcaacagccacaaagccgtgctctgccatggcggcatcatacagcgcgggcacgtccttgtccatcagatcgttgatggcatcgtaccagaaggtgtgctcgccgcggtcagcctcgatctgtgcgcggtccgcttcgcccttcttgaagccgcggatcgtataggaggcgcgggtgcgttcgtaaacggcgttggatgcagcttccagctcttcggggctggcgctgaaggtcattttgcagacactcttttcgggagtttccacgcttaccagtttcataggatctaccctccgtggtgtctcgctgcagagaaaacccggcggcgcagcctccacgcggtgctgcccgcaaagctcctgtacccctgcacggacacagattaaaaacatatagtaaggctattatagcacaagaacgacaaaaacgatacaagaaaaatcataaaaaatgctgctttttgaaaaagataaaaatatttgcaaaaaactgttgacaaaacccagtctgagtgataaaatacatcatgttccgaacggaacgtatgcgttggtagctcagctggatagagtgactgactacgaatcagtaggccgggggttcgagtcccttccatcgcaccagaaaatgccgtgaaatcgaaagatttcatggcttttttgtttt

SEQ ID NO: 1189 - DNA, 1556 bp, Unknown
  gut microbiota DNA sequence
cagctaacgcaacccgttgctgttgcttagcctgcgggtcccaacccgtaggaatgtctatcaggggtgtacccattttgtaccggtttctttttgtgcgagggagcagacctcgaacaacactatatattatataaaagaaagcgcgatgaattctgagaactcatcgcgttttttctcttatgcgggtagtgggggtcgaacaacaaaaaatgattgagtaacgtcaaaagcatatctgcaacgcgcctaagcacttgctaaaagggtagtgtggttggcttgtagtccatgtattttgctacgtttacaaaaaagagtgttaccaaatgtgttaccaaaatcacccttgagccttcctgaatgccgcggtggtagcggcagcaagatcttccctctgaccgtcaagctcgtgccgatacactccggcagtgtccatgttcttgctgtgaccgaccagcatcttcagctggctgtcggtcaatacgccggattcaatgctgacgaaagtgtgtcgcatctcatacagcgtgacctgaggctcaatgccattgtcacgctggtacttcttccagcgcttgaataaagccctctggttcgggatctggaacaaaggggtggtatagttcagcgggatatcggaagccttcagcaaggccacctgcgcttcgtaggcctcatgggcttcctcgcccatgtcaaatgagcgaatggcgttttcgttcttgccggtggtttcctcatccaaccggttgatgctgcggcgcagattgaccgtgttccctttgacgtcaccataccagagccccacaagttcaccggggcgtacacctgtagcgactgcaaaccggtaggcatagatatactcgtcaaagaccagcttgccatagtaaaggcgggtgtccacatcaaacaggactttcaaagcggtcggctgtaaaatctttttcttccccatgcgggcattcttcgggatagacagctcagggaacatcgtactgtacctgttccggcggcaccatttcaaaaagctgatctccgttgagcggatcgtcataatggtcttgcggctcaaaggcttgtcgcttgacctacgctgacgctcctttttaaggcatcgctttttgaaagacatattgatggctttttgcagatcgccttcggtcagctcgtcaatgcggatgtccccacagacaggcagaatatagtaatctccgtatttcttgcactgctcaacataggatgtgccgcaggtgagcttcagttcttctacccactgggcatagagggcagctaccttcttcttgccgtcccggatgctatcgtcaagccaggcatcggcctttgcgttggcttcccgctggccggtgcggccaggcgtgctgctgtaaaaccgtttgcgggtgccgttcttctgcaccgcgatgcaccagcggctttccttctcgacccaaaatgccgtgttggttctctttttcataaaatccacctccatacacaagggtacactttgacaagcctgcccggaggtggtacaatacaagtgttcatgttgg

SEQ ID NO: 1190 - DNA, 22864 bp, Unknown
  gut microbiota DNA sequence
gaagtgccgagactgagagggcgaggccgttcacaaaataccccgccgcgtcgggctgccgtttctgcgggccgacgcggcttttataaaggatttcagctatgaacaaaaaatcctatctgagccgggtgcggctgccccgcaccctcgccgaatggctggaagcggtgatgaacttcatcttcttcctgtgcggtatgctggcggtgggctgcgtggtgctcatctcggtgtacatggtgatctccggcgtgccggccatccacaagatcggcctgttccaattcctgttcggcacaaagtgggcctccacggcggcccagccgctgttcggcatcctgccgttcatcctgtccagcatctacggcacgctgggcgctgccatcatcggtgtgcccatcggcctgctgacggcggtgttcctctccaaggccgccgaccccaagctgcgcaccgtggtggtcaccgccatcgagctgctgtccggcatccccagcgtggtgttcggcctgctgggcatgcaggtgctggtgcccgccgtggcaaagaccttcggcaaggcttctggtgcctgcctgctgagcgctatcgtggtgctttccatcatgatcttgcccagcattgtgtctgtgtcggtcacggcactgaacgccgtgccgccggagtatgagcagggcagtctggcactgggtgccaccgacaccgaaacatggttcaagatcagcattccggcagccaaaagcggcattgccgcaggcattgttctgggcatcggccgtgccatcggcgaggccatggcggtgatgatggtggcaggcaacagccccaacatgccggacagtcccttccgcagcgtcaccttcctgaccaccgccatcgccaaggagatgagctatgccggcggtctgcagcggcaggcgctgttcagcatcgcgctggtgctgttcgtctttatcatgatcatcaatgttgtgctgaacgttgtgctgaagggaggaagccgcgatgaataagggcctttcgccttcccgtcagatgtggaaccgggtcatgacggcactggtctgggccagcgccgttctggtgatggttctggtggccggtatcatcggcatggtgctggtgcggggcatcccccacatcagctggaagttcctttctaccactgccagtgtgctgaaaaagaccgacggcatcctgcctgccatcctcaacacactgtatgtcattgtgctgacattactgatcgtactgcctctgggcgtgggcgcggcggtctacctgaccgagtatgcctccaaccgacggctcatcgaggtcattgagttcaccaacgaaacgctggcgggcatccccagcatcatctacggtctggtgggcatgctggtgttcagtcaggcgctgggcttccagacctgtctgctgtccggttcactcacgctggtggtcatgaacctgcccaccatcatccgcaccacgcaggaatccctcaagacggtgccgcagggctaccgtgagggtgccatgggcttgggtgcaggcaagtggcacatcatccgcaccatcgtgctgccctgcagcatcgacggcatcgtgaccggctgcattctggctgtgggccgcatcgtgggcgaaagtgccgccctgctcttcaccgccggtgccgcagaggtcattgccaagagcgtggccaaagcctacacctccaacggtgccaccctgtcggtgctgctgtacctgcgtgcctttgaggacggcgattttgcttccgcatggggcatcggtgcggtgctgctggtgctggtgctggccatcaaccttgcggcgcggctggcaaagaccaagctgaaacagaaacagtaaaatttgattttactgttcaaaatggcctccgcattcgctctggccatgaatcgcggaaaaattatttttaatttcgtagatttgaaaaatctgcggatttttcaaatctaccttttcacgggaagggtcgaaacggtaaacttcctgttgaaattcaacaatgaggtactctatggaaaacacgaacatgccggtgatatcggcaaaagacctgaacctctggtacggcgacttcaaggcgctgaaaggcatttcgctggacgtgggcgagcgggagatcactgcgctcatcggcccttccggctgcggcaagtccacctttttaaagaccctcaaccgcatgaacgaccttgtgccgaatgtgcgcatcaagggcgatgtgcggctgaagggcgaggacatctttgcccgggaaatgcagcttaccgacctgcgccgccgggtgggcatggtgttccagaaggccaatcctttccccatgagcatttacgacaatatcacctacggccccaagctgcacggcgtgcgcaataaggctgagctggacgagctggtggaaagctcgctgcggggcgcggccctgtgggacgaggtgaaggaccgcctgaaaaagagcgcgctgggcctttccggcggccagcagcagcgtctgtgcatcgcacgcgcactggcggtgaagcccgaagtgctgctgatggacgagccaaccagcgctttggaccccggctccaccatgaaggtggaggagctgatgagtgagctgaagaagaactacacggtggtcatcgttacccacaacatgcagcaggcggcccgtatcagcgaccgcaccgccttcttcctgctgggcgagctggtggaagtgggccccacggcgcagatcttcagcgcaccgcaggataaacgcaccgaggactacatttccggtcggttcggttaaaggaggaaacagctatgagtatccgtaaacagtacgacaccgatctggaatcgctgaaaaattcgctgaccgaaatgggccgcaactctgccgatgccgtggagaacgctctggaagcgctctgcgttgctgatgccgatgcagctgcggccatcgtgaagggggatgcccgcatcaacaatatggagcgggatatcgagcaccgctgcatgacattgctgctgcgtcagcagccggtggcaggcgatctgcgccgcatctccaccgccatgaaggtggtcacggatattgagcgcatcggcgaccatgccgccgacattgccgagatcatcccccaccttgtcaccgtccgcaaagagggcgacccggcggtaagtcaggccattgccatgggcaaaaaggcccaccagatgatcctggatgcccttgccgccctgacggcagaggacgaaaatgccgcccgcagggtgatcgccgcagacgacgaggtggattacgacttcaatgccatcaagcatcagctggcgcaggagatcgccgaagatcccggcaaggtggatgcagcgctggacctgctgatggtcattaagtatctggagcgcatcggcgaccacgccgtgaatgtggccgagtgggtgcagttcgtgcgcaccggccgctataaggacgagagcatgttctgagcatttcccttcctcatgtttgagggttcgtgttttctttatttctcctgaaaaaggccgtttctgcccggtgcggaagcggtctttttctgtaagacgaaaaccctctcaggctcactgcgttcgccagctcccccgaaggggggagcttttaagcatctaccggttcgtgccgataaagctcccccttcgggggagctggcacgccgtcaggcgtgactgagagggggctgactcctacaacgaaaattgactaaaaattttttagctttctgcaatattccggcaggccggttcgtatcagaagtgtaagggccggcaaagggcctgcgatctctgtgcggcgggtgtccggcttcccccagtccccgcccgccgcacctttatggaggaagatcaaaatgatacagatgaagcattttccgctggaagcacgcagcgagacggtcagccgcgaagcactggtgcaggcggcactcaaagagatcacccagaattaccgcgaagcaagcctttccaacgtggcacgggagtacggcgtttcgctggcatatgtcagcgagtgcgtgcgtgcccagaccggacgcacctataaggaattgctgcaaaagcaccgtatggagaccgctgcccgcctgctgcgccgcagcgacatgaacatccagcagatcatttctctggtgggctacgagaacaccagctatttctaccgcctgttccacgagcggtatggtctcagcccgcgggaataccggctggtgcgcaccggccatggccgcgccagcgcataaggtacttactctaaaagcagggactgctgcacatcgttttagccgaaagtgcagcagcccctgctttttgccgttttggagcattttaaggtactttggtgcgggaactggatttttatggtaatttgtagtacaataagaacaattctcaaagtgctgtgccgaaccgagcgcagcgcagaaaagacgaggtggaatgaatgtttcgtggagcagtgagaggggatctgccccagatcctgaagatctacgcccatgcacgtgcagtcatgaaggcatctggcaacccgacccagtggggggataatttcccgccgcaggaactgctggaggaggatatcgactcgaaccggttgttcctctatgtggtcaacggccagatcgaggccgtgtttgcctttattctgggggcagaccccacctacgccgccattgaggacggccagtggctggacgataccctgccctatggcacggtgcaccgtctggcatcggccggaaagcacaagggcgtggcatcggcagtgctggactggagcatggagcactgccagagcctgcgtgccgacacccacgccgacaacaagatcatgcagcatctgctggaaaagaacggctttacccgctgcggcatcatccatgtggcagacggctcgccccgctttgcctaccagaagcttgcccccacccagccgctgggttgaaaacagaatacacccccaaagagccccggtctgcggatgcagagcctgccatgcaggactgcgcacgcaggcttttttgtttgcccccgctcgctccgccctgcgccgctcgacggtgacggagaaaacaaagccgcgaatggccaaacctgtccttgctacaaatacagatcaacggaagacccccatggacaccgacctgaatgcaaatttgtgaacgaaaaatgtctgaaaacgctttcatttctctgccgtatgtgctataataacacccgtccttgtgtaagagacaggaagctgtacgccattggcgtacaataggaaagaggagtgtctatatgaaaacgttgaataaggcagttgcccgctacaacggcatcagcctgatcgttcgcattctggtcggtctgatcatcggtgcggtgctggctctggtggcccccggtgcaggctgggtgggtgaactgggcagcctgttcgttggcgcactgaagggcatcgccccggtgctggtgttcgtgattgtggcaagtgctctggcacagggctcttccaagctggaccgccgcttcggcacggtcatctggctgtacatgctcaccacctttctggctgcggccatcgcagtggtgaccagctttatgttcccggtcacggtcgtgctggcagacgctgcccagtcggacgtggtgccgcagggtctgggcgaagtgatgggcactctgctcaccaactttgtggcaaaccccgtcagtgctatcatgagcggcaactacatcggcatcctgttctgggcctgcatgttcggcgtggccatgaagaagatcggctctgacaccaccaagacctttatggcaaacaccgccgatgcggtctcccagatcgtgcgctggatcatcaatctggcacccttcggcatcatgggtctggtctacaccaatgtttccggcaacggccttgccatctttacccagtacggcaagctgctggctctgctggtgggcaccatgctgttcatggccctcatcgtctcccccttcatcatgtttatctatctgggctgcaacccctatccgctggtgttccgctgcctgcgtgagtccggcctgaccgccttcttcacccgcagctccgccgccaacatccccgtgaacatggccctgtgcgaaaagctgggtctggacaaggatatgtactccgtctccatcccgctgggcgccaccatcaacatggacggtgccgccatcaccatcaccatcatgacgctggccgctgctaacaccttgggcattcaggtgtctctgcctgcagccatcgtgctgagcgctatgagcgctctgggtgcctgcggtgcttccggcgtggccggcggttccctgctgctgatccccatggcctgctccctgttcggcatctccaacgatgtcgccatgcagatggtgggtgtcggcttcatcatcggcgtggtgcaggactctgttgagactgccctgaactctgccggtgacgtggagttcgctgccaccgccgagtatcatcagtggcgtaagcagggcaagtccctgccggagttcctgaccggtaagaagaactgaaaaatttaaaaatatagaaaagggctgttgccaaactccttccgacatcgcttacgcgatgccacctccctcaatgagggaggcttcatagcttaccgtcatgtcaggctccctccgtgagggagctggcgcggcgaagccgtgactgagggagttcttggcaacagccccttcgctttttacgggaaaagatgtaacgggcagcagggcgtttttattacggcccctcccgtgaaaaaacagaagagtagcggccgcagccgctgctcttctgtaataataaaaataaaatttccgctgaagatattcgggttgcggctccctgtgtctgcttcgtgccttaggcggcactcgcacccagcaggccgcagccccaacggctcctccttgtttctgccgcaggcagcggtcgttgccgttgcagagcaaagcggagagcagcctaaatagtaagtcaatccatgaactttgccttctgcagagcaatcagaatcagcgggatgagcaccagctgagccacgatgcccggcacggcggtgagcagcgcaccggacaaaaacgcgctgaacgggaagctggaaccggtcaggccggccagcacaaagcgtactgcaccccagaccaaacggcccgccaccatggcggtgacaagagaagcgtacatcatggacacggtgtgcttcaccttgtgccagagcacgccggacacaaggccgtaggcggccagctcaaaggccatggcaatggcgatggggaacatcggcggcatgccgaacagcaccgaccgcaccagcggagcaatgaagcccacggcaaggccccatgggccgcccagcacaaagccgcacagcagaatgggaaagtgcatcgggcacagcatgttgcccacctgcggcacatggccggtgatcatgggcagcacaaaggccagtgcaaggaacagtgcagccagcacgaggctgcgggtggtggaatgggggttcgttttcataaaaagcttcctcctttggccagacaaaaaagaggtctgcccggcttacaagccaacggcagaccccttcgtggtgtctatagcagcaaaaataagatggcagaacgcaaaggccccctgtgggctttgcgctgcaccgctgcgtaagcgcagcggtggataaaatgctccatcaggatggagaacacgggcttctgtccgcacacccggcttcgtaccggaatctgtgaaaaatatagcagatgcctctggctttgtcaagatacggcaaaaagcctgcaatttaaccaaaaagcggcaaatttcaatgaatatttccccgcgtgtgtacattttgcatgaagaagcttgacctttttgcatagaatagctaatataaacttgaaaaagagcgcgctgcgggcagcaggactgcaccggcgctgacgaaaggcttttttgaacatgtgcaaatctgaggttcatacgggaggaccatcatgacaaatgcagaaaaacttactctggccaagcacgcctgccacatccgcatgggcgtgatcgagggcacgcacagcgcaaagtgcggccatccgggcggcagtctggatatcgccgagctgctgagctacctctatttcgtggaaatgaacattgacccgaaggaccccaagaaggccgaccgcgaccgtctggtgctgtccaagggccatgcagcaccggcactgtatgcagcgctggcagagcgcggctatttcccggtggaagaccttaagaccctgcgtaagatcggcagctatctgcagggccaccccaacatgaacgagaccccgggcgtggatatgtccaccggcagtctgggtcagggcgtgtctgccgcctgcggcatggcactgggtgccaagcacgccggtaagcccatcaacgtctacaccatcctgggcgacggcgaggtggaagagggcgagtgctgggaagccttcatgtttgccgcacactacggcctttccaacctgtgcgttgtgctggaccgcaaccacctgcagatcgacggcaccaccgagaccgtgatgaacagcgccccgctggaagagaagctgaaggccttcaacttcaatgttgtcaccatcgacggccacgactacgaccagatcgaagccgccatgcaggcattccatgcagagactgcaaagcccacctgcatcatcatggacaccacaaagggcaagggcgtttcctatatgacaaactctgtggactggcacggcaagggccccaacgatgacgagtacaagatcgcaattgaggaactgaacgccgcatacgccgcgctggagcaggaggaaaactaagatggcagatgtgaagaagatcgctacccgtgaaagctacggcaacaccctgaaggagctggccgccgaaggccacgaggatctggtggtgctggacgcagaccttgctgctgccaccaagaccggtatgttccgcaaggcttacccggatcgccactttgactgcggcattgccgaggaaaacatgatgggcgtggctgcgggcctgtccaccatgggctacgtgccctttgtttccagctttgccatgttcgccgccggccgtgcctttgagcaggtgcgcaactccattggctatccccacctgaacgtgaagatcggtgccacccacggcggcatctcggtgggcgaggacggtgcttcccatcagtgctgcgaggactttgccctcatgcgcagcatccccggcatgaccgtgatctgccccgccgacgatgtggaggcccgcgccgctgtgcgtgctgcctacgcaatggaaggccccgtctatctgcgctttggccgtctggctgtgcctgtgttccacgatgccgagaactatcactttgagatcggcaagggcgagcagatcactgagggcagcgacattgccatcatcgccaccggcctgatggtcaacgaagcccgcatggctgcggagcagctggccgctgagggcatccacgcccgggtcatcaacatccacaccatcaagcctctggacgaggagatcgtcctcaaggctgcaaaggagtgcggcaaggtcatcaccgccgaggagcacaacgtcatcggaggtctgggcgaggccgtctgcgccgtgctgagcgaaaagctgcccacccctgtgcgccgtgtgggcgtgcaggacgtgttcggctgctccggccctgcatgggatctgctgaagttctacggtctggatgctgccaccatctgcaagactgcccacgaaatgctgggcaaataagcgcttctcccactgtatctgcgccgccgcgtcatttgctgacgcggcggcgtttttgcatgccgcaaatttttttgccaaatactgcaggatatgatatgcttacagaaaaagcggaagggagaatcgcaatgctgatcgtggacaaacttgcgtttcaggaaaaactttcggaaggggaaaaaacgctggccgcctatattttggcgcatgggatggaaattgccaaatattccacccgcagtctggcagaagtgacctacacctctccgccgaccgtcctgcgcctttgcaaaaagctgggttttaccggctttgatgacttcaagcaaaattttgtgcgtgaactggaatatctcgaccagcaacagggcaaggtggatttcaattttccctttgctgaaaacgacagccccatgcgggtggcgcagaacatcggcgagctgtacgaagaagccgtcaaggacactatgcagcttctccggtacgaagacctgcacaaagcggtgctcctgctcaaatatcacgaggaaatccacattttttccgccgggacggccatcaatcaggccgaatccttccgagaaaagatgctcaagatcggcaagcgggtggtcattttcaacaatctgaactaccagcggtatcaggcctgctgtctgtccgagagggaccttgccatgatcatttcctattccggcgaaacggcgcagatgctggagattgcccggcagtgcaaacgctccggaacacccatccttgcgctgaccagctttggcgaaaacagcctgacctgttatgcggattgcaagctgaccctttccaccaaagaaagcatctatcagaatcttggggactatgcttcccatctgtccatgacccttctactggacatcttgtattccgagtacttccggcagaactaccagaagaattatacctacaagctggaacgcgcccgagagctggaacagcaccgcacctccaccaatcctattttgttgaatctgcacaaagaaaatgcggaatgaaacactgttccgtttttgatcgtgcaaaaagaaacagaaaaattaacactgtaccaataagtttaaaaaatattgcacaaaaacctccctgcaagtattctatacctgcaaggaggttttcaagcttatggagatgccaaaaaagttcctgtggggcggtgcgaccgccgccaaccagtacgaaggtgcctaccagacggatggcaagggcctgagcattgccgacgtggaaaaaggtgcacgccacggcgtcccgcgcgagattcatacacaggtcatggagggcaactactaccctagccatgaagccgtggatttttaccaccattacaaagaggacatcgcgttgtttgccgagatgggcttcaagtgcttccgaatgtccatcaactggccgcgcatctttccgcagggcgatgaattgcagccgaacgaggccgggcttgctttctatgaccgtgtgttcgacgagctgcaccgctacgggatcgaaccggtggtcacgctttcgcattacgaaacgccgctgtatctggtgcagcactatggttcctggcgtaaccgagccctgatcgatttctttgcccggtactgtgaaacggtgttccggcgttacaagggaaaggtccggtactggatgaccttcaatgagatcaacgagaccatgaaccagagcgagccataccatcaggcaggcgtgctctttgccgaaggcgaggagcacaacgctgtcaaagcgctggtcagccacaacatgttccttgccagtgcaaaggccgtgcagatcgggcatgcggtcgacccggaaaataaaatcggctgcatgatccagtatcccaccacctacccgcgcacctgcgcacccaaggatgtgctggcacagagattccagatgatgccgaactattattacaccgatgtgatgtgccgcggacactacaccagcctgtgcacggcacagctgcggcgcatgggcacttcggtagagatgcagccgggcgatgccgagctgctggccgcaggaactgtggattacatcgcattcagctattatttttcttcagttgcccgtgcaacggaagatacggattgctgtgtagaacgcagcaatccgtatctccagcgtaccgactgggattggcccatcgatccggacggcctgcgcatcgcactgaatgagctgtatgaccggtatgaactgccgctgttcgttgtggaaaatggtctgggtgccatcgacaccgtagagccggatggcagcattcaggacgattaccgcatccgttttctgggcagtcacattgatgcgctgcggcaggccattgagctggatgacgttccggtgatcggctacacctgctggggtcccatcgacattatttcggtgggcaccggcgagatgcgcaaacggtacggcttcatttacgtagacaagaaggatgacggcagcggcacgttggcccgcaaaaagaaaaagtcgtttgcatggtacaaaaaagtcattgcaagcaacggcgcagacaccgccctgtaagcaatgcattttttaggatattgaaggaggcaaaacaaatggatgcaaagaaaactgcccagcaggtgctggaacaggtcggcggcgcagaaaatgttacatttctgacccactgtgtcacccgcctgcggttcaacctcaagtcaatggacggcgtggacgaggccaaggtcaaagccgtacccggcgtggtgggtgtcgtgaacaaaggcggccagtatcaggtcatcatcggcaacgaagtagctgccgtgtacgatgaactgatgaaactgggcgacttcggcggtaaggaagtcaaacagcctgccgccccggccgaggaaaagaagagcagggtcagcatcattctggacacgctggccggtgtgttcaccccgctgatgccgttgatcgccggtgccggtatgatcaaggctctgctgtctgtgctgaccctcttcggctggatcgacaagagcggaaatctgtactatttcctcaacttcatcgcagactcttcctattacttcctgccgatcttcctggccaactccgcggccaaaaagttcggctgcaacccgcagatggccatgctgctgggggccatcctgctgcacccgaacttcatcgccctgaaagccgatgccgatgtggtccatgtgctgggtctgccggtgaagatggtaacctattcttcctcagtcatccccatcttccttatcacgctggtactgccatacgtggaacgatttgtcaataaggtcgtgccctctgtggtcaagttcatcctgcggccggtgctcaccatcctcatcatggctcccatctccctgtgcgtgcttggccctctgggcagcatcatcggcgatggtctggtcaacgtcctgctggccattgaaaaggtctgcccctgggcactgcccaccgtcatcggtgcctttatgccgttcctggtcatgaccggtatgcactacagcctgctgcccgcttatgtcaactctctgtctatgctgggctatgagacggtcatcggccccggtaatctgccttccaacattgcacagggtgccgcagccctctgcgttgccatcaagaccaaaaacaagaacttccgtcagctggccgtttccggcggtgtgaccgctctgctgggcgtgacggagcctgctctgttcggcgtcaacgtccgtctgcgtaagcctctcatcgccaccaccatcggcggtggtctgggcggcctgtatgccggtttgaccggtgtgcgccgttttggcggcggtggtgccggtctggcagccatcggcctgtatgtcggtgaaaatcccatgaacgtgatcaacgcactgatctctgccgcgatcgcctttgtggccacctttgcgatcctctggttcatcggttttgatgatgtgccggaagaagcctgatctcttctgaaacaagcagcgccggaacgattttgccgttccggcgctgctttttacgcctctcccagcagctttgcgcggctggcgtatacagcggtaaatacctcccgcagctgttcgatctcggggcgcgggtcgtcccgcagggtcagcagacaggtgtccggcaacggcagctgcagcggcaggtaccatgccgccggaaaggccgggtatttcatcgggcacaaaaacatgccgcgcccggcaagcagatcgttgtaaacacattcgtagttttccaccatgtgccagcttggtgcggaaaacggcaggccgggctgaacaacggcaagatccaccatttcctgatacagcggctcataaaacagctgctgcccggcaagatcggccagcgtcagagtgctgcgccctgtgagcgggtgctccggcgatacgatcaggtaaaaggtgttgtgcaggatgggggtgcgctcgatctccggctgcagcggcccaaagggcagatagagggctgcgtctgcctcgctgcagagcatttcgtggggattgcgtgacacgggccgagtgtccaccgcaaactcatatcccggcagcgcggcgtgcagccgtgccatcaggatgggataaatgggatcccgctgcagcagcaccggcggcaggcgcagggtcagtgtgcgccgccgggcaaagcccttcagcgcggtgcgggcgttcaggatgctgcgatagatcccctccgcctgcggcacaaaggcccggcctgcttcggtcagcgccacgcgggtggtgctgcgctcaaacagggccagatcaagctccttttccagactgcggatctggtagctgagggctggctgggtgcagtacagctcccgggcggctgtggtaaaattcagggtccggctcacggtgagaaaacacagcagctggtggtcgttcatccgaaaaaagctcctttctgtgcaggggaagatccgtctgctctcagtatagcatggcgggagacggttataaacactttttattaggatgacaagatttttttgtttcccttttacttcgttatattttatactaagtgcggcgcgggaaaaactcccgcagagacgaagagaaattgatgagaagaaagaggaaatccaaatggaaaagatctcccgcaaaggctttttgaaggtcgccgccgctgccgccatgagcggtgtcaccgccggtgcactggctgcctgcaactccgcagcttcttccagcaccgccgctaccggcgatgccatctacaccgccggtacctacaccggcacggccaccggcatcggtgaggtgaaggtgaccatgaccttcagcgagaccgccatcaccgaggtggtcatcgatgcctccaacgagaccgagagcatcggcggcgtggctgcgcccaccctgcaggaggccatcatggccgcacagggcaccgagatcgacaacatctccggcgctaccgtcaccaccaatgccgtcaagaaggcggctgccagctgcatcgagcaggccatgggcgtcaaggcagacggcgcagacagctccgctgccgcttcggagaacgactggctgggcaccgagccggagatcgacgagagcaaggtcaccaagacggtggacgtggatgtggccgtggtgggctgcggcgttgccggtgtggcagctgtgcgcagcatcgccgaggacggcggcaaggtggcagcctttgaaaaggcggacggcccccagtgccgcagcggcgagtatgccgtcatcaacggcaatgtgcaggccaagtggggccgcaacacctggacccgtgagcagatcgacgagatcgtggattctcacatggtggaaagcacctaccgctgcaagcgctccattatgagcaagtgggcccacaacatcggcgatgcctttgactggtgggtggaagcaaacccggagctgtactacgccgagaccacccgcagcgccatccccgacgagaatgcaaacaacttcctgatccccattttctacccgctgcccgagaactacgactggaagcaggagcgcttcccctgctaccccacctccgtggagttcctgcctaaccagtccgtcaccgtcaatgccaacatgcagaaggccgttgacaccggcaacgtggacaccttctacggctgctttgtggaaaagctcatcatggaggacggccgctgcgtgggcctgtatgcccgcgatgctgccaccggcgagtacatcaagtgcaacgccgccaagggtgtcatcctgtccaccggcgattactcccagaacaccaagatgctgcagcatttctgccccgaagttattgagaacaacatccagtgcctgttcaccaatgtggacgtggagggcagcttcaccaatcagggcgacggcatccagctgggcatgtgggcaggcgctcaggtgcagcagagccacgcacccatgatccaccatatgggcggcggtgccgacctgtccggtgtgggcgtcatgggcaacgcaggcttcctgaatctggatctgaacggcaagcgcttcatgaacgaggacctgcccggccagcagctggaaaaccagatcgagctgcagaagaaccgcgagagctggcaaatcttcgactccaactggccccagcagctgccctacatgcccgcagcccacggcggtgcctgctactacgaggactacgccagcgaggcagagggccccaagaacaacaccacttaccgcaactacaagagcccctatcagctggaggcagccgtggccgatggccgcgccgtcaaggccgacacgctggaagagctggtgacaaagatctacccggatgacaccgctgcccagcagaccgctctggagtccatccagcgctacaaccagctggcaaaggacggctacgacgaggacttccacaagcccgcatcccgcatgtgggcgctggagaacggccccttctacgccgacaagttcaccaccgcgctgctgctggtctgcatcggcggtctggagagcgacgagaactgccacaccttcgatgccgaccgcaacgtgatccccggcctgtatgtggcaggcaacgtgcagggcaaccgctttgccaccgagtaccccatcggcctgaagggcgtcagccactccatggccatgtactacggctacgttgcaggcaagaacgccatgcaggaagtctgagcctgacagcacaataacataaccattccccgcccggagcagtattctttcttcctgctccgggcttttttgtgccccaatgtgacccggttacggaaaaaccctggtatttggggtatactgatgccataagaacaatcacgaacgaaccctttcaggaggtagaaatatggcagttgttacgatcacgaaggaaaattttgagcaggaggtactgcagagcgcaaagcccgtcctgctggacttctgggccagctggtgcggcccctgccgcatgctcagtcccgttgtggacgaggtggccgaggagcgcaccgatgtgaaggtgggcaaggtgaacgtggacgagcagccggagctggcaggccagttcggcgtgatgagcatccccaccctgctggtgtttgagcagggcaagctggtgcgtcaggccgtgggtgcccgcccgaaagccagtgtgctggagctgcttgggtaaatatgcgtgctgaaaaggagctgttgcgccatgcaacggctccttttcttcttttccctgtacaatcgcacagaaaaatcgtatcattgagttgaaaacaccgtcactttcctactttacaactttacctagataaagtaaaataaactcaagtaagaaatgggggaaccgacaatggaattcagcattgcaaacctgcagcccaaggagcgcgcctcctttgcgctgcgcgccttgtacgaagcggcgggctgccgcaagtatcatatgggccggtttgaggagtacggcctgtatcaggagaaccgcagctttttgtcatccgagcaggtcatcacctttaccgatctggatggccgtctgctggccctcaagccggacgtgaccctctccattgccaagacggcgcagcccgcccccagcgagaccctgcgctactactatcacgagaacgtctaccgcccttccgccgagagccacacctttaaagagatcagccagatgggccttgagatgctgggcgcggtgggcgaagcacaggtgcagcaggcggtgtgtctggcggcgcggtcgctggatgcgctgggggccgattgggtgctggaagtgagccacatgggctacctgttcggcctgttcgacgcgctgggcgtgccggatgccgcccgcgcaaggctgctggaaaagctgcgggagaaaaacgcccacgagctgcgggccgccgccggagctgccggtcttgccgatgccgccgataccctgtgcagcgtgctgagcctctgcggcagctatgccgatacccttgcaaaggccgctgctctgtgccgcaatgacgccatgcgcgcggctgtggccgagctggaagcgctggctgtgccgctggaaaaggcgggcggcgtcatccggctggacatgacgctggccggtgagatggaatactacaacggccttgtgtttcagggctacctgaaagccctgccccgccccctgctcaagggcggccgctacgacctgctgatgcagaagttcacccccggtgccggtgccatcggctttgcggtctatctggacgagctggaccgcctgagcgccccgctgccgccggtgcagaagaacagcaccgacagggtgatgctgaacgtggctctgcccaagggccgtctgggcgataaggtgtatcacctgctggcgggcatcggctacggctgcccggaggactacaacgccacccgcaagctggtggtggaaaacccggaggccggcatccgctacttcctcgtcaagcccagcgacgttgccatctatgtggagcacggcgctgccgatgtgggcatcgtgggcaaggacatcctcacagaggcttctgccgatgtgtacgagctgctggacactggccttggcaaatgccgcatgtgcgttgccgccccggccgattacaaggacgaccccagccgcccggtgcgggtggccaccaaattcgtcaacattgcaaagagctactacgcatccatgggacgggacatcgatatcatcaagctgaacggctccattgagctggcccccattctgggcctttcggacgtcatcgtggatatcgtggagaccggcaccaccctgcgggagaacggcctgaaggtggtcaccgagttcatgcccatctcggcccggttcattgccaacaaggccagctaccagttcaagcacgccgaaatggacaccatgctggaaaagctgcgggcggaactgcagaacaaggaggaagcaaaatgatcaagctgtataactttgacgagctgaagcccgaagagatcctgaaccgcgatatccgcgcggaaaagaacgtggaggacgtggtggacggcatcattgccgatgtgcgcgcccggggcgatgaagccctgaaggattacgcgctgaaatttgacggcgcgaagatcgatgccctgcaggtgacgcaggaggagatcgacgaagcctttgcgggcatggatccctacttcctcgaaacgctgcgcgaagccgctgccaacatcgagagcttccaccgccagcaggtgcacaagaattttgtggtgaacgacaagcccggcatcgtgctgggccagaaatatacccccattgaaaaggccggtgtctatgtgcccggcggcacggcggcctatccctccaccgtgctcatggatgtgatcccggcaaaggtggcaggcgtgtccgaaatcgtcatgaccacccccgccggaaaggacggcagggtgaacccggtcatccttgccgccgctgccaccgcaggcgtgaccaagatcttcaagaccggcggcgcacaggctgtggcggctctcgcctacggcacccagagcatccctgcggtggataagatcgttggccccggcaacatctacgttgccaccgccaagcgcaaggtgttcggcaaggtgggcatcgatatgatcgcaggccccagcgaaattctggtgctggccgacggcggctgcaaccctgcatgggtggcggcggacctgctgagtcaggccgagcacgacaaactggcaagcccggtcctcgtcaccgacagcccggagctggccaaggccgtgcaggcggagctggaggtgcagatcccgcagctgccccgtgccgccatcgcccgcgccagcgtggacgacaacggcaagatcatcctctgcaccgacctgcacaaggccattgaagcctgcaacatcattgcaccggaacatctggaggtgtgcgtggaggaccccttcggcgtgctgaacgagatcaaaaatgcaggcagcatcttccttggccgcaacgtgccggaagcgctgggcgattactttgcaggccccaaccacaccctgcccaccagcggcaccgcccgcttctcaagccccttgggcgtagacgactttgtaaaaaagtccagcttcctctactacacccgggaagcgctgggcgaagtagccccccgcatcgccgattttgccgagcgcgagggcctgcacgcccacgcccgcagcgtgaccatccggtacgaaaagtgaggatttgaaccatgagtaaattcctttctcccacgctggccgctgtcaccccctacaccccgggtgagcagccgcaggatcagcagtacatcaaactgaacaccaacgaaagcccctatctgccctccccggcggtgatcgccgccgtgagcgagcacgaggtggaaaagctgcgcctttactccgaccccgcctgtgccgacctgctcaaggcggccgcagcccacttcggtttgcagccggagcagatcatgcccggcaatggcagcgacgagaacctcttctttgcgctgcgtgccttctgcgacgcagaccacccgctggcctatgccgacatcacctacggctgctacggcgtgtggtgtgggctgatgcacattcccagccacatcatcccgctgaaagaggatttcacccttgacccgaaggactactacggcctgaaccagaccatcatccttgcaaaccccaacgcccccaccggcattgcactgccccgagcggaaattgaggacatcttaaaggcaaacccgaacaatgtggtcatcgtggacgaggcctatgtggactttggcggcgagagctgcgtgcccctcatcgaccagtacgagaacctgctggtggtgcagaccttttccaagtcccggcagctggccggtgcgcgtctgggtcttgccatgggcaatgcaaagctcattgccgacctgaaccgggtcaagttcagcctgaacccctacaacatcaaccgcctgaccctgaaggccgggcaggctgcgctggaagataccgcttattttgacaggacccgcgccgccatcgtggacacccgtgcatggacaaaacaacagctggaacagcgcggatttgccgtgctggacagccgctccaacttcctgtttgcaagtaccgacaggaaagacggcaagacactctacaaagagttgaagaaaaacggcattctggtgcgccattttgacgcgccccgcatccagaactggctgcgcatcaccattggcacgccggaacagatgcagacgtttatggaaacgctggataagatcatggaggaatgaaccatgccgaaccgaatgatctcgctggaacgcaacaccaatgagacccagatcgaccttacccttgatctggacggcaccggccgctacgaggtggacaccgggtgcggctttctgaaccacatgctggagctgttcgcccgccatggccggttcgatctggtgctcacctgccacggcgacgtgcaggtggactaccaccacaccaccgaggatgttggcattgcgctgggtcaggcctttgcacgggcactgggcgatatgcgcggtatccagcgctacggcagcttttatctgcccatggatgaagcgctgatcctgtgcgctgtcgatctttcgggccgctgcactctgaactgggacgtccattgcaacaccgaaaaggtgggcgattttgacgtggagtgcgccaaggaattctggctgggctttgcccgcagcgtgcccgccacgatccactttgtacaatttgcgggagaaaatacacaccacatcctcgaggcctgcttcaagggcgcaggccatgcactgggcgcggccgtgaagatcgacgaagcccacaaggacgaaattccttccacgaaaggactgctggtatgatcgcaattatcgattatggcgtgggcaacctgttcagcctgaagtccagcctgaagcagctggggctggaagcggtcgtcaccgccgacgcggacaccatctgcaaagccgaccggctcatcctgccgggcgtgggtgcttttgccgatgccatggccaagctggaggcgacgggccttgtaccggtcatgaaagaagaagccgaaaggaagccgctgctgggcatctgccttggcatgcagctgctgtttgaaaagagctacgagtacggtgagcacgaaggccttggctttgtgaagggcgaggtctgcccgctggagcccgaccttgcggacaagagcctgaaggtgccgcagatcggctggaacgccttgcacattgtaaaggacgacccgctgttcaagtacatccgtgagggagaatacgtctattacgtccacagctactacggcaagaactgtgccgaaagcacgctggctgtgagcgactattccattcccgtcaccggcgcggtgcgggcgggcagggtgtatggcacccagttccacccggaaaagagcggggataccggcctgcgaattttgaaggcgttcagcgaattgtaagcgggctcgccctctcaggcgctaacgcgccag

SEQ ID NO: 1191 - DNA, 4898 bp, Unknown
  gut microbiota DNA sequence
ggtggacacgagcagtgcgagtggacggagagggcgaggacgctaaaggagaaacaacgatgcaattatttccagccattgacctgcggggcggcaaggtggtgcgcctgacgcagggcgactacagccgcatgaccgtctacggcgaggatccctgtgcacaggcgcgggagttccttgcagcgggggccaaaaatctgcacgtcgtcgatctggacggcgcaaaggacggcaccctttccaactacgataccattgccgcactggcaaaacagggcggcttatacattgaggtgggcggcggcatccgcaccgaggagcgcattgaaacatatctctccctcggcgtgggccgctgcatccttggcagcgtggcggtgacggattttgcctttaccgcccggatgctgaaaaaatacggcgataaaattgccgtgggcgtggacgcaaaggacggctatgtggccatccatggctggaaggaagtgagcgccgagccgggcgtggacttctgcaagcggctggcagatgccggatgcaccgccatcatctacacggacattgcctgcgacggtgccatgaggggcacgaacctcggcctgtaccgcacgcttgccaaagaggtgcccggcgtggactttacggccagcggcggcatctcgtccgaagcagagcttctggaactgaaaaaaatgggcactgccgctgccattttaggcaagagcctgtacaccggcgcactggaccttgcgcgctgcgtgcagctggtacaggagtgaacggaggggaaacgacatgatcaccaaacgcattattccctgccttgatgtgcgcaatggccgcgtggtcaagggcacgaactttgaaggcatccgggatgtggccgacccggtggaaatggcccgcatgtacaacgctgccggtgccgacgagctggtgttctacgatatcaccgccagcttcgagggccgggcactgtttacggatatcctgacccgcgtcgccagcgaaatttttatcccgctcacggtgggcggcggcatcaacacgctggaagattttgaccgggtgctcaagtgcggcgcggacaaggtcagcgtcaactcgggcgcactcaaaaatcccgacctcatcccggcggcagcacagcgttacggcaaccagtgcgtggtgctctctgccgatgtgaagcgggtggacagccagttccgggtgttcgccaagggcgggcgcgaggacaccggccgggatgcactggactggatcagctggtgcgtggaccacggcgcaggcgagatctgcctgaacagcatcgacaccgacggcgtgcgcagcggcttcgaccttgagatgctggatgcagttgcggcgcgggtgaacgtgcccatcattgccagcggcggcgcaggcaaaaaggaagactttctggagctgttccaccacaagggcatcgacgcaggccttgcggcgggcatcttccaccagaagctgctgaccatccgggatctgaaagaatacctcaacgcaaacggtgtggagatgcggctgtaacgccggggcatttctccccggcgcggggagaagccgtaacgcgaaactggatttccgcaaaaacaacccgcaaactcttgcgtttgcgcaccgaatacgctaaactagtaatatccccatccggggagggagaaccgttatgaatctgaaatttgatgaaaagggcctgatccctgccattgtgcaggaccactacaccaaagaggtgctcaccctcgcctacatgaacgccgagacgctggcgctcaccattgccgagggccgcaccgtgttctggagccgcagccgtcaggagatctggcgcaagggcgagaccagcggcaacgtgcagcgggtggtgtccatcaccgccgactgcgatgccgatgctctggtggtggaagtggtcaaatccggccccgcctgccacaccggcgccgagagctgcttcttcaacgaagtatacgtctcgccggagctgaagcagttcagctggcagggcctgtaccagctcatcaagggccgcaagactgatccgcaggagggcagctataccacctacctgttcgagaagggcaaggagaagatcctgaaaaaggtgggcgaagagtgcaccgaggtcatcattgcgggcgaaaaagaggataaggaagagaccgtttacgagatcagcgatcttgcctaccatgttctggtgctgatggtcagcgccggcatcacggtggaggatgtgacccgtgaactggaaaaacgtcacgtcattgaccacaaggtcaaacaggaaaggatgcagtgaattatctatggcagattataagaagtccagtgtccattgccactccaccatgtgcgatggcaaaaataccttgcaggatatggcaagtgctgcgtgtgcgcagggcttgaccacgctgggcttcaccggccatagctacacccagcgcgaccgcgaatactgcatgagccctagccgcaccgcccagtacaaggccaccatcgcaaagctcaaggccgaatacaggggcaaggtggatatcctgtgcggcatcgagtgggatatcctcagcgaggataagcgcaccggctacgattactggatcggcagcgcacaccacctgtacggcaagaacaccggcaagtattacgagatcgatttccgcccgcaggacctgtgggactgcatcaacgatgattttgacgcagacccccttgccgctgtggaagcctactttgccgaggtggaaaaggttgctgccctcaagccggatattctggcccacatcgacctcatcaagaagctgaatgccaacggcgagttcttcgacgaagagtcgccccgctacaaggctgctgccctcaaggctctgcaggctgcaaaggcgaacgactgcctgctggaagtgaacaccggcggcgtgtatcgcggctaccgcaaggacttctaccccggcccgtggctgctgggcgagtggcagaagatgggcggcaaggtcatcatcacttctgattctcatgatatcaacagcctgacctacggctttgacgaagctgccgccgccatcaaggctgcaggctttaccagcgtgcaggtgcttaccggcaacggctttgagacgcaggagctgtaattttatggcacggactccttccgtcaccttcggtgacacctccctctgagagggaggcattggcaaaaccagaaactttaccgtcatgccaaaggctccctctttgagggagctggcaaatccggaggatttgtctgaaggagttcaggcccgcaaaaagatcgatcatctgcaatgccttttcctgttttttataaatcgggaagggattgcagatgttttgttttgtgtacagatatcttaaaagttataattttggaggaaccctatgacccacgcgcagccccaaaagaaaagcgtcttcaacatgaacgtagacctgatgcacgggcctattttaaaaagcctgctgctgttcatgctgcccattctggtttccaacctgttccagcagctctacaacacggtggataccatgatcgtgggcaatgtgctgggcgatacagcccttgccgccattggctcctgcggctcgatctacgagcttttagtcggctttggcattggtatcggaaatggccttgccatcgttgcagcgcgctcctacggcgcgcaggacgaagacctgctcaagcgcacggtggtggggtcggtcgtcattggcctgatcgcctcgctggtcattacaacggcaggctttttcggcctgcatgccctgctgcagctgctggataccccggcagaaattctggaagatgcctacagctacatcatcgtgatcgaccttggcgttgtggtcatgtttatgtataacctgtgcgcaggcctgctgcgcgccattggcaacagcgtgatgccgctggtgttcctgctcatcagctcggtgctgaacgtggggctggatctgtggttcattgccggggttggcatgggcgtgcggggcgcagcggtggcaacggtcattgcacagggcatctcggtggtgctgtgcgttctgtacgtgctggcaagggtgcgcatcctcatcccggagaaaaagcatttcgccgtgggcagtcatctctactgggagctgttcagccagagcatctccatgggcctgatgagcagcatcgtgtctgcgggttcggtggtgctgcagtacggcatcaacaggcttggcaccctgaccattgcggggcacaccgctgcccgcaagctgtttgcctttacggagatgccgctcatctccatggcgaacgccggttccaccttcgtttcccagaaccgcggcgcaaaccagcccgaccgtgtgcgcaggggaatgcggcagatgtatctgtactcggtggtggtgatggttgccgccgtggtgctgatgaactttggtgctcagtggatggtgcagctgatctccggctcttcggaacccatcgtgctggaaaacggtgcgcggtacctgctgtggaacgcaccgttctatgccgttctgggggtgctgctgtgcacccgctacgcgctgcagagccttggccaaaaggtgctgccgctgttctccagcgtgatcgagctggtgggcaaggtgatctttgtgctggtgttcatcccgaaattccagtacaatgcggtcatcctgtgcgagcccatcatctggttcttcatgacggcatatctggtggcggtgtacctgcacgagccgtttgtgttcccgaaaaagaagaagtaaaaacagggctttgcagcgataaaagcgactgcaaagccctgttgtgttttgatgaaaagtatgctatcataaaactgccgctttggcggcagggc

SEQ ID NO: 1192 - DNA, 8397 bp, Unknown
  gut microbiota DNA sequence
ccggacgcttgagggcggaaaggggggatgcaccatgacgtttgaacaggtcgtattgctgctcacgcttctcggcggagcgatctacgttacgtttgaaattacatggactgtttctcacagcgatagacgcaagaaaaaatgaccgcctccagctaccaacttgaacggtcatttttcttgatctgattcagtaaggagcgagccgtttgcgggccagcgcctttctatttatagtataatcatttcacaagggactgtcaagggcgcatccgtgagcacttgacagcctttttacgttacagcgccgaatagccaaagctgttcaccagcgcatcgatgtgctggccagccttgcacagggggcagtcgcggctgtcaaagctggcgtagtccggcaggctggcggggtcaaagatggaggtgacttcatagcccatgcactcatgggtggtggcaaaaatagcggaaaggcctgccacggtgccgccgtagtagttcacggcctccacagcggcctgcacggtgtagccggtggtgatggaagcggacagaatgagcacatgcttgcccttgaccatgggggccagattgtcgcgcaggatgatctggctgccggtggtgtactccggggtgatcacataaatggtctggtgggcgttcatgttggcaaagccgtccttggtcagctcgttggcaaggcaggtgccgatcacctgcgtgccgtccagacagagcacggtgtccacaatggtgctgtgctggtaagcggccaccagctcctttgccacggccttggcctcggaaaggcgggacttctgggtggtgacatcgatgtaatagttgatatggctgtggctggtagcaaagtggccctttgctacgcgcaggaacaggttactttttttggtgggaagctttaccatattgatcatcgaaacagcactccttttcaggttttccgggttgcccctcaaatgcaaaaagcaccgcatcgctgcgatgctcctgcacatttttataaccctattgtaccggaaaagaaacctgtgcacaaggcataaatccactaaaaaactttgtgcattttacatgatatcgcccaaaacttggatacaaatggcccgcatacgcaaaaagacccgcaccacagggtgcgggcctttaatgcaaaagtaaaatcaggtcagagcgaacccttgatggcatcggtgatgtcccaagtggcatagatatcactgtaggaatcagtgatgctaccgtttgcgtacatcttcggaatgtacagcacctgaaccttggatgcgctggtaaggttctcaataccggaaaccttcagcgtaggagtcacagtagtcttcgcatcgacactggcgttggaaccacctaccaaatcaatcgtgacaccggagacaccctgataataagtatgcagcttattgtcagcatcggtaacatttacctggaaatgctgctggttgacctgcaggctcaccttggtatagatctcaaactcgcaagtgagcgtagtacgattataggtggcgctcttcagcgtggcttcacagatgccgtcgcccggcttcagggtgtcaccggtcttgccgacaggacggttcgggttggagcagccggtcagcatgccggaacctgcaatggcaacagcggtaagagcggtatatttcataaagtcacggcgggagaatgtataggacatgttcgttcctcctttaaaaagcagatcagtacggccttgcggcattacctataagataggcgaaaccgggccggatgtcaatgccttttggcaaaataaaatgatgaaattttgagctgtgacgttgttttgcgacgaaatttcgtcctgtgcgggccgcgtatcaggcgcgggtcacgtctgcagcggtcatgacgaaggtcatggtcttatccgctgcaaaggtgggcatgtaagtaacgctcagctgctgccagcccttggggaccatcagcatcagctgcagatagccggtaccctgcgggggcagattggtggaatccgagaaggtctgagagttggagttgtacagcgagatgttggcaccgcactccacgctctggccgtcgcaggaagcagagaaatcggtagaagctgctgccagtgcgtggaagtttgcatccacattttcctgcgggggtacgggataagcagcattgatctcggccagattctgtgcgccgatgttgaaggtctggttcttggtgcggttgaccacggtgaccagaacagcaatgtattcgtaaccggcctgtgcaggtgcggtatcaatgttgaacaggctggtcagctgaacgccaaggccgttccagttgctgaccttatcaccgaccttgacatccacgatggtggcgctgccattctgctggcagccgcccagcaggcttgctgcgcccagagcagcaacggatgcgccggtgcacttgaggaaggtacggcgggaaatggagttggacataaaataaatcctccttttgataggaaaaaccgtattccagaatgttctattctgtttataccctttctgcccgaaagatgcaagggtttgggggctgaatttacagctttttcacaggaatatcacccttcgtgggtaaggcccttcacatgtgtttcgctggttttgaccagatttaacaggctgggcgtataaagcgggaactcgcgggtcaggctttctgtggtcatggtcaggcaggccgggtcctttacgccctcgccgccgttcacatcctgtccgtccagcagggcttccacgttggcttcggacatgcgcatcacggcatcggagcagccgcgccagcggatgggatcgatgctgaacatactggcggcgttgtgcggctcggccgagtacagcaggcggaacattttggctacggccatcatcaggtaggcgctcacctcggtggtaagggccttgctgtggcactggccgatcttggcgtacagcacgttcaggccgttggagatcagctttttgttcatggtgggcagcacgctgccgtggtagatgttgtccttcatcttgtccgggttcggaaggtcttctgccgagagcatcatgccgttgcgctctgcactgcggcccagaagataatcgcaggaaacattataatagtctgccacgcgcaccacaaagtccaggccgcattcgcggatgcctttttcgtagtgggacagcagcgcctgcgagacgccaagatcctcggcggcctgcttctgggtgatgccgcgttccttgcgcagcagcttgatgatacggttgaattccatgatttttggctcctcaaagttcgatatagggggacatccttgtttttggtttacagcaggttgattatacacaacggaaaaccttttgtaaagcaagaaaagtgacgatatttttcgttgattttcgtcatttttgtcaaaagacttgctctggacaccatatctatgctaaactataggtattaacgcatacattttgtggcgtgcgcggggccgtagctgccgccaaagagcaaaaaatctggcagacgacacgtttttctgccagattttttctccgcagcgggttttgccgcccgttcccgtgccgccgcacagcgataaagagaggcactatccatgaaaacgttcaagcttcatctcatccgccacggcatgactgcaggcaacctgcagggcctgtacatcggtagcggcaccgacatccctctgtgcgacgagggccgcgcgcagctcaatgagctgaaagagcggttcgagtatccgcaggtggataccgtgttctcctccccgctgctgcgcgcggtggaaacagccaacatcctgttcccggatgcaaagcacacctttaccgtgcacgacctgcgggaggccggctttggcaagtttgagaacaagccggtcaaggagctggtgcacgacgaggactttaaaaagtggatcacccccggctccggctatatgcccgaaggcgcagagcctaccgaccagttccacgcccgctgcgccgaaagcctgatgaagctgtttgagtatatgatccgcatggatgtgaccgaagcagcctgtgtgacccatggcggcgtgatcatgagcatgctcagccagcgcgccgtgcccacccgccgcccggagcagtggatggcagaccccggctgcggctacaccgtgcagaccgatgtgcagctgtggatgcgggaccgtctggtggaagccatcgacatcgtgccctttggctatgccgataccctgcgcggtcaggccgaagccgaggagaacgaagcctttgaataaggattcggttacagtttcggcccatcccttgacagaagcggcgcaatcctttattgtataagggaacgatcattttaggaggaagttccatgtcccagtccatttcccgccggtcatttctgaaatgtgccggctccggtgcggtcagccttgcggcagcgctgctcaccggcgtacctgcagcggcacagcagccgcgtcttgcaggcgaacctgccctgctggacggcaaagctgccgtggagctgctgggctatgcccctgcgcaggaaatgggcaatgtgctggtgtacctctcggtggaaaacctctccgcatccaccctgccggtgggcgcaagctatctgcagagccgtgaggtgtgcacgcttggcgacctgtacagtatgggcaccggcgttaccgctgtgtgcgatggcaagccggtgcgctgcggcagctttgctgcgccgctctacggcgagaacgcggcggatgcttcagtgttcaccctgaatctgacggcaggccgcggcgcgctgctgcactgcttctgcgcagtgccggacaactggcagacgctggagctgacctatcacccggatttcgcggcgggccgcagcgtgacctttacggtcaaccgcagcactgaccacgccgtgctgggcgtggtgcccacctctcctgccgaggtcggcagcgtggtggatctgtaactccttcagtctcgcatatgctcgacagctccctcggagagggagtctctggcgaaaaggaaaatttggccgtattgccaaagcctccctccatgagaaagacttcccccggccgggacagattctccccgcgccggggagaaatgtcaccgcaggtgacaaagagaggagcagatgtcacgcaagtgacaaaaaggggagcagtggcatcgcgtcagcgatgacggaaggagttcctgaacgtaataaaagaccatctgagatgcagttaaaaatgcctcagatggtcttttttgttttgtcaattcagcacattctgcccggcggaatccaataccgtcagctcctgcccggtcacgctggagaccagcgcaatgtagctgcgtccggtgcggatggtcagcggtctgccgtcggcatcgtaaaaggcaaaggtggagtctgtgccctgcgtccatgtgatgtgccacagctggctgccgttcagccagacaccgccgccaagggacaggtcgtagtccagcgtggtgccgtcgtcccgcaggctggaagcggagtaaaggaccagcagattgtcgaattgcgcctgcgcgccggtgttggcatccagctgggcggtgccgtcggcgcggagcatcccgtaggtgccgctggccgcatcgtaggcaaagccggtggtgctttggggcgcaaagttgatctgcacctgttcggcatcccgggaaccgggctccggcaggcggggctctttggcctgcggcagcagggcgggcagagcggaaatggcagagctgtcctcggcagtgctggccgaggaggaagcgctgctgccgtggtcgcccaatgcgccggaaaggttcaggctgcccagcacggaagcgacctccccgccgctggtatgccacagcggcgcgccgctccagacatcatcgcaggaaaaggcgttgcggcccacttccagcgcgtccacggcccgcaggttataataatccagatagttgcgggcaaactgccctgcaccccgctggatgggcagtacttcctgcccgctgagcagccgccagtaaagatcctgcccaagggtcactgggccgacggttggcatggccgataccgaaggataagccaagcacaggctggtgggctggccgctctcggtcagggcttccagcaccaccgatgcgctgccaatgccccactgtgtggtgctggaagcggcgttgtcgatcacaacggcggcggtgcgttcgccgggatactgcagctcctgcccggtcagcgggtcggtgggcgctgcactgtccggggcagtggggccggacagcgcacacccacacagcaggactgtgcacagcaccgccgtgccaagggccagattccagatgtgtttcatgcggttccctcgttactgatagctgaagttggaccactcgtcgtcgtccacgatggcaagataggtcttgccgcggttgaaaagcatctgcgcaccggtcttgtcgtagaccagcagcggatgctcaggcgaagccttttcccagcggacatgctgtacagcgctgcggctgaaataataggcatcgccgccggagatgtagcttacctgctgcacatcgccggagtcgccggaatagcgctcgatgggagcaaagcagaccagcaggttgtcaaagctcagctgctttgcgttcagctcgtccacggtgttttcaaatttgccggagatgcggctgtacatctgcattttataggtgcgggactgcggatcatagcggaagctggtcttgtagtggtccgagtgggtgatgctgaccgtcctgccggatgctgcaccctgcatggcattctcctcgccggtgcggtagtccgcaaagcggaagaaggtggtgtcgtaatcgtatttcaggccgatgcccgcgttggaagcggcctgccggatctccttgccggaggtgaactcggtgtgttcataggccacatcccggccccggctgtcgcggtgagccacatgcggatgggtgggagtattaaagtagctcttgccgccgatgttcaggccggaatagttgtatacgctgatgaatttggtgcaggcggcgctctcaccgtcgtggtagtacagcgcctgatagggcatcagcagctgcaggaactggtcgcggccagagcgcagcgggccgatctccgggatggagtcggcatcgtggaacaccgcgcagaagcgggtgatgccgccctccaccttgcactcgatcagcagatcggcagaggaaaggccgcgctgcggacgggcgttctgacgggaggtgttggagatgttgttgaccatcacgcccacgatacggccattgctgcgcttggcctcaccggtcagcgggtcggcatcgtaagcgggcagtgcggcaagactggcagcgggctgctcgcctgctgccagcgaggaagcaaccatgtcctccgaggatgcagcagaagaagctgcgccggaagaactgatgcccagtgtctgctggagccagctggaaaaattgctgcccagaatggcactgccggaagcactgcagctggaaagcgccagcgaagcggcagcggcaccggtcaagcgaagaacagtacggcgagtgatcttcataggaaaaacctcctgcaaaaaacgtatcggcgcggcccggcagaatgccaaagccgggaaaaagtttgcgggtgcagcgcggcggggcgcacactgccgggcagtaaaacgcagcgcactgcagacggatttgatttgattgtaacgattcttgccgggtttgtaaagaggaagttatcgggatgaagccccttccgctgccgacaccggagcatcttcgatctgctgcgcggatgaaaagcggaggcccacaccgatgcaggagctttttgcgcctttttgcccgggaacccttgcatttttgcgcaagttgtggtaatattattcggcagtatgttcactgcggaaatatgcgctcgtagctcagccggtagagcatctgacttttaatcagagggccagggattcgagttccctcgagcgcaccaaaaggacgataaatcgttgaatcaaacggtttatcgtcttttttgttttatgtgggcttttggagcttgtacctatgattttttcaaaaattttagaggtcagaggtacaaaaatgaagaagattcagaagaatgcagtccggtttgataatctaaagcaagattttttggacgataagaagtattctggcacagcagaagccacgttgaacggctatcggtatgatattacacggtttttgaagttcctgtcagatgagcagttagccgtgaatgaagcaggattcaaacggtatgttatccacttgacggatagcg

SEQ ID NO: 1193 - DNA, 1584 bp, Unknown
  gut microbiota DNA sequence
cctgcttaatagctgcacggatgttgctgtcgatgaggttgtagaacgtcccgttcaggtatgtgtggatgctggaatccttgtaggagttattgttgccgaacgtggacgttgtgtagatgtccttcatcaacagccacgttccggcgcaactcgaatcataggtgctggtgttcgggttgccctgctgcacaacaataaaatctttggacgcgccgttgactttgattttgacaatgctgccaacggctttcgtgcccagttttacgtttgccattgttacctccttgttttcgttcaggcccacggcatgatctccgcaggccgcgtgttctgcgatacagagagggacagggctttgtgctgcttcttgtagatgcagcggcattgccgcgccctccgtctgtctcgcgcgagtttgttcgagttgatttttcgatggatagggattttgcagtcaagcaatttttcgagccggtcagcgtacttgcggcgtaaagagtaggtttcaccatgggcggcatgggcatcccacgcatcaaagctccgcaggatttcctgcttggttacttcgcctgcggggtatgctgtttcccaatacttgatcttgttcttcatccgcttggagctatcccggcgcagcttttggatgaccgcgccggtgtcggtcaggtagctatggaatcccagaaaatctataccgttccgcagcgggaagatggcggttttctggttcagctcaaggccgtaactgtccataagcgcccgcacatcccggagaatgcactgcaatttcttcttgtccgaacagatgatatagaaatcatccatgtatcggccatagtatttgatgcggtacttctctttgatgatgtggtcgaactcatccaaaaacatcagcgcaaagagctggctcgtctggtagcccagcggcaagccgtcctccatcacgtcgatgtagatgcaaagcagctcatagacacgcgggtcaacgccgcgcttgtccagcacggctttgagcttgcgttttagcttccggtggtcgatgctggcaaagaaatgccgcacatcgcctttcagcacccagccgtccgcgccgtggccctcacggcggtaatagtccaccatgtgggttttcaggcgcatcaggccgtcgtctgtgcctttgccggtctggcttgcgtggctgtcccggataaagctctttgtcagagcatcatacaggatgttatcgaccagcgcgtgcagcaccaccttgtccacaaatgcgggagcgtgtaccatgcggcgcttcggctcgtagacggcaaagacctcaaacttgctcggcacatagcatatctgctgccggatatcgccgcccggctggcgtacatcgcgcacggccagcttgcgggacagcttttccgtgcaggccagcgcctgcgcttcgtactcgattgttttgcttttactgcgctttcccttccgggcttcaaggtaggctttgtaaagtacctcaaagctgcacagttcttcgtatgtcaaaatgaccctccgctggttcgcgttacggtagtgggctgcatccggcagggatggccc

SEQ ID NO: 1194 - DNA, 1070 bp, Unknown
  gut microbiota DNA sequence
tgaaaagcacaataaaaaagaggggaggtcccaatcatgaccgaacaagcactccgcaaaatgattgctgcaggggaaagcacccggcaggagtttaagtcgtgggtgaagtgcaaggactaccggcagcggaaagagcttgcggtgaaaagtgcggttgcgctggcaaagagcggtcaccagacgggaaagaaaatggaaggcgttgcatcggcagctttgaatagcccgaaatacagcagcacgaccaaaactcttgcaggcagcgttctctcgcagtctgacaagaatcgctaaataacctaaaatggggcgtacagtttacaactgtgcgctccattttttacaacagaaatcaaatataaagtgatattacgtcgaattatttgagaaattgtcggaaaatccatgtagataacattggaaaattgtggtataataataccaaccagaaaggagggttgtgctatggacaacaaccaactacagtacatcaaaattcaatcgcaatacgctgataaggtagagcaatttgaaaagtgcgttgtcaaagccgcaaagctgacacacgcgattgctgacacggctgagaaaaaatgcaagcaggcgcggatggcaatagaatctggcaacatagatgtcatgcggaatacgattcagcagtacatctgccagtacggacgggattggtcgcgtttccgggatgttcggatacagcttgtagatgggaacacctatgcacagctctctgccgttgaccttatccagcagctacattgtgttatcacgctggtgtacaaggatactgcgttgaaaacggtgaacaaagaagcattccgagagtgcgttaaaagtttgctgaagcagtccaaaatgtttaccgataaagagctagatgctatgtttgcgtaaaacaggatagctgaaaataagcaaagcccacaagctggatataaaatccggtctgtgggctttaccatatcaggagtaatatttctgtgtgtggttgccgggacgaagtgcttctggaactcaacggcaagacctatatgctgtccctcaaggtctac

SEQ ID NO: 1195 - DNA, 547 bp, Unknown
  gut microbiota DNA sequence
gtcaaaagatgacggttcaaacagcgaaagcctgagcatccgcactcaaaaggcgatgcttatggagtatgccacacgcaacggtttcgggaattgccagtactatgtcgatgatggttacagcggcacgaactctgaccgccctgcctttcaggaacttctggatgaaatccgggatggaaaggtagcgaccgtcattaccaaagaccagtcccgacttggacgcaaccacatcgaaaccggaacgtatatggagatattctttcctgaacacggtgtccgctatattgcaatcaacgatggttatgattccaacgagcaatcccagatggatattgccccgttccgaaacatcatcaatgaaatgtacgccaaagacacttcccgaaaaatcaagagtgcccttcggacacgcaagaaaagcggaaagtatatctcaagcggcgcaccgtttggctaccagaaagaccctgccgaccacaatcaccttgtgatcgacccgaacaccgcccccgttgttgagtatatctattcaatggcagaggaa

SEQ ID NO: 1196 - DNA, 1652 bp, Unknown
  gut microbiota DNA sequence
aacaaactccacttatctactggtacttccggtaatggtttcgctccgtccatcggaatagctaaaggtcgcagaatactcaagcctataagattttccgggcttagtattaaagctactgctcaccatgcaggttgaggtcgtgctgctgtttgagcagctacttactttttgccatgttccaattgtccccttttcatagagaacgcctgaaacgctgattttctttactccagttcgagtctgggcatcaacctgatagtatgtttggtaaatagatccgttgaccgtactatcgcctacataccgttcagacttttcagcggccattgcggtgcaggcaaagctcaagagaatcaccgctgaaacaacaatggacaacaaacgctttttcgacatagacatacacctccgtttttttgctcccatcaagagcctttgtataatcaacgcaattcgcattcgcttcgtttcaattttcaggagaaaatttttcaaattttccatctttgtaagttcagacaaaaagaaagccagacatttgtgaactctcacaagtgtccagctttcttaacggataccttccgcaattttcataatctcatcgtatggaatgtttcccataacggtatgtgtaatcccccgatgttcccaacttagagtataaacattctttccatgttcatccgtactggttccaagtacaccatctgcttctccgacctttacggtttcgtacactgtatgctcattatcaaacagggactgctgccctggctggataattgagcaacggactgtgtagctttcctctgtttcttttgacgagtaaacatgtaaaaagttttctgctcgctcaaatttctgcacatcgtccatttcaaagccgttcggcacataatggtcgctgtatccatccgggagccactccagcggttcgccatccacctgataagtcagctgcatctcaatgggcagaaatttttgaatcatcgtatagactgccctgcggaaatcagcgctgaccgcaagagcaccaaccgtcagcattacgagtgtcaatgccgcaattagtactcgtttcaacactgggtggtgctttttcttctttaaggcctctgtcattcgttcgtcccattgggacgtatctgggtagatttcctcaaactgctttggcgttggaagcgaatccagttctctttgcgcatctgcacgaagtgccatcatcaaagccgcatcaaatgaaatgtctgtccgctcactcatggctgttcatctccttccataatagttttcgtcctcgaaagagccgtgttcgtaccacttcatccgttaatcccagcgattttgcaatctcacggtttgtatatcccattgccaaaaggcgtagcggatcacggtacatcggtttcatttggccaatcagttctgttagacgttcaatgttatcggtgctaactgctgcatcatccggcaccggagcggcatctggttcgtttgggacatcttccagcaattcttctcgttgtttgcgaagcatatcatatgcacggcttctactacaactaacgagataagcagcgagttcgtgacagttttctcgatgaattttagaaaaattttttgcaacgtacaaaaatacctcttgtagc

SEQ ID NO: 1197 - DNA, 2663 bp, Unknown
  gut microbiota DNA sequence
taaagaatcgggttcgagtacgaactgtatggtggacggtacaggactcgaacctgtgacctcctgcacgtcaagcagatgctctaccagctgagctaaccgtccatattctgttttgccgaaatcagcttgattatattaccataccttctgccaaaaagcaagtgctttttcaaaaattgtaaaacttttttaaaggcaggggcgctgactgccctttttacgcgccagcgcacatttggcggcggcaggcgaaaggttttctgttgctcacactgttttgttgtgatataataataaagttataataggaatagtatcggaaggtatttgcagcatgagagttttgggcatcgaccccggctacgccatcgtgggctggggcgtggtggattacgcaggcaaccggtttgcgccggtggacttcggtgcggtgtgcaccgacgcgggcgtgccgttcgagcgccgtctggacgaggtgtatgcaggcatcaaagaggtgatcgagcgcacccggcccgaggtgcttgccatcgaaaagctgttctaccagcacaatcagaccacggtcatcggcgtggcagaagcccgcggcgtgatcctgctggcggcagcgcaggcaggcctgcccatctacgagtacacccccatgcaggtaaagcaggctgttaccggttacggcaaggccgtgaaaaagcaggtgcaggagatgacccgcgtgctgctgcatctgcccgccgtgccaaagccggacgataccgccgatgcgctggcaatggcgatcaccttctgccacaccaacggcaaccagctcaaccgctttgtccgccgtgtggccgggccgatctgaccctctcaccggttccgtccgcctgcagcggcgcggcaccggagctctcccgaagggcgagttgaacagaggaaaattggccgacacagaaactgagagggctttaaatgatctactgtctgacaggaaaaatcgtcaaaaaaagcatgaatgccgtggtgctcagctgcggcggtgtaggctactatgcccagtgcccggccagcgtggccggggccttgcccggcgtgggcaaggaagccaccatttataccgtgatgagcgtcaccgagaacgacatgagcctttacggctttgccaccgagcagcagcaggcctgctttgagatgctgatcgccgtgtccggcgtggggcctaaggtgggccttgccatcctgagtgtgatggagccggaccgcgtggcactggcgatctcggcgggggaccacaaggcgttcaaggcggcttccggcgtggggccgaagcttgcacagcgcatcgtgctggagctgaaggataaggtcgccaagggctttgtggacggcatctcgctggaggatgtggcgggtgcttccgccgacacacaggcttctcagggcagcagtcaggccattgcggcgctggtgtcgctggggtacagccagagcgaggcagcgcttgccgtttccaagatcgacgcggcattgcccgtggaagagatcatcaaactggccttgcgcagcatggcaggcaggaggtaaagaatgcaggacgaaactgcgctgtacggcgcaaaaatgatgcagcccggcatgacggcggcggacagcgaggaaaacaacctccgcccgcagcatctggaagactatatcgggcaggaaaaggtcaagcagaacctgaaaatttacttggaagctgccaagcggcgcggcgaaccgatggaccacatcctgctctacggcccgccgggccttggcaagaccacactggcaggcatcattgccaacgaaatgggcgtacagatccgtattaccagcggcccggccattgaaaagcccggcgaccttgctgccctgctcaccaatctgcaggagggcgatgtactgttcatcgacgagatccaccgcctgtcccgtcaggtggaagaggtgctgtatccggcactggaagactatgcgctggatatcatgatcggcaaaggccccagcgcccagagcatccgcatcaacctgccgcggttcacgctggtgggtgccaccacccgtgcaggccagatcaccggccctctgcgcgaccgctttggcgtgctgctcaagctggagctgtacagcccggatgaactgagcaagatcatccagcgttcggcaggcatcctcgaccagcccatcacgccggaaggcgcttacgagctggccaagcgcagccgcggcacgccccgcgtggcaaaccgctttttgaagcgcatccgcgactttgccaccgtgctgggcgacggcatcattgaccgggatgtggccctgatgggcctcaagcggatggacgtggacgcactgggtctggacgaactggaccgcagtatgctgcgtgcgatcattgaaatgtacaacggcggcccggtgggtctggaaacgctggcggcggccctcggcgaggaatccgtcacgctggaagacctgtgtgagccgtatctgatgcagatgggctttctgacccggacgccccggggccgctgcgcaacgcggctggcctacgaacatctgggcctgaaagcgccggaggccgctgcgcccgaggacaacggacagcagagtttgttctaagataaacgggcttgccctctcagtctcacttcgtt

SEQ ID NO: 1198 - DNA, 1934 bp, Unknown
  gut microbiota DNA sequence
ggtcgaggatcttatcgaaccgggcaaagaaggtgatggtggtgatggtggcggccagaatgtcgctgaccggctcggccagaaacacgccgaacactgcatccggcaaaacatgcggcagaatgaagatgagggggatcaacagaatgatcttgcgcaggcaggccagcagcaggctgaccttagcctgccccagcgccataaagctttgctggcaggcgatctggaagcccatggcaaaaatgcccgccatgtaaatgcgcatggcccacgtggtgtactggatcagtgcggtgtccgaggtgaaaatgcctgccaccgcgccgggaaacagcatcatcaacagccagaacaagcaggtgtaggccccgcacagcgtcagctgaaaacggaaggcttccttgacgcgggccttcttgcctgcgccgaagttgaagctcatcaccggctgtccgccctgacagatgccctgaatgggcagcgtgcacagctgggatgcgctggtgatgacggtcatggcacccacagccacatcgccgccgtaccgcgccagactggagctgaagctgatggaaagcaggctttcggtggagagcatcacaaacgaagagatgcccagcgccagcaccggcagaatgatctgcttttccgggcgcaggtagtctctgcgcaggcgcaggatggtctttttgccggtgagaaagcggatgatccatgccgcacccacggcctgactgagcaccgtggcaatggccgcaccccgcacgcccagcccgaacccgaagatcaggatggggtcgaggataatgttgatcaccgcgccgatcacggtggtaagcatactggtcttggcaaagccctgcgtggtgataaaagggttcatgcccagcaccaccagcacgaacaccgagcctgcaatgtagatgcggctgtagctcagggcgtacggcagggtggcatcgctggcaccgaacagccgcagcagcaccggtgccccggcatagaagccaatggtcagcaccaccgaaaagagcagcagcatggtaaagctgttggagatgatcttttcggcctgtttcttgtccccctgccccagagcaatggcggtgcgcggcgcgccgcccgcgcccaccagcatggcaaaagcgttcagcagcatcagaataggtgtgaacagccccacgccggtcagcgctgccgcgccaatgcctgcaatgtggccgatgtaaatgcggtccacgatgttatacagcaggttcacgacctgcgctaccacggcggggatcatgagctgcagcatcagctttttgatgctgccggtgcccatatcttgttttgcctgtgccattggaatgctctcctctgtacttcaaatttgaaaaatatcgttcctattatactcggctcccgcccaaaagaacagccttttttgcaaagaaaccgcgctttctgccccaaaaacgcaaaacggcacggctgcgtatggcttgcagccgtgccgtaacgggagaaaagtgttgacggaaaaccgcttttttgctatactgtaaaggctaatatatggagatgtatcgaagcggtcgtaacgagaacgactcgaaatccaagtggatgcttcgccggatgtctccatatcacacgaggaaacgtcaattttgatgtcctgacaggcttcaaagcctgtctgaacgatgcgttttctaacaatattctaacagcaactgttccaagtttcaaggctgatttgcgatgtacaaatcgtaaatttgccatgaaaatatactcggagatgtatcgaagcggtcgtaacgagaacgactcgaaatcgttttgtccttaatcgggcacgtgggttcgaatcccaccatctccgccagaagtcgcagattcaaacgaatctgcgactttttcttttgcatcatgcagagaaagac

SEQ ID NO: 1199 - DNA, 1929 bp, Unknown
  gut microbiota DNA sequence
catgatgatgtcgttgatatcgccgccgccggggatcatgggcagcaccttttcgtccttatcgatgatgcactcgatccaagtagggcctttctgcttcattgcatcggcaaaggcagcctgaaactccggcaggtttctgcagcggtagcccttcaggccaaagccctcggccagcttgacgaagtccgtcttgcggtgggggtcggtctggctgtagcgcttttcgtagaagatgttctgccactggcgcaccatgcccagcaccgagttgttgaagatcacggtgatgatgggcagctcatagctcacggcggtgcaggcctcgttcaggttcatgtggaaggagccgtcgccggtaaacatgaccacccgctggtcgcggcccagagccatctgtgcgccaatggcggcaccgtagccaaagcccatggtacccagaccgccgctggtgataaagccacggctcttggcgtggcgcaggtactgtgcagcccacatctggtgctgacccacgtcggtcacgtacacagcctcggggccgcactggttgcacacctcgccgatgacctgatggggcatcaggcgggtggagtcagacaccgggtggtaatcctgtgcctgccactcgcggatcatttttatccattcaggatgcttcttttcctcgacctgaggcagcattgcgttgagcacgtaagccgcatcgcccacgatggaaagatcgacctccacattcttgcccatctcactggggtcgatgtcgatctggatgatggtggcattttttgcaaaggtcttggggttcagcgccacacgatccgagaagcgggtgcccaccgcgatgagcacatcgcagtcggccacagcgcggttggaggtgtagcagccgtgcatgcccaccatcccgatgttcatcgggtcgccgtagggcacaacgcctgcggccatcagggtgtaggtcgcagggatctcggcctttctcagcaggtcgcgcaggggctggcaggaggctgcgctgcgtacgccgccgccgaagtagaccagcgggcgctgggctgcattgatgatctctgccgcccacttcacctgctcttcattaaaggtggtaacggtgcggatcggctccggctttttgggggtgaactcgcataccgccgccgtcacgtccttggggatatccaccagcaccgggcccttgcggccgctctgtgcaatacggaaggcagagcgcatggtgtcggccagatcttccacccggcgcaccgtgaagttgtgcttggtaatgggcatcgtgatgccctcaatgtaggcttcctgaaagctgtccctcccgatcccggccgtggtcacgttgccggtgaaggctaccatgggcaccgagtccatataggctgtggcaatgccggtgaccagattggtggcacccgggccgctggtagccagcaccacgccggtgcggccggtcgcgcgggcatagccgtctgccgcatgcgccgcaccctgttcatgtgccgtcagcacatgggtgatgcggtccgaatttttgtacagttcatcgtaaaggttcagcactgcgccgccgggataaccaaaaagggtgtccacgccctgctcgcagaggacctccacaaaaatctgagaaccattcaactgcatggtgagtttctcctgttttcctaacctttttccactttttacacgttcccggggagcttccttttaaaagaaaaggcctttgtcccctgttatcaagagacaaagaccttgtgatcatcaagctctctgcggtaccactctcgttggcgtgccacgcacgcccactcacggacttccagcaaagtcccgcactgtaacggctgcaaccggcgctgcttacagggacacattccacatccgttcaacaggctgctccgggacgacttcccc

SEQ ID NO: 1200 - DNA, 22839 bp, Unknown
  gut microbiota DNA sequence
tgtaaattatactataaatcggccttttgtcaatcgacaatttgtaacctgaatcaccccaaacatgaagttaattgaacacctcttgcgccatagcacaatgcgctgtatacttctgatatgcgcgcctgcgcgtttaatttaagaccaactagaggacaggaatatgaaattgagagaatggaatgcccggctgcacgggcttgttgttttccgcagcctgctggacgaccccgttgtggcaaagcttttggacctgaccgaccgcatggaagccggtgcgcccggctatggcccggtgtgcgacgctgtggcccaatttgaagccgcactgttcgagcacaccaccaactggggcagctacctcagcgccgctgtgctggaagccgagaccgtctgcgtgcgtcaggctgcatcgggcacccttgcccctgcactgcagaccgcgctggacagtgaactggcttttctgcaggctctgtgcggcctgacgctggacgagctgctggccgctgccggttctgccacagggcaggcgcaggagctggctttcctgccccggtgggagacctccagcatcgacctgcctgccgcctacgcccagcgcatgagcgaggtgggaaaaaagggctatggcatgtttgccaagcaccatgtgttcacggtggagaatggccagctggtgccggtgaaatacccggaccctcagcgcctttccgagctgcccggctacgagaaggagcgcgaaaaggtcattgccaacacaaaggccctgctggccggaatgcccgccaacaatgtgctgctgtacggcgatgcaggcaccggcaagtccagtgcggtgaaagccattgccaatgagtttgcacctgaaggcctgcggctggtggaagtgaagaagaaccagctctaccagatcccggatctgatggacaaactggccgcgaacccgctcaaattcatcctgttcatcgacgacctgagctttaccgccaacgacgacaactttgccgccctgaaggccattctggagggcagcgtgggcggccgggccaagaacattgcggtatacgccacctccaaccgccgccaccttattaaagaaacactgaccgaccgcaccggcgacgacatccacgaagccgatacccgacaggagctgatgagcctttcggcccggttcggcctgacggtcactttccagcggccggagaaggcccggtttgagaacattctggccgaactggcaaagcagcacggcatcgacatgccgatggatcagctgctggtcaaagccgaagcctttgccatccgcgccggcggccgcagtccccgcgtggcaaagcagtttattgagcagtgcgaggcgggcgtgcagaagtaattagtttgtctttattttaacatcaaagtctctgacaaatctttcacaaaatgccgagaagtcgtgaattttttcaccttctcggcattctttgtctattttttatttatcggtaaaaagccttgcattctattgaaattcaggctataatatggccaacatcagccaattgagcacttctggagggcaactatgggctttttaacgggtaagaccgctatcatcaccggcgcaggccgcgccgtactttccgatggcagctgcggctccatcggctatggcattgccaccgcctttgcaaaagagggcgcaaatctggtcatcactggccgtaatgtgaaaaaactagaagaggcaaaaaacgagctggaagccaagtatggcatccgcgttctgccggtgcaggcagatgtgtgtgcaggcaccgacaacgaagccaccgtgcaaaatgtcgtcaatcaggctgtggatacctttggcggcattcaagtgctggtgaacaacgcacaggcatccgcttccggcgtgccgctggcagagcacaccaccgagcagtttgatctggccctttattccggcctgtacgctgcattttactatatgaaggcctgctatccctatctggccaagtccaagggcagcgtgatcaactttgcatccggtgcaggcttgtttggcaactttggccagtgcgcctacgctgccgccaaggagggcatccgcggcctgtcccgcgtggccgctactgagtggggcaaggatggcatcaatgtcaacgtgatctgcccgctggcctggaccgccaagctggagcagttccagcaggcatacccggatgcgttcaaagccaacgtcaagatgccgcccatgggccactacgccaaccccgagaccgagatcggccgggtatgcgtgcagctggccatgccggacttcaagtatctgtccggcgagactctcacgctggagggcggcatgggtctgcgcccgtaattgctcttctcattcttcctcatacatgcaaaaggggctgtgccagcggcacagccccttttgtgtttaggcctgattattcgcgcacggcgatgcactcgatctccagctttgcgcccttggggatggcggccacctgcacgcagctgcgggcagggaacggctcagcaaaggccttggcatacacggcattcacagcggcaaaatcgttgatatcggccagaaaaatgacagtcttgaccacatttgccatggaaaggccagcctcggccagaatggccttgaggtttgcaaggctctgtgcagcctgctcttcaaccgtatcggccatcttgccggtagcagggtctaccgggatctggccggaaacaaacaccatattgcccagatcgatcgcctggctgtaagggccgatggctgcgggtgcgttggaagtggaaacgactttcatgataaaacgttcctttcttttttcttctattatactctttcgctcacaagctggaaaccctcttttgcaagctctgcgcggatctgctcgatctgctcggcatcgcgggtctcaagagtgagcttgaggaagcagctggaaatgggcatgttgggatcggagccatcgtgctgcaccgacaccacattgctgccgcagcgggacacgatctcggccaccttcttgagctggccgggcctgtcctccagcgcaatggtcatgttcgccttgcggccgctcatcaccagaccgcgggtgatcacgcggttgaggatgttcacatcgatgttgccgccggagacgacgcaggccacctttttgccctcgaccggcagcttgtggaacagcactgcagccaccggcacggctccggccccctcggcaaccagcttctggttctccatcagcgagaggatggcggcagcggtctcatcctcactcacggtcacgatgtcgtccacatactgctcacagatctggtaggtcagctcaccgggagtcttgacctgaatgccgtccgcaaaggtagaaacggctttcagggtctggtacttatgctcgtgcaggctgcggtacatgctgggtgcaccctcggcctgtacgccgtacacctttacctccgggcgcaggctcttgatggcaaaggccacgccggagatcaggccgccgccgcccaccggcacaacgaccgcatccacatccggcagctgatccagaatttccagaccaatggttccctgccccgcgatgacctgctcatcgtcataggggtggataaaggtcatgccggtctcttcctgcagctccacagccttgtcgtgggcatcatcgtaggtgccaggcaccagacacacctctgcgcccagattcttggtattctccaccttcatgatgggggcaccgtccggcatacagacgatgctcttgatgccgcggcgggtagcagccagcgccacgccctgtgcgtggttgccggcagagcaggcgatcacgcccttggcgctctcctcctcggaaagctggctgatcttatagtaagcaccgcgcaccttaaagctgccggtggcctgcaggttttcggttttcaggtacagctggcagtccttggagagcttgggtgcctcgatgaggtcggtcttgcgggcaacatccttgagcacaaaggctgcatggtagatcttatccagagtcagcatggttttctccctctatttttatcgttccctgctctgcggcttttccgccctcagagcctttatttctggcttattatgcatgtttctcagtataggttaacaaagttgatttgtcaaatgaatttccttcacgcctgaaacccaaaaagagaactgccgcaggcataccgcccacagcagttctccgtgtttttgtgtttttaacggccgcggccaccgccgccgccgtggctgccgccgccgcccattccaccgaaggagccgccgccgaagctgccgccgccgaacgagccgcccccaaaggagccgcctccgcgggagccaccgaaggacccgccgccaaagccgccgcccatgggaggacggggcggacgccggttgttgttccggggcgggcggggccggtcattgcgggggccggggccatagcccgggccgtatccggggccgaagccggggcccggagggggcggcgggccgggacggtgccgacgggccgaacctgccatgtagccccatgcaaagggaccccagttccagcctgctgcgtggccgatgggtgcaatgaacacccggaacacgaacagcacgatgatcagcatcaccatcagggacatgaacaggatcacgatacccagaacgatatccccaaaggtggtggggccgtcgtccggctgggcatagctgccgtcgtcgtagctgccattgttcagatttaccccataaacacttgcaatggtgtcggccacattgttggcacaggtgattactgcatcgctgtaatcgcggttaacaaaatcaccttccatggtctgagcgagggcactggcctgactttccagcgtggtgttgcggaagccgtcgccgtaggtcacgtagtaatcgccgtcctcgtagatgggcgattccatcaccagcaggatcagcacgccgttattattcgtagcatcgccgatgccccaggcgttgaaggcctgtgttgcataatcctcagtggaataattgcctgtataatctacagtcagtacgccgatctgtgctccgttgcagctggactgcagctggttgttcagatcaacgatggtctgggtagtgctgtcgctcaggatgttggcgtcatccaccacacactgatctctgggcaggtccggcaggctggcggcggcaagggccgccgggcacagggccgctgcgcccaccacaagggccaacaccagagcgcttacgcgttttgcaaaatttttcatgcgaagggttcaacctcctttacaccggcaatggctcccagcacgctggccgggaagccgccggtctctttctggtagtcgtaaacggcatcgttgtatttcagggtgccgataatggtagccgcactgttgaactggccgtactggccctgcaccgcgcccatcttcatggggtctgcggcctgctcctgcagctttgcgtagagctggtcgatccgcgaccccagcacctcgttggcctgatacagcgcatgcatcgtgctgccctgataatagggcagcgaggtgagtgcctgacttttgccgccgttctgcacggcttccagacaggcggtaaaatcgctcagcgcgctctgtgcggcctgtacctcggcactgtccgctcccagcgtgctgccggcggtggtgatgatgtttgccgccgtgttcatgcgggtggtcagctcctcgttgaggttatagccgttgtctgccgccacacccaccgtgtaccatttgcggacttcgttgtaccggctgcgcagcttggcgctgccaaagcccaaaaaggccgccagcatcaccaccacgctcagcgccagtgcagctgcgcgggtggaaagggctgcgggcagctttgcttccagccctgccagcttctgctgcagaggtgtcagcggcacggcctgctccggctgcttttgttcgcggtagctgcccgcgtcaaaaccgccggaagtgctgttctgtttttgcgaaaaatctgcgtttgccatttcagctccggatctccatcatttttgctttcagttcgtcctcgatgcggttcagctcctgctcggcggcagcgcgctttgcgcggccctcgctctggatcttgttcagctcgtccagcgtctcgatcaggctcttgttggtctgctgcagggtctcgatgtccaccacaccgcgctgagattcctttgcggtctcgatggtacccatcttcagggcctctgcgttcttcttgagcaggtcgttggtcatgtcggtcacggcacgctcggcctgcatggcctgctggctgtgggccagacccagtgccagcaccatctggttcttccacagggggatggtgttgacgatggtggactggatcttctctgccatcatggtgtcgttgttctgcagcaggcggatctgcggccccatctgcaggctgatgttgcgggtcagctccagatcatagagcttcttctcaaagcgttcgcactggtcggccagatcacgagccgcctgtgcatcctccggcaggccggaaaccttggccttatccatggcctgctgcagctcgtttgcgcgcacatcggccagcttctttttgccggcaaggatatacatgctcagctccttgaagtaggccatgttcagatcatacatcttatccagcatggcgatgtccttgagtagctgcacctgatggccctccagcatggactggatcttttccacgttggtctcggccttgttgtacttcatcttcatggcatccagctggtcgcccttcttcttgaagaagccgaggatgccctttttttcttcctcgcctgcatcaaagctcttcagctcaccgatcaggctggtgatcatatcgcccacttcgcccagatccttggtggacaccttggagagcgcagcctcggagaaatcgccgatcttcttctgacaggcggagccgtactgcagcacctgctggctgttggtaatatcgatcttttcagcaaactgatccaccatggcctgttcttccggggtcaggttcacctgcggctgctccggtgcggcagcttcctgctgggcgggtgctgccttttcctcttctgccggggtggggtccagcgtcagggtgggtactgcgggtgcatcgaggtcaaagttgaatgtattatcagccataagagatttcttcctttccaaataccatttaccttttttagctcaggccctgccctttgagcatgttctgcagcaccgtgatatctgcagaaaggtccatgctctcggcggcgtacagggcatccagctggttttcaaacgccgtggcaatggaagcagcattgtgctccacctcggtacggatggctgcggcattctcgccgcgcacgccctgctttgccagctttgcatactgctgcagaacgttcaccgcatccggcaggtaatagtttgcgaacctgcgcacctgctttgccttttccgggtttgcttccaccgcttccacaatggagcggcctgccttttccatgcgggtcatggcggcagagagctgcgggtccggcagctgctcgttgagggtgtgcagggtatccagtttctgctgaatgtcggtcagcatcgcgtccacatcctccacaccggtgtggaaaggcacttcgtgctccaccccccggggcgggcagaccttctgtgccgcaccaaaggccacaaatgcaccgcccagcgccgccagcagcgcccacagcttatacaccggcagtaccgcgcacaataccaaaaagaccagtgccattgcataaaatggcagaacgctgggctttctggtgcggatgatcttgctcatgtttcttctccttgtccggggcattgccccttatgtcatccataataccgcgccccgcgaaaaacgcaaggctttcacggataatttacaacctggccatcatttgttgatccacggcaagagagccgcgccccagatttcgcgcagcttttccgggcggcaggcagcgtttgccgggctggtgctgggcagctttaccgctgcaatgccggacaccggctgcagatactttgtatagatccggtatgcggtggctccgttgcagaatactgcttcgatgggtgcctttgccagcagagcggcaatatcattcggcactgcatccttgatggaagcatccgctgcgccggtgatggtgcagcgttccagcgtgtcccagagggccagcccatggcgcaggatgatttgctttttggcttcaatgtcctcacgggcaggcaccggctcaccggtcagcgcggccatcatgggccagaagcggttctgcgggtggccgtagtaaaaggccatctcccggcttttggggctgggccatgtgccaaggatcagcgcccggctgtgttcgttatacaccggttcaaagctcattgtccgcctgcactttcaattttatcccaaggcgagccaaggtcgcggccggacggctctgctctggggccgtcgaaccacagctcatcgatcaggtcggcaaggccgtcctcccgcacatcgccaatgatgcggtcagcggcagcctttgcgtccggcgtgccgtttgccatgcagcagccaaggcccgctgccttcagcatagccacatcgttggcagaatcgcctgccgccacggcatcggccagtgtcagacccattttttcgcacaggtcggcaaggcccacgcccttgtccattccaccgcgcacgatgtcgtaatagcacaggccgtcggcattctgcgcacccacctgcatccagtgcaggcccagatggccgtacttggcgttgaagtccgccacacgctccggcggcatggccgcaaaagccgcgtggggcatatcgatcaggtggcggtcctgatcttcgccgtccatacagtccagcccgatgctgttcatctgctgatagcccctgtgcagatattcatactcgcagtaggcgtagcaggcatccctgaaattgaactgcagcggatagttataatcctcgcagaaatccaccagcgcgtacatttcctcagcggtgagcgggtgctcggccacgatgcggccctcgcggtccaccacgcaggcaccgttgcaggtgatggcataatcgaaccggatgccgcccagctggcctttgaggttgacgcacggatacgcacgtccggtgctgagcacaaatctgccgcctgcggcctgcagctttttgatggcttttaccaccttctgacgcggcttgccctcgccaaagggcaccagtgtgttgtcgtaatcgcttgccagaatcttatattgcattctattctcccctatggaactgagttttgtaccagtataccatacttttttaaaattggggtgcatttgggcataaaaataaggctactgcacagaattccatgcaatagccttattttgtttcacgatgctgttttctttgcagctccttctcgtgatcacgcaaacacggccacgaccacctgcattgccacgccgaggaatgcgcctgcaccccatgtcaggccggtgatgaacaggttctgcttccacgaaggattggtgcgccacagcaccgcaaggcccacgcctgcaccggtgcaaaggcccgccaccagactggaaaagcgcagggcaccctccacatacagctgggtcagcagcacgctggcggcgcagttggggatcaggcccaccagcgcagccactaccggctggaagaagcccatgctgcccagaaggtctgcaaacacatcttcgcccacgccttccacgatcaggccgaacaccagactgaacgcaaaaatgaacacaaagatctccagcgtgtggcgcagggccgctttccagatgggggcgggcttaccctcttcgtcgctgtgctcctcgtgacagtccacctcgtcggcatggccggtgtagccgccgcgcagcgatttgggcagcacgccgcgcagcacaaaatccagcacaaagcccaccacaatggcgtataccaccttgatgaccatgagcacagccagcttatcccagtaggccggcatggataccagcagcgggatggcttcgtcgctggtggcaaggtagacggccatcagggtgcccagcgtgatgacgcgggaggagtagaagttggatgcaatggccgagaagccgcactgcggcacacagcccagcaccgcgcccggaatcgcgccccagcgcccgccgcctgccagcagtgcttcaatgcgctcaccgtggcgggtctcgatatactcgatcagaagataagccaaaaacaggaagggcagcatcttggcggtatccaccagagattcgcccagaacatccagaaacagttccatatacactcctaaaaacgaccgttcgtcgcttcattttagtaaattgcaaattggttgcatttttgaacagggatgattatacacgatattctctccaattgcaataccaaaatgcaaattagttgcaaatttatgttatggaacgctgcatcgcaaaaaatacgatttcaaatggtctccgctgatgctctgaccattttcagcggaattattattttatttcgcaattctggaaaatctgcggattttccagaattgccttttcacgggaggagtcataaccgaaagcggaagctgccgcgctggtttcctgtggaaacattcgcgcggcggagttaacgttctgcccgtaagcacaagcctttcctccacgacccccccatgaaaatggggtccagaaacacccgcaggcgtttctggaccccaaaatcaaaaatataatttccttagcttatgcgcaaagcaacgcggagcgcattcaaaatcgtcccacacagcaggagtctgccttttgttttaccccttcattggcacaaagcccacaaggtcttttaccacctcgccgccgatgatcaggccggccaccgagggtacaaaggcattggagcccggcaccgaacggcgctgggtgcacttgcgctgggtgcccggagggcagatgcagtgatacttgcagctgatgtcgtcatcctcgatgggggtcatggcaggctccttggagtagaccaccttcaggtgcttgatcctgcgcttgcggcactcggtgcgcatcaccttggccagcgggcagaccgaggtcttgtagatatcggtcacttcaaagcgggtcgggtccatcttgttgcctgcgcccatggagcagataatgggagtgcccacctccttgcacttcatcacaagggccagcttgccggtgacggtgtcaatggcatccaccacatagtcgtactgggtaaagtcgaactggtcctgtgtttccgggccaaagaagcaccggtgggtggtcaccctgatatccgggtcaatgtcgtggatgcgctgcgcagccacatctactttatattgtcctaccgtactgcgggtggcaatgatctggcggttgagattggtcaggcagactttatcgtcatcgatcagatccagtgcccccacgccgctgcgcgccagcgcttccaccgtgtagccgcccacgccgccgatgccgaacaccgccacgcgggaattgtgcagtttttccatagcttccgcgcccagcagcaactgcgtgcgggaatactgattttgcattttgttctccttgttacttttccactctcgtaatggtgccgccgcccagcacggtgtcgccctgatacagcaccacggcctgaccgggcgtaggggcgcgctggggctggtcaaattccagccggaagccgcactccgccgggtagacggtggcggcctgctccacctgatggtaccgggtgcgggctgtgacccgcagcggtccggtcagctccggaatggcgatccagttcacctcgtccgcatacacgatgcggtcgaacagcatctcctccggccctaccgtgacggtgtttgcctgcatgtccttgccgcagacgtacacaggtgcccccatggcaaggcccagccccttgcgctggccgatggtgtaccgcaccgcgccgttgtgggtgcccaccaccctgccgctctcatccagaaaatcacctgccgggtagtgtttgccggtgaagtcctccataaagcgggcatagtcgccatccggcacgaagcagatgtcctgactgtcgtgcttgcgggcattgacaaatttgtgctgctccgcgatctcgcgcacctcagtcttgtgcaggccgcccagcggcagacggatatgcgccagctgctcctgagtgaggttgtagagcacgtagctctggtccttgccctcgtccagcccctttttgagcaggaaacggccggtggcctcgtcctgctccacccgggcatagtggcccgtgaccacatactccatgccgtgtgcccgggcccagtccagcagatggcggaacttcatatatttattgcagtcgatgcaggggttcggcgtgccgcccgcctcatacacgcggacgaatttttcaatgatctgttcccggaagtcggccgtgaaatccagcacctcgtacgggatatccatggcatacgccacctctgccgcgtcctcgatgtccttttccgagcagcaggtgtgaaagccggactgtcccagcgtttcgttgcgggtgagccgcatggtgatgccggtgcagtcatagcctgcctgctgcatgagccatgccgccaccgagctgtccacgccgccgctcatggcaatgagggcacgcggctttgaatcaggggtctgtgtggtcataagttctcctttggtgcattcaacacactaaaacagtagtataatagtaactctgaaaaaagagcttgtcaagacgcagcgagctgctgcactgcggccagcagggcttgccgctcgttgggatattcttcccggatcacaccgtccagcagcacttccagcactttgcggatgcccggccccgccgggacgcctgccgccatcaggtcgcggccattcacagccagctggctgacgcggcagcatacgccgtccgcgtccaattgttcggccaattcggaaagtgcagcaaaatcagccgcccgttccggctgcagggctgtgcccagtgcagcaatgcgctgcacggtacacaagttatatttgcccagtagtcggcgggcgtagatggtaaagccgggtgtgacggtagtttctctgaggaccgtccgctggggtgggaccctgttgccgaaggcaatagggcgggcgatggaatggcctgcaacggcaacgactgccgcctgcggcggaaacaaggagttgctgttggggcagcggccagcaggatgcgagtgctgctcaaagcacgaagcatccgctgggtgccgcaacccgtactcgtgtccgaagagaaagctaccgtcacaccctctggcttcccgcaccagcaccgccgtttcctcaatacaggcattggagcagcgcaggcgcctgagggtgcggcgggtgccgtcctcgccaaggctgtacagcagcgccgccagccggatgggcaggttttctgcacccgccgggcaggcatccaccaccggctttgccgccgccagtgcctccggtgaaagctccggcagaataacaagcagtatttttttgtcaagatatgccgcaggggcgggtgcgctcagcagttttgcaagctcttcctcgatgcgctccaccgatacacagtccagatgggcacacagctcctgtgccgcctgcgccgtgggcgggtcgatggcaaagccaaaccgggctgcgaagcggtacagccgcaggatgcgcagcgcgtcctcggtgaaccgctggcggggcacacccaccgcccgtacgatgccgctttgcaggtcggcctgcccgccaaaggggtccacaaggccctctttttcattgtaggccatggcgttgatggtaagatcccgccgggccagatcctcccgcacatccggcacaaagtgcacctcgtccgggtggcggccatctgtgtaggtgccttctgtacggaaggtggtgatctcgtaaagggcaccgctctgcttcaccgttaccgtgccgtgctgcaggccggtggggatgcaccgctgcgcgccgaacagctccatcacctgctgcggcagagcactggtgcacaggtcccagtcgtgcggtgtaaggcccagcagactgtcccgcacgcagccgcccaccacgtaggctgcatagcccgccctgtgcagggtgtccagcagctctgccgcaccctcgtccatccggatggtcatggctgtgcctcctcgtactgcagggtgatgcttttgccgtcaaagccgcactccgccgccgggaagatgctctgtgcctgcgcggcatactcctccgggtcggtgatcatgggggaataatgggtcagccaaagccgctttgctctcgcctgcgcggcaagggtcgcgctctgcccaaaggtgctgtgcccccactgacgggcctggtcttcctgctccggaagggcataggtggcatcgcatatcagcaggtctgcgtcatgcgccgcctgcaaataatacgggcagggggccgtatcgccggaaaataccacgctcaaccccttgcgcggggcgcccagtacctgcgcaggctgcaccgttctgccctccacggcaacgctctgccctttctgcagcagcttccattgctgcaccggcacccccagcgcccgggcctgctccggcgaaaatttgcctgcacggggcagctccagccggtagccaaggctttttacccggtgctttgtggcaaacggcaccagccgcgcaccggcaggccagccctcgctcagcgcatccagcgccagcggctggccctgcataagcacctgcggcttcaccggatagggcagcgggccggtcagtgcccgcaccgccgcccagatatccggcaggccctccggacccagcagcgcaagcggccttgtgcggccctgcgcccccagagtctgcaaaagacccggcagaccaaagatgtggtcgccatggtagtgggtcaggcagatggcatctgcccgcatcaggttcacgcccgcacggcgcgctgccgcctgcgtgccctcgccgcagtcccacagcaggccgtggccgccgcaggcagcaaacgccgccgagagtgcccggtccggcagtggcatggtagccgcagtgcccagcagtgtaatggtcagcataaaatcgttctccctacacagtagatttcgatattttattgtaccacagcccagcacgttgcacaatcactgctggccgcgcatagcatgggccagcacagcaaaaagggggcagcgggatgagacgcaaaaaaggggatcctttttccggcaggccgcacagcggccttggatgggtgcttctgctcgccgcactggccctgtttctgctggccggtgcgcccggctgcatggcccagcggatggcgtggtctgcccggggaacgatgatctttctgcccagcgggttttgaaaaaatgggagcatcctgctgcacagaacgctcccatttttctttttattttccatccgaatagggcagctggccggtcagggtcagcgtttcggcaagctcgtcctccgagcggaaccgccacgccgccgctcccacggccacatagcaggcatcggcacgaccctccggtgtaacggcaaggatcatcgtttcaccgtcacccaccgccgttaccatgccatccgcactcacagttgccacgcccggattgctgctgatccatgtcatcgttccgtttttggtgcctgcagcctgcgcggtcagcttctgactggctcccactgcctgcagcagcatggcgtttttgctcatctgcacccgtccgatctccgatgtgaccgttaccgtgcagcgcagcacctgcccggctgtggtcagtgcgctgatgacggccttgccggacccctgcgcctttacgctaccgtttgtgcttaccgatgccaccgccgggttgctgctgacccactgccgcacataggtaaacccgcctttgttctgttccagcttcagctgtttcgtcggggcaggctcctgctctgtaatggtaagcatcagatcgctggtgttcagcaccaggcggctggctgtgcttttgcgcaccgtgatggtacaggtggtcttttcgccgcgctcattgcgggccgtgacggccgcagtgccctcggcatggccggtcaccctgccggtgccgtccaccgatgccactgccggatcactggaagtccagatcagaaagaagtagtcgttgggtgcctgcacattcaggtaggccaccggggccgggtctccttcggtgatatccagcgtcagttcggcagtgtccaatgtcatgccgctgtccggcagcggctgctcctgcgcagcataggccgacaatgccccggctgcaaacagttctgcgcacagcaccactgcacaaacacacgctttgaacccctgcttcatgggctttgccctccccgcctgctttgctgcaagatcctttaaatattcctgtctccgtattattttacacgcagtgcaaaaccgggtcaagttttttgcccattctgccgggcagctgagccttattttgtggagaataataaaatccgcttttcaattttgtacaaaacgccgccgcacccggcaaaccggatgcggcggcgctgttctgcttttgaattttcagcttagtagttgatctttttcagctcaaagtagctctgcggatgtgcgcacaccgggcacttgagcggtgcggacttgccgatataggtgtagccgcagttccggcactgccatacctgctgctcctcgcgggcaaagaccttgttgtttttcaggttttcggccagcgcacggtagcgctcctcgtgctccttctcgatctgtgccaccatggtgaacagtgctgcgatctgagggaagccctcttctttggcctccttggccatgcgggggtacatctcggtccactcgtcgtgctcaccgcctgctgccatgtccagacaagtcagggtatcggggatcgcgccgccgcacagcagcttgaaccagatctttgcgtgctccttctcattgctggcggtctcctcaaagatcgcggccagctgctcgtagccttctttttttgccatgctggcaaagaaggtgtacttgttgcgtgcctggctctcgcctgcaaacgcttccatcagatttttctcggttttggtacccttcagttccatgatgctctcctttcaaaaacggatcttctgtcaggatcgaccgatcccggctctatcattcagcccggcggtaattttttcgcctgcggctcaggttctgaacagagtataccatattttttgatggaaatcaagaataattcctatttattctgagaatatttctcagttatgctgtttcagtgcacacacagcaatactcagggcgctccacgctgcctgatacatcagcaccgttgccaccgaaagctcccagatgctgcctgcactggtgagcagcgctgcaatgataatggagaacagcaccgagaccatctgtaccgtggtggcgctgctctcggcgttctgggcctgatccgcagcctgaaggccgccggtcaggctggcaaacgccttgagatggatcatgcagcaggtgtcctccgggtctttcggtgcggccttgatggcgttgcactgctcctgatccagcacggtgatcatgccttccggcaggcggtatgcttcggtaatgtggtgtgcagtcagactggggtcctggcatgtgaccagcaggcggatgttctccttttgcagcacggcaaggccgcgggccacattgcgcccgcccacatatttcagcacgaacatagcgtgcagattgccggacacagccagatacaaaatttgcagctcgccgttcttcgagtgctgcatctcgtattcctcgtccggcagtggcacgccctcctgctccagatagcggcgggtaccaatgagaatgcggttgttatcgcaccaggcggaaaagcccagcccatggtgctgctccagatccttgaccgggaacaggatgtctgtgcgttcctcaacgatctggcggaacagccccttcagggtgccgtggctctcgttcagcacgctggccgcgtacaggatggcgcggtcgatgcggccgcccttgaagatgcggatatcctccagctgtgcgctgtcggcggtgaacaggtcgtctgcatcgatctgcagcgtatcaatgccgcccagctgctcaatggcctgccaaccgggcacgactgcgcccacagccgcagccgcacgctgcagccgtagcgaggcaacgcccgcaatcagggtagaagaaagcggtgcgcccatgcacagcaccgctgccatggcagccgccgctttgttccagccggcacctgccagcaggaacagcacgccgctgagcagggcaacgcccagcaggatgtacgaaactttgcgtgcacggcgctcgcttgcgcgttcgctcaagctctgctccacaaagccgtcagcttccttcatcgggcggctcagcagcacccaggggtccttctgttccagatcccgtgcaagggcgcgcagcaggtctttgtccttggcgcggtaggcgccctcgaactccacaccattggtcaccagctcatagccgcccttgacagcagccagcatcacccggctgcccagcagcgcaaggaacagccccagcgcggccatgccgctgagcagcgagatgccggtggtgccgcggtaaacatttgcgttcagcatggctgtgaccgcctgcaccagcgctgctactgcggccagcgccggcatcgtctcggaagaagaccgtccgcgcaggccgttcaggccgtcgcgcagcaccgggaagcccacgcacaggcttgctgccagcagcagcaggtttgcaccatagaatgccgccggggcagcatccgggtccagcgccgccatggcgggcagcagcccatccgacaccaaaccaaaatgcagcagcaccacagccagaatgccgcccagcacgcagcgcagcgtcagctctgcactcatacgttgcagtttatccgccgtagcctccggctcggtcagctccgtttcagcatgttcctccggagacaccgcgtcctccgcctcagctttcagttccggctgtggtgcagcggatgccttctccggtgcctgctgcggctcttcaccgttcagcggcagcagcggcaggctcatggtgtcctcttttgcggcaggctcctctgccggggccaaaggtgcctgcggtgcgtcctcgctctgcgccttgccaaagaaatcggccaccggctgctccgttttttccggctgcggcacaggttccggctgcagctccggtgccgtctcttttaccgctgcaaacacagccgcgggcagcggtgcaccggacggtttctttttgccttcagccggttcagtttctgctgccggggctgcttcggctctcggtgcaggcttttccggcttctggtcgctcaggccgttgatcatcgccttgagctgtgccatctcctgctgctcctgctcttcctgcggcagcagcacctccggcgcattcttggggtgccggagagactttgccgtgctgtgctgctctgcgggtcttgccgccgggacagcgctctgccggggtgtttccggcttcactgccgccgggggttccgccgtttgcggtacagatttttcctccggctttttggcaggtgcttccggctgtgcatcctctgcttccttctccagaaaaggccacggggccagttcctgttccgggtctgcctccggcctcagcatcagttccagatccgcttccggttccggctgcgcatcctcacccagccgcacctcaccggtaggcatttcctgcggctgctctgctgcagcttcgtcagtctcctgcttttccttaccacggccaaacaggccaaaccgtttctgcggcttttcctccggctggttttcgtctctccgggtcatctcctccgggatatccaccgccgtggtgctgaaaaaggagcggaacttttcatccggggtcatttcccggccattgtttttatctttcggcattcttgtccctcctgtaattcaaattgaggttccggcccgaatgccggatcatgcctgctgtgctgcgcgctgggactggatctcgtacagaataatgcccgcagccaccgacacgttgtagctgtccacaccggtgcccggtgctgccatatccagccgcaccacgccgtcgcacagctttttcaccagctgcgaaacaccgctgccctcgctgcccagcaccagtgcaatggggccggtcaggttgttcctgcgcagagacacgccgtccatatcggcgcagtagacgaacacaccctgctccttcaggcggcggatggtctcgccgatgttggccacacgagccaccggcaggcgttctgcggcacctgcgctggacttgatgacggtaggcgtgaccgatgcgccgccgcgctttgggatcacgatgccatgcgcaccgcacagcagagcactgcgcatcacggcacccagattgtgcgggtcttcaatgccatcgctcagcaccagaaaaggtgcctcgcccttgtccttggctgctgccatcaggtcttctaccgtcacgtattcgatctcgctggcaaatgccgccacaccctgatggctctcggtgccggtcatcaggcgcagcttgttggggtgcacccgcttcaccgtggcacccgcttcctttgccaatgcggtatagtaagccgccacggccggagccatgccctcagcaatgagcacggtgtccacgccggaaccgcttttcagcagttcggtcaccggatttttgccataaacaaggctctcgttcttctgcagcggctcttccgggctgcggcgcggacggcgcggctggttcttttcttccatgatgattttctccttccgttgtatcaccggaaggtgctgtgcacaccctccaaaaggcgcgccgcactctgggccgcgcaccggtatgatctgaagatgataactcattttgaagtatagcataagccgaccttgtttgccagcaaattaccgttttttatccgcgtcctgcaaaagtttttctgttcgtggtgccggagaccgtttcctcttttttgcagaaatgttctgccgccctgcatcagctttacccggctgctgggtagatatccctctgttttgccggagaaaaaagttttccacaaaaacgcggtatacaatccgtagaagagcgattatttttccacatgttgaaaaccctgtggagaaagttcaaaagtccagctttaaagcctgttttgcctgtggaattccacactttccacaaggttttccactttttggttcgaccttttttgatttcctgcgtacaatttgtagaatacaagtcggaaatatgacaattttttgaactgcatcctgtccgcttttgccaaattgcccaatatcattttgacgaatgtggatctgtgttgaaaatccgtccttcatcaagctttctgtctttcggccgctcgttgcacattatatggaaatttgttgcattctatcgaatatatgcgcttctggcagtaaccccctgcaccctgccagaaacagaatccccgcattgttacaggaaaaacaccggtttggattgattttggccgctgtttggggtatactaattctgtaggttcgttaaaccgtgcacaaagcggatatgaaacgagcaagaccccaatgattttgtggaggtaatgaataatgttggtaaatgcaaccgaaatgctgatcaaagcacgtgatggccactacggtgtgcctcagttcaacatcaacaatctggagtggaccaagtccgttctgaccgcctgcgaggaaatgaagagccctgtgattctgggtgtttccgagggtgccggcaagtacatgaccggtttcaagaccgtcgctgccatggtcagcgcaatggtcgattccatgggcatcaccgttcctgttgccctgcatctggatcacggcacctatgagggctgcaaagcctgcatcgaggccggcttctcttccatcatgttcgatggcagccactactccatcgaggagaatgtggaaaagaccaaggagctggttgctctggcacacgctaagggcctgagcatcgaggcagaggtcggttccatcggcggcgtcgaggacggcgttgtgggtgccggcgagatcgcagaccccgaggagtgcgcaaagatcactgctctgggcatcgacttcctggctgccggcatcggcaacatccacggtgtctacccggcaaactggaagggtctggacttcgaggctctggaccgcatccacaaggccaccaataacatccctctggttctgcacggcggcaccggcatccccgacgagatgatcgcaaaggcaatcagcctgggcgtttccaagatcaacatcaacaccgagtgccagctggtgtttgctgaggccacccgcaagtacatcgaagagggcaaggatcagcagggtaagggcttcgacccccgcaagctgctggctcccggcgcaaaggccatcgaggccaagtgcaaggagaagatcgagctgttcggttgcgcaggcaagggctaagcagaagctcgtatcgtaaccggtacaccacccaataatgtatgcggccccgtcacgttgaatgctcaacgcggcggggccgtttttt

SEQ ID NO: 1201 - DNA, 217 bp, Unknown
  gut microbiota DNA sequence
gacaatcacggcaagacagccccacggcacctgccacgctgcaccgaaataatgggtgatgagcaggatatacagcttccgattcagcacaagacccagcgcaatgcccaccacaagaccggacaccgcataggtgccagcttcggcagagatcatgcgtttcagctgtgcatcatccatcccgatggcacgcaggatgccatactgcttcattcgt

SEQ ID NO: 1202 - DNA, 861 bp, Unknown
  gut microbiota DNA sequence
cccctgctgcgatggcgccatccaatttgacagcgccacccagaagatgaaatgcccttactgtgacaccgagttcgacgtggataccctcaagggctacgacgaggagctgaaggacgaaaagcccagcgagatggagtggaccacccccggcggcagctgggcagaaggagagactgccggtctgcatacttacagctgcaagagctgcggcggtgagatcgtgggcgatgacaccatggcggcgtccgcctgccccttctgcggcaaccccatcgtcctcaccggacagtttgccggggcgctgcggcccgacctcatcatccccttcaagctggacaaaaaggccgccaaggcaaagctgcaggaacatctcaagggcaagactctgctgccccgggtgttccgcagccagaaccacatcgacgagatcaagggcgtgtatgtgcccttctggctcttcgacagcgacgccgacgcccagctgcgctttaccgccacccggacccgctgctggtcggacagcaaatacgactataccgagaccaactactactccgtccggcgggatggcacactgggctttgatgccgtgccggtggacggttcgtccaagatcgaggacgacctgatggagtccatcgagcccttcgccatgcaggacgccatccccttccagaccgcctatctggcgggctatgtggcggataaatacgatgtgagcgccgaggacagcatcgagcgggccaacaagcgcatccgccgctccactgaggagacgttccagcagaccgttaccggctacgattcggtcaaggtggataacagcagcatccagctgcacggcggcaaggcaaagta

SEQ ID NO: 1203 - DNA, 3158 bp, Unknown
  gut microbiota DNA sequence
atcgggcttgacggacaccttgccggaggtatcaggaacctgctttacacaaacaattgctttcattgtaactcttgcctcccttacttcagcagcgcgccggaaatgaccatcatctgcacttcgctggtgccctcgtagatctcggtgatcttggcatcacgcatcatgcgctcgatgggatagtcacgggtgtagccgtaaccgccgaacagctgcaggcagcggcgggtcacatcgcttgcggtgcgggctgcgatcagctttgcctgagcagcctcgacgctgtaacgaaccttcttgccgtccattgcttcctgcttcttcagagcagcggcgtagaccagatactttgcagcctcaacgcgtgccttcatctcagccagctcgaactgggtgttctggaatgcggaaatgctgcggccgaactgcttgcgctccttgacgtaagcaacggtctcttccagagcgccctcggcgatgcccagagcctgagaagcaatgccgatacggccaccgtccagagtagccatagccagctggaagccgcggccacgcacacccagcatacggtcagcagggatgcggcagtcctcaaagatcagctcgcaggtggaagaaccgcggatgcccatcttgtcctcagccttaccgacggagaagcccgggtcggtgcgctccacgataaaggcggagcactgcttggtgggacggcccttcttgtcgggcacgatatcggtgacagcaataacgataaagacgtttgcgtagccggcgttggtgatgaagatcttggaaccgttcaggatccaatcaccggtctcggggtcctgctttgcaaaggtctgctgaccctgtgcatcggtgccggcacccggctcagtcaggccgaaagcacccagccactcaccgctgcacagcttgggcagatactttgccttctgctcgggagtaccattttcataaataggagcagcacacaggctggtgtgagcagagacgatgacaccggtggtgccgcagaccttgctcagctcttccactgccatgacgtaggacagcacatcgccgcctgcaccgccgacctcagtcgggaaataaatgcccatcatgccgagcttgcccatcttttcgacggtctctttggggaagtactcttccgcatcaaccttctttgccaggggcttgacttcgttctcagcaaactcacggtacattttctgtaccatctgctgctgcttggacagagtaaaatccatcgctatatcctcctaacgggtctttttcatttaccggaattgcccggtgcaaacaaattcctcccggccgcgtttccacggtcgggagaaacgtttatcagaatttacagctggtcaacaggggtcttggtgcggtctgcgttgtaaacgtagaagcccttgccgctcttgcagcccaggttgccgccacggaccatcttacggatcagcgggcaggcacgatacttgctgtcgccggtctccttgtacagcacatccatgatggccaggcagatatccaggccgatgaagtcgcccagctccaggggacccatggggtggttggcacccagcttcatagcggtgtcgatgccggcgatatcggaaacgccttccatcttgatgaaagcagcttcgttgatcatggggatcaggatgcggttgacgacgaagcctgcagcctcattgacctgaaccggctgcttgccgatggcaacagagatctccttgatcttctcaacggtctcagcgggagtgttgcagcctgcgatgacctcgatcagcttcatgcggtctgcggggttaaagaagtgcatgccgaccagcggacggctaacgcccttgccgatctcggtgatggacagagaagaagtgttggaagcgaagatgcactcgggcttgcagatcttatccagctcgccgaaggtggtctgcttgaccttcatatcctcaaaagcagcctcaaccaccagatcgcagtcagcgcacaggtcttccttcaggcccggggtgatggcagcaacgatagcgtctgccttttcctgcgtcatctttcccttggcaaccagcttctcgtagcccttcttgatctttgccagaccattctcggcccactcctgcttgatgtcgcacagagcaacggtgttgccctcaacctgtgcaaatgcctttgcgatgccctggcccatggtgccagcgccgataacaccgatcttcataggaaacctctcctttaatatcaaaaattatgtagtaatggattagttgttggtgaacactgccttgggcttcggcttctcacggctcaggaagcaggccatgccttccttctggtcgtgggtctcgaagcagctgccgaacagcttttcctcgacctcaacagccttctcgatgggcaggctgatgccgccgttgattgccttcttgcagttgcgtacagcgatgggtgcattctttgcgatcttgccggccagcttcagcacgttctccatcagttcagcctgaggatacacagcgttcaccagaccaatgcgcagagcctcgtccgccttgatgttcagtgcagagtagaccagctgctttgccatacccatgccgaccagacgtgccagacgctgggtaccgccaaagcccggggtgatgcccagacccacttccggctggccaaacacagcgttgtcagagcagatgcggatgtcgcagctcatagccagctcgttgccgccgcccagtgcaaagccgttcacggctgcaataacggggatggggaagctctcaatcatcaggaacacatcattgcccagcttgccgaaggcctcaccctctgccttggtcatggtgctcatggaaccgatatctgcacctgccacgaagctcttgtcgccttcgccggtcagaacgatgcagcggacagtctcctgatccacagcctcaaaagctgccttcaggtctgccagaacttcgggattcagggcattcagtgccttggggcggtcgatggtaatgatctcaactgcaccctgcacctcggtttttacaaatgccattgtgaaaacctccaattcaaatgtatcagttttctcacaaacagcccccggacggagaggaggctctccggttcctcctctcgcccgggtctgt

SEQ ID NO: 1204 - DNA, 53137 bp, Unknown
  gut microbiota DNA sequence
ctcaacgatggtagcgcagcccatgccgccgccgatgcacagggtagccaggcccttgtgtgcaccgcgatgcttcatagcatacagcagggtgaccaggatacgagcgccggaagcgccgaccgggtggcccagagcaattgcgccgccgttgacgttcaccttgctcatatcaaagttcagagcctggctgacagccacagactgagcagcaaatgcctcgttggcctcgatcagatccatgtcagcaacagtcaggccggtctttgccatgaccttcttggtagcggcgatggggcccaggcccatgacttcgggctcaacgcctgccagagcaccggcgacccaggtagccagaggcttcacgcccagctccttagccttctcctcgctcatgatgaccagagcagcagcgccgtcattgatggcggaagagttgccggcggtcacgatgccgtccttggtgaaagcgggcttcagctttgccagcacttcaggagcgctcagacgggggccttcatcagtatcgaacacggtgtcgcccttcttgcccttgatcacaacgggaacgatctcgtccttgaaagcgccgtccttgatagccttgtcagccttcagctggctgttgtatgagaactcgtccagcatctcacgggtgatggggctgtagccgtacttcttctgataagtctcgttggtgcagacattctcagcggtcatgcccatgtgcttgttgaagccgcaggcatcccacagagcatcgttgaccatggtatccacgatctcgctcttgcccatgggtgcgcccatgcggtagccgtaacgagccttctgcagtgcgaagggagccatgtccatgttctccatgccgcctgcgaccacgatgtcagcatcgccagcctcgatcatctgagcagccatgttgacgcagttcagaccggagccgcacaccacgttgacggtgacagccggggtctcgatgggcaggccagccttcagagcagcctgacgagcgacgttctggcccagaccggcctgaatgacgcagcccatgtagacatgatcgacctgctcgggagcgacgtttgcacggttcagagcttccttgatgacgatggagcccagctcaactgcgggaacgtttgccagagtgccgccgaacttgccaatagcggtacggcatgcagatgcgataacgatctttttcatgtgaatagcctcctgaattgtgtatgtgttacttttcgtaagccatttttatcaaaacgcccgtaagcgcttttacaaattaggtctcggggtcttttttctgccggatcagcgcatacttttcgttgaccgccttttccacattgggtgtgacgaacttaccgatgtcgctgccgtagtaagctgcctcttttacaatggtggaagaaaggtagctccacttgatgctcgttgccagaaacatggtctcgatgccgggcatcagtgcgtgattggtctgcgcaagctggatctcgttttcaaaatccgtcaccgcccgcaggccccgcaccatcaccgaagcgtgccgtttcttggcgaactccacggtcaggccgtcgaagctctccaccgaaacattctggatgcccttgcagcattcctttagaagctccacgcgttcctccacggtgaacagcggattctttgcgctgttgttgagcaccgccacgatcagatgatcgttgatctttgctgcgcgcttgatgatatcgagatgcccttttgtgaccggatcgaacgaaccgggataaactgctgttgccatcgtctggtgtcctccttgagcgctgtgaaaagcgcgttttggttctgccatgatagcactttccagtcttgggtgcaagatttttgtgcaagctgtacgttttatcgttaaaatttaaacaatcaatgtcatgctgcatcgcagctgcttgctacgctataagtaaaccatatcgtcaaaattttatcaagtccttttgcaaagattttggtttttcagcaccaaacaatcgtccaaaaactccgcgaattttgtccatattgccagtcggtcaaaattttctcgataaactattgattctacacattgttaatgttataactaagttgtgcagatctgctgccctgtccgacagctgccttctgctggttatcaggatatcatccgcctgtgtcagagctgtgttcaaattgccaacaggtggtaaacatcctgcaaagatttgtccgtgcaggaagagtaaatgataaatttacaattcctttatgttattataggagaggatggtttataatggattttacggaactgtatgctcagaagaaaatgaccgccgctcaggctgccgcactggtcaaaagcggtgactgggtggattacggctgggctgtgaacacccctgtggcggtggatgccgagattgcaaagcgtctgcctgagctggaaggtgtcaacttccgcggcggcatcctgatgtgggtgcccgcgatcttccagatcgacgatcccgctgcacacatgacatggaacagctggcatatgggcggcattgagcgcaaggccattgcacagggcttctccttctactcccccatccgttattccgagctgccccgctactaccgcgaaagcccggatccgctggatgtggcggtgttccaggtgacccccatggacgagcacggctacttcaacttcggccccagtgcatctcatctgggtgctgtgtgcgaaaaagccaagaagatcatcgttgaggtcaacaagaacatgccccgctgccttggcggcatggagaactgcatccacatttctcaggtcaccggcatcgtggaaggcgagaacccgcccatcggccagatggccgctcccggtgctgctaccgaagtggatctgaaggttgccaacctgatcgttccgcagatccccaacggtgcctgcctgcagctgggcatcggcggtatgcccaatgccatcggcagcctgatcgcacagagcgatttgaaggatctgggcgtgcacaccgaaatgtatgtggatgcctttgtggatatcgccaaggccggcaagatcaccggtgcatgcaagcagctggacaagggccgtcaggtctacgccttcggtgccggcacccagaaaatgtacgattacctgaacgataacccggagtgcatgtctgcacccgtggactacaccaacgatatccgcagcatctccgcactggataactttatttccatcaacaacgctgtggacatcgacctgttcggtcaggtgaacgccgagactgcaggcctcaagcaaatctccggtgccggcggtcagctggacttcgttctgggcgcatacctttccaagggcggcaagagctttatctgcctgtcctctaccttctttaataagaagaccggccagctggaaagccgcatccgtcccactctggaaaacggcagcatcgtcaccgatacccgtgccaacatccactacctgtgcaccgagtacggctgcgtgaacctgaagggcctgaccacctgggaaaaggccgaagctctgatcagcgtagcacatcccgacttccgtgaagacctgatcaaggaagccgaaaaaatgcacatctggcgcaggagcaacaaaatctgataagtgccgcggggattcctgctgtccgcggctgaaatggagtctatcatgatggacaaaaagccgcacgtcaagccctacctctacgggatgctggcaggatttggagcgatctccctgagcatcatcttctttttcctgatctaccgcttcgatggttttggcgatgccatctccacgctgaccggcattctgatgccgttcatctacggtgccgtcatcgcctacctgctcaaacctgtatgcaacaccatcgagagctttctgcgccggttcatcccggaaaagatgcatggtctggtcaatgtgctgtccattacgctgaccatcctgttcggcctgctcctcatctacgctttgtgcatgatgatcattccgcagctcattaccagcgtgaccaccctgtactacactgcgcagcgcaaccttgcaaagttcgtgcagtgggcgaatcatgtggagttcattgagaacaaccagcagatcatggacatgctcaactctgcttatgccaccatcagcaccaatatcgatgatctgatcaagacccggctcctgccctccatgcagaacatcgtcagcggtgccgcagcgggtgtgctgaacgtagtgaccatggccaagaacctgatcatcggcatcatcgtggccgtgtatatgctggccagccgcaagcgctttgtgcagcaggccaagctggtgctctacagcatcttcaagccccgctgggcagagctgatcaaggaagaagtgaagtacgccgataagatgttcggcggcttcatcaacggcaagatcatggattccgccatcatcggcgtgctgtgctatatcggctgcctgatctttaagttccccagtgcccttctggtttccgtgatcatcggcgtgaccaatgtgatccccttcttcggcccgttcatcggtgccgtgcccgccaccctgctgatcctcattcagagccccatcaaggcgctgtggttcgtcctgttcgttctggtgctgcagcagctggacggaaacgtgatcggccccaagatcctgggcaacaccaccggtctttccagtttctgggtactgttcgccatcctgctgttcggcggtctgtggggctttgtgggcatgatcgtaggtgtgccgctgtttgcagtcatctatgatgtgatcaaaaagctggtcatccacggcctgaagcgcaacaaggagatcgacctgctgcagacttaccacgacaacttcggtgacccggaggacgatgttccggtagaaacgtctgcatcggaagcacctcctgccgaaacaaataatctataaatcacaatgccccggcattccatgtgatacgctacccctagagtagacagagacaaaaactctgagtactctgggggtattttcatgtcaagaaagaacaatcactcttcacgattgactgctgcaacagccgccgttaccagcaccgtctgttcatccagatgtcgatgcaggctcatgtcggtgccatgaaccgagctgcctgataccgattttgcacaaaaaattcgccgtctccttgtggaaacggcgaacaaaaaccttatattatttttttctacttgacagaatgcacttcagtgattcagcgcaggtcctgtttttttatttctgtttcgtgcagggctttctggctgcgttttatgccatcactccacggtcacgctcttggccagattacgcggcttatccacgtcacagccgcgcagaacagccatataataggcaaacagctgcagcggcacaatgagctgcagcggcatcagaatgtcctcatactcatccagccggatcacggcatctgccacgccttccggcaccacagcatcctttgtggtaaacagcagcacccttgctccgcggctgcgggtctccttggcattggaaatggtcttttcgtacacctgtttctgggtggccagtgcgatcaccggcacgccatcggtgatcaggctgatggtaccatgtttcagttcaccggctgcataggcatccgagtgcacatagctgatctccttgagtttcaggctgccctccagcgagagcgcatagtcgaacccgcgtccaatgaagaagcagctctgggtgttcacatagcggctggcaaggtacttgatctgctcacaatctgcaaggcgcggcttgatgacctccggtgcgcgcagcagctgggccgtaaagcggcgggtctctgcctcgctcagccgtccgcgcgcataggccagccgcagtgcaaacagatacagcacgcacatctgcaccatatacgccttggtggatgctaccgcgatctccggcccggcgtaggtgtacattacataatctgcggcacgtgcaatggagctgcccaccacattcacgatggccagcaccggcacgccgcggctcttggccagcttgagcgctgccaacgtgtcgctggtctcgccggactggctgatgatgatgaccagatcgttcttttccagaatggggtcccggtaacggaactcgctggcaatgtccacctcggcgggcacacgggccaacgtttcgatggcagatttgcccaccataccggcatgcatagccgtaccgcagcccaccagatgcacccggccaataccgcgcagcacttcatcggtcagctccgggatgcgcagcaccggcagtccgtcctctacacgggggctgaccgtggccataatggccgcaggctgctcgttgatctccttgagcataaagtggggatagccgcccttttcggcagcttccatatcccagtctgccgtcagctgctggcgctccaccggctcaccaaattcgttgtagaagcggatgccctctgtggtgcagacggccatatccccttcttccagcacgctgtatttccgggtatacttgagcagtgccggaatatccgaagccacaaagttttcaccctcgccccagccgacgatcagcgggctttcccgcttgactgcaaaaatggtgtccgggtaatcccggaacagcacggccagcgcatagctgccgcgcaccttggcaagcgcctgctgcagtgcacgcagcgggtcaccggtatagcagctgtcgatcaactttaccagcacttcggtgtccgtctcactctggaaggtatagccttttgcggccaagcgctccttgagcaggccgtaattttcaatgatgccattgtgcacaatgctcacacgcggggtcgaatgcgggtggctgttcacatcgctgggctcaccatgggtagcccagcgggtgtggccgatgccgcagaagctttgtgccagctgctgcgccgccagcttttcccgcagggcggtgagccgtcctttgctttttaccacgcggatgccgccgtccagcgcaagcgccacaccggcggagtcgtacccgcgatactccagcttttccagaccatccagcagcacgtcctgcgcactgcgcttaccgacataaccaacaatgccgcacatacaaaacacctccataccgaccgttcccgcgcaaaaaggcgcagtgatatccagtcagcttcctagtacagtttatgttcttgtatggctttctttgaagggatctgttgcggtattgctgccgttttttgcccttctctgcggctggtctagccctcagccggagaaacatccgccgaatctttcgatgattcctctcctcgtcaccctcgcggctgtcacccgcgtggcccggcgctttgcgttacctgtgtgctgcgctctcccctttctgatgccctattatagcacaaaggctggctcagcgccagcccaaagttttatgaagtttcggccgccagaccagccggtacatcatgagcatgttatgcaatgcccggtcgtacagcacaaaggcaacattgcccatgaccagcgttgccagcgagacagccagcgcggtggtgcgcagctcctgcgaaatgctgcctgccggcaccagcagaaataccagcccgtacatggccagcactgtgccgttgcacagcagcagcttgcagacaatgcgcagaaccgcagggcggatgcgctcaaacttcggctttgccagcgggtaataccccagcaaaaacacaaagatcagcgctacttccttatccggcacgaacagcagtgccagcaggctgactgccgcataggccgtcaaagccagctgcatcccgcactccacgcacaccgtagcaacaagaaagcccgccactgcaggcgcaatgaacatggcaatggggatcacagctcccagcagcatcagtgcgacgcacagcgccgccacaatgccgcagtaagccatggcccagcttttttgatggttttgtttcatgggatctcccagttttcgcgctcagcaccggcttccagcgggtccaccgcatggtgcaggccaagcagcatgatgttatccagcaggccgcggttcaatttgatgtccagcatactgtacacgcggatcagatcgttggcggcagccagtgcctgacggcgggcattctccaccgccgcagcctgtccccgcaggtcgttgactacgaacacgttgtagcggccgctgctcttgtccatctcaaagcgctcagccttatccagcaggtaaaaaatgcggccgatgctgctgccgatgtagcgcatgctcttgcgctggctggggtcgtcggtggcaagggtggaatacagtgcaccgtaaatgttgctcatgggttcagcggcaagagagtagttcttggcgctcaggttcatctgcaccacggcctgatcccgctcctgcacgaacagccgttccagcgccgggttctcctgcacggcacgctcataggcgcggcgcagcagcagacggtccaccgcacggcgcaggcgcttgagcggccgcagctcgctgtatttgcggtcctgcaggttgtgccagcccagcagcacctccacctgtgcggccaaccggatgccctgggtctggcacatgagcctgcgccaggccagtgtgcccgggacccgcttgcgctggcaagtggcctgccgcccggccagactgtccgaaaggatggcaaacagcacgccgttgctccgcagcagatggcaggaatataatccgtacgcctcgtacagctgacgtcgcaccccgcgcagatagcgcaggtagatattgtaatcccggatggtgagctccggcagatatggccgcatcctacccttcatacgcaccttttcctcctcggaagaaccgcagaataataaggtaagtataatccattttcagcccgggttcaaccatcctttgtaaaaagagcatgaatttgtctcatctttgccgcacatggcacggaacacagcgtaaaacttcctgtatttgcgtccatttccatctcctgccaattcaggccccgctttgtttttttccggtaattaccggctgcaatgtaaaaagccgcactggacagctccggtgcggcaggtaacatttttcaattacttcttgttaaagcggttcggtgcagtgcgcttgccgtcaaagccggacttcggcatcggctttgcagtgtgctcaaacttgggcgcgctgtagtacatatacagctggcaggggatcatgccgttgtacatcttgcggcgcttgttggcacgcttgccgtagtgggtctcaaaatccatatcggcagtgatcgcatacacgcctgcacaggggtgtgcttccatctgccggcccagcgtgcgggccagctttgcagcaccttcaatggtgctcatgcgctcgccatacgggggattcgtcagcacgatggcctcctgcttcgcggcaaagtcggccacatcagccacttcaaagtggcagcgcttttccacaccggccagctttgcgttggcgttggccagagccacagcggcagggtcgatatcatagccaaaggcttcaaagcccacatccagcttggcctcggccagtgccttctgacgctgctcggcccagatggctgccggcacaaagccatagcgctcggcggcaaagcggcgcttcaggccgggggcaatgttcatggctttctgagcagcttcgatcagcagcgtgccgctgccgcagaaggggtcctccaccagactgtcgcggcgcacacggccaaggtctgcaatggtagccgccaaagtctcgcggatgggtgcctccatggcgttgcggcggtagccgcgcttgtgcaggccatcgccagtggtgtccagcatgatctcacactgatccttgcgcagcatgaagcggatcttgtactccgcgccggtctccggcagcacagaggtgtggtgctttgccatcaggcgcttgaccacagcttttttgatgatgctctggcaggcaggcacactggacagctggctgttcagcgaagagccggtgaccggaaaggctgcgtctgcgggcagcagctcttcccacgggatatcgtacacgccgtcgaacaggtcatcaaaggtggcagccctgtagcgggccagcagcagcatcacgcgctccaccgtgcgcagattgaggtttgcagcagcgatcatctctgcgccgccggcaaagctcagacggccatcgtccacgcggatattctctgcgccgatgcgggtcagctcaaattttgcagtggattcacacccaaaaaagcagggcgcgatcagttcaaattttgcaggcattgtggttcctttcttttattacggaaaaaacagacctgcccgatcaaatgagacaggtctgtttccgttattttgatcaggcttgaaaagcgcaggcctttccgctcagcggcggccaccgcggccacgaggcgcataaccaccgccgcggcggttattggtctcgtgatcaagatcggccatcttctcttcgctctggctcttgaagcggctcatcatgtcctcaaaactcatgttatcggaacggacgggagccttgggctgccatacacggggtgcgctgtcgcgggcagggcctctgccgccctcacgcggggggcggccagcgccgccgcggcctgcaccaaaatgaccaccctcgcgggggccgcccggacggggaccaccagagcgcgggccgcctgcagggcctctgccctcacgcgccgggcgcggaggcggcggcagcaggcgcttgatggacagcgcgatcttgccatccggtgcaatgttgatcacctgcaccttgacgatatcaccatcgtgcagaacagctgcaatgtcctgcacgaactcgttggacacctcggaaatatggaccatgcctacacggccctccggcagtgcgacaaaagcgccaaacggctttacaccggtgacgcggccctcgaatacgttccctacctcaattgccaaaactcaatactccttgttttccatagaatgggcagcaattcagctgccggtcacatccacaaagatgcgctcgttgggtgcagcgtaattgtaagaatcccgcgcgacccactcggtgatctggtctgcatcgccgctgagaatgcgctgcatctcctcgttttcagtcttttgctgggcgatctgctcgttcagcgtgtccagctccgcacgtttggagctgatggtgacctgattggaaatgtatgctgccagcatactcagcagcagcaggacaaaaaacacccgtacaagcgttttaacgaccactttcttcttgcgttttctgcggtccggtgctgccatgatctcttctgcccccgttgcatttgactcttactttaacacatatgaattatacatcatgcggcgctggtttggcaagttctttttgcgcttttttgcagttctttttgcgctgcggcgtagtttgcgcgcctttctccgccgggcgcgccgccgctctgccggccggagcacccggcgctgtaaaacgcctcccgctgcacgcagcggtgcacccagcacaaaggctactgcaccggcaccggcaaaggctgccgcagccatgtaccagcgcagaacaccggaactgctctgccctgctgcgtagctctgcacagcagccagcacagcacccatccacaccagatccggcacaaaagctgcacgccctctggccgggaatacagcccgcagtgcgccgatactggctcccagcaccgtgcaggcagcgatctcctgcccaagggctgcaggcggcagtaccgggatcatcgcagcaggcggcgcagaaaaccgcccgccggtgcgctggccgtatattccagcgtgtcgatgcggccggtgaacttcgcctccccggtctccagatccagcgccgccatgttcagctgcgccccggtcaggtgcagcgtgcccttgcccgtttccatggcagcgctgtcggcattgcagtgcagtaccttctgcacaccggtcaccgtcaggcgggcgcggctttccaagatcagatcgtgcggcgcgggctgcgagtctctgggtgttttttccggcatggttcgtctccccttttctggtgcatcctatgcaccggaccggggcttttatgcctgctcgccctctgcaatgatctcgtacatctcgcgggccacatccttggtgcgcggctccacatccgagagcacctttaccttgatgggccggttgccgaaggtcacctcgatgatgtcgcccgccttgacggcctgactggccttggcgatcttgccgttgatgaggatgcggcctgcatcggccacctcgtttgccacggtgcggcgcttgatcagacgcgaaactttcaaatatttatccagacgcatggttcttcctcctgtcacaaaaaaagccgccgcaccctcttgcaggcagcggcggcaaagcaaatacagcttacagggtgtccttcagggacttgccgggcttgaacacgatgctgcgggaagcggcaatggtgatcggctcacgggtgcgggggttgatgccctgacgctcggcgcgctcacgcatctcaaaggtgccaaagccggaaatggtgatcttttcgccctcagacatggccttgctcagtgcttcaaacacagcattgacagcctgctcagcgctcttcttgctcatctcagtgttcgcagcaacctgtgcgatcagatcggtcttcgtcataaaaataccctccagatttgttacttggtgttcttttttctctatcggagcaggtcactcgacctgagtaccgctttgttctttctgcgccagcagttctgcacaatagcgcttggatgcgaaggtcagcgcttcctccgcgtccacaccagccagccgcatggcattggccgcagcaaacagcagttctcccgccgcctgtgcgtcctgttcccggttccagccgtccagtgctgcccgcaaagccggccgtgccgtttccggcgcagactgctctgccccgcagcggtcggcacgcttctgcagcttctgggcacgcatcaaagcaggcagagtagcaggcactgtgcccagctcatcagccagagtggtgcggcccttttccttatttttgagcgcatcccagccgtttatacccgcattttgtgccgccgaggacgcaaagatgttcggatgccggaacaccagcttctcgcacacctcacggcagacatcctcaaaagtaaagcgcccgcgctcttcttcgatcaccgcgtggaacgccacctgcatcagcacatcgcccagctcttcctgcatcaactgcggatcgtcagcatcaatggcctccagcgcttcgcaggtctcttccagaaagttcttccggatggaagcatgggtctgtaccttatcccacggacagccgttctccgggtcccgcaggatacgcagaatttccagcagctgctctgccgtatagggtgcctttggctgccagtccagcacagcgctcacctgccttgtaaaagatactgtatattgtatcgcatctcatgcagttttgcaagacaaagtgcgcaaatttcccgcatttcgcctgcattttccgctcgcaaaaacaggacggtgccctgtggggagcgccgccctgttgctgaaccgttttattacagctgtgcaccgcacttgttgcagaacagtgcatcgtccgagacgggagcaccgcactgcgggcaggctttgtgctcttccggttggtcagcaggaacttcctcgtgcaccacatattccgcctcggcagcttccgccggggtcagggatgctttcaggcgggcgatctcctgctcgatgttatcgatcatctcgatatacttatccaccagcggctggttttcttccttgcccttggccagactgtacaccagtgcgcccaactggcgctgtgccttgagcagcttgccctgctcatttacgatcaaagcctgagtcttgcccttttcggccaggtccagcgcagcgttcttgcctttttcggcatattccagacccatttccttgatcttgttgaaatccataaaagacacctctcttactatcggcctgtttatcgtgggccatgtgcggatgttatctccattatagcgcacaggccgctcgtttgcaatgaacggaccgcattttttacagtttggtgccggtttggaaacaattttttcgcattcggcctaaattcacacgataatttcacacatcggcattctgtgccctgcggtcggctgcaccgccgtagaattcccgcagcatgctgtcctccggcagcagctccagctccagcggtgccacatgctcaaagcggcgggctgtctcgtcccacagctccgcattgtggccttccagcgtgaactgacggcgcaccacgcccagcagtttggagatcaggcccagctcgtaggtaaaggaggtatccagcaaaaagtctgccgtggttttgaagcccttgatataccgcgtctcgccgtccagcacgcggtcccacatggcaagggtcttttccgggctgcggccgcgcgctgcagcgtcccgcaaggtgcggcggcacaggcggatatcctgcgtgttgatgacgcggcggccatcgatgcagtattcctcccgcaggcctgcatagatgcggtagatgtcgtcgccctttacaaggccggtcagctccgggttcagcgcatggatgccctccacgatgcatacaccgccctgcaggtcgatgggctccacctctgccgagcgcttttcggcagagaaatcgtagatgggcagcacggtcttgcccgtctcgctcagctcccgcaggcactgcttgatgagaggcagatccagcgtatcggggttctcgtagtccagcgtgccgtccggcaggcgcggatagaactctgcgcctttgaagaaattatccagactgaccacctgcgccggggtcccgcgcttttgcagagcttttgccagacagtgggcgctggtggtcttgccgctggccgacgggccggtgagcatgacgatctttgcgccggaaagctgcactttctgggcggcgtaatctatcctttgggcatagctctgctcactcaggtcggcaagtgcctgtgggctgcgggctgccacattgtacagatcgatctcaaccagacgtttgggtacccaaatcgtgatcataaaaatcagccactccttttttgcgttccagcacctccgcaaaacgctggatatattcgttcggatacttaaaattgaaaatgcgctgcatccgttttccgccgtcggccaccagcttggtgctgccgcctgcaccggcggagaggatggtctggacttcctccatgatatagatgttgtaatatccctcgtggcccggcttgcaccagcccacgttttccaggttctgcagagtattcttctggcggtagaggtagtagggccggtaacccgcctcggccagcaggttgcacttttccagcatggcggcgacatcggcgtagtcgttctccttctggtcctcaatgacgatgcgagaagcgcgcttgagggtgagggtgtgcacggtaatgttctccgggtccagcgcgatggcctgccgcaggctgcgctcaaaactttccaccgtgtcgccgggcaggccggcgatcaggtccatgttgatatcatcatgaccggccttgcgcgcttcggcatagcagtccagaatgtcctgcgccgagtgcttgcgcccaatgcccgccagcacctcgtccgagaaggtctgcggattgatagagatgcgggtagcgccgtattccttaatgaccgccagcttttcggcatccgtgcagtccggacggcctgcctccaccgtatattccacgactttcgagaggtcaaaattcgcccggaccgtgcccatcagctgccgcagctggtcggcagacaggctggtgggcgtgccgccgccgatgtagatgctgcacagtttcaggcctgccttgtcagcctgaatgcggatctcttccacctctcggcacaaacagtccacataaggctgcaccatcttgcggtcgcggtccagattgcagctgacaaagctgcagtagctgcaccgggacgggcagaacgggatgccgatgtacaggctgtaggtcccgggttcattgcccactttcaaaatcggctcctgcaggtcggcaatggccttggccatctggtatttctgctgggagcagtcgaaccggtcaaggaaaaagtggtcgatctccgcttccgtccagcctgcggcgcgcttgtcgtggatgagccgcaccgggcgcacaccggtcattttgccccatggcgggcggatgccggtccaatcccgcagcagatcataggtcaggctggcaaggctgaactccggcgtttcgccgccctgttccacaggcgcgggcagcggtgcgtgtcgttcagcacttctgccgtcctgacgcaccagtgtatgcaggccgtccggagttttttctgcccagacgcagtcctcggcgttctccggcggggtgagggtgagcggtgccatggggtaaaacaaacgcaccagatgctccacttcgtagccggaaggcaggccggtaatataaatcttcatgttgttcactctttaaaataaatcattgttgccgcgcacagcgctgcggatgaagtaattgttgtccagttcatcgccaaaggtggagaactcgccatggccgggcagcacctgcgtgccgcgcgggatgggcagctttgccagtttacgcagactctcggccatctgtgcactgctgccgccctccagatcggtacggccgatgctgcctgcaaacagggtatcgccgcagaagagatactcgccgcacagcagcaccacgccgccgggcgtatggccgggcgtgtgccagaccgtgaactgcagctcgtctaccgagacagtctccccttctgcgtagccgcagtccgctgcgctcagcggatacatgcggtcgcctgcaaggtcggcagcctcacagtagagctttgcgttccactcggtacgcaaggcttcggcgctgcccacatggtcgtagtggccgtgggtgcacaggatggtggtgagctgcgcattgttttcctttaaaattttatcgtaggtctgcgcatctgccgccggatcaatgaccacggcatggcctgcgtcggaaatgagcaggaaggtattggtatacagcggcgcagcgcccggaatatgaaaagcctgcatggcggtcactcctttttcttccactcgtcggtatcgatgataatggtgcagggtccttcgttcacaagagccacctgcatgtccgcgccaaactcgccgtgctgaacatccttcaggccctgtttgttcatctctgcaaggaacagctcgtaagcatccacggagagcggcggctttgcggccttgataaagctgggccggtagccttttttcgtgtcgccgtaaagggtgaactggctcaccaccagcgcggaatagccaagatcccgggcgctgaggttcagcttgccctctgcgtccggaaagatgcgcaggcctgcgcatttatcggcaagcttgggcacgatgtccagactgtcggtatccctgacacccagcaggatcataaggcccggcccgatggctcgcggctcaccgccgtttacccgcacactggcggaagacaccgcctgaatgactgcacgcatgttttagctccttgtcaccttgagcacgtccttcaccttggaaagtcttgcgaccacacggttgaggtgctcggtattgttgatgccgatggtcagactgaccatggcgcagttgttttccacctgacgggcgttcaccgcatagatgggcacccggatatccgccagcgcagccagcacatcctgcagcagctcgttgcggttcagcgcgatgatctcaatgccggccttatagctgtccttgacgctgtcggcccagtacgccttgacccagcggggggcgttggtgggatccttcatgctggaaatggcgttcacgcagctctgcttgtggatggaaacgccaaagccgcgggtgataaagcccacgatggggtcgcccggcagcgggctgcagcacttggcaaacttgatgggggtgttatcgaagccttccaccaccacgccgtcggtagcgtgcacacggctcaggtccaccttgggcaggtcttccccggccttttcctccgaagctttcagcttctgccactcctccttgagcttgggcaggcagttggcaatggtcatgccgccgtagccgatggcggcataaagctcctcggcattgttctggcgcaggcggcgggaacagctgttgataaaatcgtccagctggtcgtccggaaggatgatcatttccctgcgcagctcacgggccagtgcatcacgtccctgcgtgatattttcctcgcggcgcatctttttgaaccagtttcggatcttactcttcgcttcgctggtgcgcacgatcttgagccagtcgcgactggggcctttgtccgccgggccaaggatcacttcgatgatctcgccggtggaaacgatgtggtcgatgggcaccatgcggttgttcaccttgcagcccaccatgcggttgcccaccgccgaatggatcgcataggcaaaatcgatgcaggtagcgccggtgggcaggttgatgacatcgcccttgggggtaaaggcaaacacttcctccggcagcagatcgctcttgaggtcgtgcagcagattgccggaatcctcgctgacgcgctggttttccaacagctggctcacccatgccagacgttcgtccagcttgtcgtggccatccagaccttctttatacttccagtgggccgcaacgccgtactcggcctgctcgtccatcttgcgggtgcggatctgcacctcaaaggggatgccctcgtggccgatgacggtggtgtgcaggctctggtagccattgggcttgggagtggagatatagtccttgaagcggttgggcagcggatggtacatatcgtggatgaggcccagagtgctgtagcactcggccagcgtatccagaatgacacgcaccgcatagatatcgtagatctcatcaaaggacttgttctgcatgatggtcttgcgatagatgccgtaaatgctcttgacgcggcgcttgatggtagcgccctcaatgccgctttcggccagccgccgctcgatcacaccggacacctttgcaaggaactcctcgcctgcacgctcactgagcatccggctgatctcctcgtagcccacagggtcaaggtaatgcaggctgcggtcttccagctcttccttcacgttcaggattcccagacggttggcgatgggggcatacacctccatagtctcgcgggctttatcgcggcgcttctgttccggccatgcatcaccggtgcgcatgttgtgcagccggtcgcacagcttaatgatcatcacgcgcacatcgcggctcatggccagcagcatcttgcgcaggttttcagcctgcagttcctcaatgttagagaactggatcttggtcagcttggtcacgccgtccaccagcagggcaacttcctcgccaaaggcggctttcaggtcgtccagcgtagtgggagtgtcctccaccacatcgtgcagcagggccgcagcaatgctctcggagtccatgccaagatccagcaccagccgtgccacagccagcggatggcagatatacggctcgccgctgcggcggcacacccccttgtgggcagtgttggcaaggtcatatgccttttcgatcatctccatattgtaggagcggccactggccttgatggcctcacacagcttttcccaggtaacgatctccggccgcacctccgaaggcagagctccttccggtgcatcggccagctgtgctgttgcagaaacggtagccgtttcctgcaccggtaccggctgatgcaggtgggtctttgcggagtagagatcctcttcccgcaccggcttcggtgccgggaccgcagctttctttccctctggcattttacattccctccaaacatttcaggaccggggcatccgcaaggttctttttgccctgcgcaggcacaagctccagatattttgccccgcccttttccaccgtggcaatcagtcccacctgttccaaggccgtcactgccaccagcgttttgcctgtattttcctcgcccagttttgcgcacagcggctgcagatcttctgcgtgccagcggcgcgcctgcagctcacggtacactgtgacgatatcactgcgctcaggcgtaataagctttttctgttcctcagtcaggggtgtgccgcggcgcagcgccaccacaaaagcagcctgctccgcaagctttgtgcccagccctgccggatgcaggtccagaatgcggcccgaaagctgtgcgccccggggcgaatcgtagaccgaaaggttcagcgcagcatccaccacatcgcccatggcatagggcagccgttccggcggcataccgaaccacacggcatacacgctggcattgccctgccgcaggcgcaggcggctgtgcctgccctccgataccgggtataccccatccagcacggcgttctgcaaaaggaacaccggggtcgggttctcggccccatagggagccagctggtcgagcttccgcacactttccacggtcacacggtccagatggatgggcaggtcgcactccagcggggtggtatgcagcaccgggcattcccgtgctgcccagtcgttcaggcggcggcgcagagcgggcagattttcttcccgcaccgaaaggcccgcagccatggcatggccgccgtagcggatgagcagatctgcgcaggcaccaatgcaggcatgcaaattgaagccctgcacgctgcgtccgctgcccttgcattcgccgtgctcgtcgatcgtcaccacgatcacaggccggccggtgcgttccaccagccgggatgccacgatgccaatgacaccggggtgccaatcgcggccccacagcagcatcacgcggtcttccagccgctccggttcctgttccagcagttcctgcgcggccttgaagatctgcagctctgtttcctgacgctttgtattgatctcgttcagtttatgggccagctctgcggcgcggtccgggtcctcacacatcaccagctgcaaagccgtaacagcgttgtccatgcggccagccgcattgatgcggggcgcaatggcgtagctgacattttctgcggtgaccggtttgcccgcaaggcccacctcttccagcaacgcttccagacccggacggtccgtgttctgcagctggcgcaggcccgccttgacaagggtacggttttcgccggtaagcggcatcacgtccgccacagtacccacagcggcaaggtcgccgcagtagtccagcatttcttccggcgggcagccatccagtgcggcacacagcttgaatgccacgcccgcaccacacaggcccttgaagggactggtgtcgtcctcacgacgggggtctaccacggcaatggccttgggcagagtttccggcggcagatgatggtcggtaatgatcaggtcaatgcccagttcagcggcataatcggcttcttccacagcagaaatgccgttatccaccgtcacgatcagcttgcagcccttatcgtggatggaacggatggcattgcgcgaaaggccgtagccgtcgccctcgcggctgggcagcatacattttacggtagcccccatgcccttgagatgctggtacagcagggccgtggccgtcacgccgtccacgtcataatcgccgaacaccacaatggtctcgccctcgtcaatggcccgccagatgcgctcgcaggccttgtccatatcggtgagcagcgaagggtcgctcaactcttcctcaccggcaagcagggtcagtgcttcggtagggtcggtaatgccgcgggccgtcagcacgcccgccaacagggcattttccttctgctgggcggcaagggcgaccgcatatttttgctcgctccacggctcgtcgttctgtgcgttatattccagttcttcggtggcctgctccgcaatcgcctgcgtcagctcccgcagcgcggcacggtccagcggcttcagattccatgcacggtaggtcattcaaaatttcctcccgtcaggccgtcgttggccagcattccctgcagggcggcgatctcagaagagacatccatcgctacatccgagagcagcgtatcatacagggtgtcataggcctgattcagcgtgtgaaggatgcccgcgatatcgcggcggatggtctcggcgttttcgccctgctggccctgcacatcgttgtaggtgtgcagcagcttgagggtggtggggatatagtattccgcaaagcggcgggccttgggcaggctttccgggtgtgcttccagccagtcacagatggcagtggtggtggtctgcatatggtccagctcttcgcggccctgcgcatcctgcatcagctgtttttcctgctgcagcacggcggcaaagcggcgcgccgtctcaagattgagcggcacatcgtctgttttttctgccgccggttccggctgcggcggtgccttggaggctgcggcagcttcctgcgcggcacggtaatcctcagcagtcaggtaaagcttttccgctttttcgtccacccatgcactcagccagccattgcggatgaatctgcgcacccgcttgagggcacgggcctttttctcatccacggcttccagcggcaggccctttttgcagtcaaagccttctgctgcctcggccagacggagtagcgtcttgctggccttcaggcgggatgcaccggcagtgatcatccacacgaacacggcggtgacagccgcaaagcaccagccggtgatccgcaccgcccccagcgcaaagctgcccatggctgcagcattttcagccataaagctgtcctgcagaagagcctgcagaaccgccgcattgggcgtaaacaggcccgccgcacccagacaggaaaccgccgtgatgccaaagatcaccgtaaacgtgatgccgactgccagcaatgcgcagcctgcgctgtagcgctttttggcactggcgcggatctcgtctgccggggtcgtctctgccttgccgaacatctgccggaaccagccggaaacacctgcggcctgcgcgttgatattgtcctcattcaagccctgttttttcgtattctgcgcattctgacggctgcggtagtattcctcccggctgctgcgaaacgcctttgccgcttcgccaaggccaaagtttgcagcattcaccgccgcacggcccacaccataggcgcggtcgccaatgtcctcccctttgccctcaaagccatgggcaaaggcatccgacacggtatcgccaaaggcgcgcagctggttttccagctcctgctgcacctgacggccctcattctctctcattgtatcgttttcacgatcgttcatcaaattcttctcacccttctgccggtgcataccggctgatgatggcgcgggccacccgcaggccatccacggcggcgctcatgatgccgcccgcatatccggcgccctcgccgcagggatacagacctgccagctgggagcattcaaaattttcttcccgcttcagccgcaccgggctgctggtgcgggtctcaagacccgtaaggatcgcttccggcgcggtataacccgcaattttgcgctcgtaggcgcgcaggcccgcccgcagcgtttcggccagctcctgcggcagcagtgcgccgaggtctgccgcagcaacgccgcggtcataggtaggctgcacgcgtccaatgttcagctggccgcgcccttccagaaagctctggatgttctctgccggagcggcatactcccctgcactgcgcccagcggcgtaggctctggcttccagctcccgctggaacgcgatggcccggcgcggatcgtctgcaaagtccttgccgcccacactcaccaccacggccgcgttggcatttttgcccttgcgggcgtggaagctcatgccgttggtcactacacggccttcctcgctggccgatgccaccacctgcccgccggggcacatgcagaaggtgtaaacgcaccgctcccccacatgctgggagagctgatactcgccccgcggcagagccggatgcccggcagcctcgtgatataagctcttttcgatctcactctgcagatgctcggcgcggaagcccacactgaacggcttgcattccagctgcaggccgccgtccatcagcatcccgaaggtatcgcgggccgagtggcccaccgcgagcaccaaagcttcgcaggcaaaggtgccatttgtggtaaaaatgccggtgagccgactatttttctgttcaaagccggtcagggccgtgttgaaatgcacctcaccgcccagagcttcgatctccttgcggatagaggtgatcacacctcgcagcaggtcggtgcccacgtggggcttctgcttccaggcgatctcctccggcgcaccgtgctgtaggaacacctcggtaacaaagccgcacagctcatcgccgatgcgggtggtcagcttgccgtccgagaaagtaccggcaccgccctcgccaaattgaatgttcgcattcacatccagttcgccggtagcagaaaaatgttccaccgcctttacgcgctcgtccagcgccgggccgcgctccagcacaatgggctgatagccctgccgggccagcagcagcgctgcaaacaggcccgccgggccaaggccgcacaccacaggccgatgtgccagtggctggatgccattctgcaccgaaaaatccaccttctgctgcagagaagcatcaccacagcgggctgcaaaagccgcttcctcggcaggttctttcagggtgacagccacggtatacaccagcttgggctggccgtggcgggcatccaccgagagctttgccacgcccagatgctgcacctttccgcgcgggatgcgggcggcgtgcagggctttttcaaatgcctgcggctctccggcagagagcggcagacggatgttgcgaaccagaatcatgttattgtgtgttcctttttgtttcagttgctttcgatgcggcactgcagcacatagctgcccagtgcaaagatcttgccgttggagggcacatacaggcggcaggcgatgttctgctcgcccgttgccaccgagaaatcctcggcatcgatctcaatgaccacctgctccggggtcaacgtttcgatcgcgcccttggggccgcagagcgttacattcatcaggcgttcggtctgcaccgtcagctggtaggtagagggcaggttgaccacctgcacgcaggtattgggcaggttcatggtcttggttcccagattggagcagtcaaagctgaccgtaatggtggaaatgttatccagcagatagatgtctgcgggcaggtcgatgggcagctcatagctcttgttcagtgtaaaggtggaaaggtcgatattgccgatgggcagcgtggacagcatatcgatcttatctgccggacctgccaccttgagctgcttgcggctgagtgcatataccagcatcgaatcatcaaaatcacgcggtgcattgatgaaattcacgtccaccggcagcgttgccatcttgtacacctgcaaggtcacatccacgctgttctcttccagctccgtgtactcaaacttgacttccttgccgccggaggtatagaagcgcagcggcgtgttcagcgtgatggactcggtcagttcgccgctgtaggtcacctctgcagtgcaggtagcaactttattcagctcactgctggggccggaaagggtgatattctccttggaaacatccgtactataaaggatataaccgtccgcgatggtcaggtagttggtggtaatggtaacgggcagggtcttttcctccaccacgtcaaacaccacatccaccgtgttgtcattgccttccatggtcacagtcacaccgttcagcaggccgttggcaccgcgtaccagcaggcgcagggtcttttcgccgctgtcacgtacgctggaaaaatccgggtagaccacaaaatcagaagccgtcagcccgccgatggtgtagccgtcgccggagattttcaggttcacggtcttatcctcggcgctgacgatgctcaggccccgggaggtgtaagcagcggaatcgtaggtataatccaccggcacattgtagatggtgttgctggtgccgggctgcacgatgatggtgaccaccatccatgcaacgatggcacccagcaccgaaagtgccagccggatgcggcggtcgtccagaatgtttttcttatgggcgaccgcaggctttgcgccatttttcttgttgggttcgttgttcattgcgcatcgtcctccttctggctgacccatttccacagacggtccagctgaccgcgccagccgctgaccgtcgtcttttcggtggtggtctccttagggatcatctcatccaccagacgggtatacagggtctgccggtcaaagtggcggatcagcacgccgttctttgccatggagatgatgccggtctcctcgctgaccacgatggcgatggcgtcggaattttcggcaatgccaaggcaggcgcggtgacgggtgcccatatccttgccaagatccagattgttggaaagcggcagcacacagcccgcggctttgatgcggccattctcaatgatggcagcaccatcgtgcaggggcgtgccctcgtagaaaatggtgcccagcacttccagattgaccgcactgttcaccggcgtgccggtgcgcacgatctccgaaaggtttgtgtggcgttccagcacgatcagtgcaccggtcttggtctcagaaaagcgctctgccgcatcgcagatggcaatgatggcgctgcgccatgcacccttcaggctgggatcgttgtagcggcctttgacattgaacagcttggcggcccactggtcggtctggcccatgcgctccagcgcacggcggatctccggctggaacagcaccaccagcgtcagcaggcccacctgcagcagtgagttcagcagccatgtgacggtacgcatgttcagcgtttctgccaccagatagacggccatcaccagcagcgcacccttgaacagctggccggcgcgggtgcggttgacaatgcccagcagctggtaaatcaggaaggaaatgatgatgatatccagcaaatcgaccagtttgaaggtctggaaatttgcaatgatcgcgttcagagtcattggtacacgctcccgtttacagtgtttcgatcagggcaacagcgtgggcggcaatgcccagcccctcaccggtaaagcccagatgttcctcggtggtggcctttacactcacggcatccaccggcaggccgaaggcatcggccagattctggcgcatggccggaatgtacggcgcaagcttgggccgctgacacaacagcgtcgcgtcgatattttcaatgcggaagccgtgctcctttaaaatttcggccacacggcgggccagcttcaggctgtcggcaccggagtaggccgggtcattgtccgggaaatgctggccgatatcccccagcgcagcggcacccagcacagcatccatcaccgcatgggccagcacatctgcatccgagtggcccagcaggcctttttcaaaaggcacttccacgccgcccaggatcaacttgcggccttccaccagacggtgcacgtcataaccatgtccaatgcgcattttgtgttcctctttctgttccgggcggggcaagtcctcgcgggtcgtgatcttataattggcgtaatcgccctgcgtcagctgcacggcgcggccggtcagctcgaacaggctgcagtcgtcggtgacaaggcgggctttttcggcatccagctcttccagcgcagcaaggtactctgcgcggtcaaagcactgaggggtctgcaccgcatacagggtgctgcggtcgggcgttgtgtacacaaggcaggcatccggcacgatctttccgttgccgcgcgctgcagccttgatggtatcctttaccggtacggcaggtgcagctgcgccgcaccgggccgctgcttccagcgctgctgtgatgacggcctgactgacgaagggtcttgccgcgtcgtgcactgccacaagctcccctgctgccgccagcacgccgttttttgcgctctcggcgcgggtggtgccgcccgttacgatctgcacaggctttgtgcagtctgctgcctgctgctccacaaaggcgcggttcttaccggccaccagcacgatctccgtgacaagcgggtcctgttcaaacgcgcggatgctgcggtgcagcacggtctcgccgcccagatcaaagctgagcttgtcaaagcccatgcgtgtggaagaccccgccgccaccagtactgcggatactctcttttccaatttcttcacctgcccgattcctatagtaagccatattttattatagcgtataacttcccaaactgcaaccaatattctacagcaaaaatgcccctctgcacacagcagaggggcacaaacttgttcttgatggagtttacttcaggatcggctcgatggcagcagccagagcatccttctgtgcctgtgcttcagccaaatccttgcccagagtggtgaagtaggtcttgatcttcggctcagtgccggagggacgcaccacaacggtagcgccgttttccagactgtagatcagcacgtttgcagcgggcaggccggtctcctcgggcttcttgtagtcggtcaccttgaccaccttgtggccagccagctcggcgggcgggttatcacgcagcttctgcatgatggaagccatcttctccatgccggtcaggccggggaactcgaagctgtccaccttgttcaggtagcggccatactgtttatagatctcttccagacgctgcttgatggaggaaccgatgctgcggtagtaagcggccatttcgcagatcagcatggaaccgatgacggcatccttatcgcgtacataggggccggccagatagccgtagctctcctcgaagccaaagatgaagcggtccacctcaccggcagcttccagatttgcgatctggtcgccgatccacttgaagccggtcagcacgctgcgcatttccacgccgtagtgtgcggcaatggcatcggccagcggagtggacacgatggacttgacggccaccgggtttttgggcatggtgcccttctcgatgcggcctgcgcagatgtaatccagcagcagagcgcccatctcgttgccggataccagctcatagctgccatccgggcacttcatggcaatgcccacgcggtcggcatcggggtcggtggccagcatcagatcggcaccagtcttggttgccagctccagacccagcttcagagcctcgaaaatttcggggttcgggtaggagcaggtggtaaagtagccgttggggtactcctgctcgggcacgatggtgatatcggtgatgcccatatcgttcagcacatgagtgacaggcaccagaccggaaccattcagcgggctgtacaccagcttcaggccggcagtcttgcacaggcccgggcgcacctgacgggcctcaatggcatcatacagtgcctttttgcagtcatcgcccacaaagcggatcaggccctgctccacgccctcggcaaaggagatgtactttgcaccggtcagcacatccgtcttctggatctcatcgtacacgatggcagcagcatcatcggtcatctggcagccatccgggccgtaggccttgtagccgttgtacttggccgggttgtgagaagccgtgaccatgataccagcattgcactggtagtaacgggtagcaaagctcagtgcaggcacaggcatcagagcatcgtaaatgcgcaccttgataccgtttgccgccagaacgcctgcggcggtcttggcaaagatatcgctcttcaggcggctgtcgtagctgatcgccacagtctggttgccaccctgagtcttgacccagtttgccagaccctgcgtggcctgacgcacaacatagatattcatacggttggtgccagcgcccagaacgccgcgcagaccagcggtgccaaacttcaaagccacagcaaagcggtccttgatttcgtcatcatttccctcgatcttggccagctccggcttcagatcagcgtcttccagctctgcagccatccagcgcttatattcatccaaatacatcttgcacaccttaccttttgtaaatttttccgcaaaaaagaacaggtttggttaaacctacttataatataaactctccgcgtccatgtgtcaattgcgtaatctgcaacaagatttgcagttcaaaaccagcatatggcacaaaaatccaagtttttcccggtaaagtcgggaaccatcccggcctcgcctgcattttccagcagttcataactctggcctgcatcgtccagaacgtccagccactgctccaaaccgacgctgttttcacacaggtagcgcagcagctgcattgcccgggcaaaactgtcctgcagcagcaccgcgctgcggcgtacccggccatcctgttcctgccgcagctccattacaacgccctgcgcagcggcggcgccgcaatatacaagggtgtgggcatgctgcagcccttccagttctgaatatgtacggatatagcggcagtattctttgctcatcatggaaaactctctcctctctatcgcattgacatctttcctgccctttactataatgaattcagaagtatttttgtgtcgaagtatgacataatcatccaatattttccacttttgccaattcttttccgtcatatcatccgctgggataagggagaacaacatgtattctgttaccagaagctttggtctgaacggcctgagcggctttgccgtggcagtggaggccgacatttccggcggtctgcccgccttttccatcgtgggcctgccggattccgctgtgcgtgaaagcgccgaccgtgtgcgcgccgccatcaaaaatctgggcttcaggttcccggaccggcgcattaccatcaatcttgccccggcggacgtgcgcaagaccggcccggtgtacgacctgccgcttctgctggcagtgctcactgccagcggccagctggaggatgtgcctgccgacgcggcatttctgggcgaactggcactggacggcaccctgcggccggtttccggcgtgctgcccatggcgctggctgcagcagaaaatggcacccacgccctgtatgtacctgccgagaatgccgccgaagcagccgaggcctgtgccgacagcatggccgtctaccccgcccacacagcacgcgaagttgtagatgccctgcgcggcatctccccgcttgccccggcggctgttgttccctttgaccctgcagacgcatgggcacaggtgccggattttgcggacgtgatgggccagtcgctggcgcggcgggctatggtcattgctgctgcaggcggacacaatgtcttgctcattggcgcacccggcaccggcaaatccatgctggcaaagcgtctgcccggcatcctgccgccgctcacccgtgaggaagccgtggagaccactaaaatttattccattgcagggcagctgccgcagggccggggcctgatctctgcacggcctttccgcagtccgcaccactcggccagtgccgcggctctggctggcggcggcgcacagttccggcccggcgagtgcagccttgccaactgcggtgtgctgtttttagacgaattgccggagttctcccgcgagagtctggaagtgctgcgccagccgctggaagacggccagatcaccgtgagccgagcggcaggcagtgccacctatcccagccgcttccagctggtagccgccatgaacccctgtaagtgcggctactacggccaccccacccggcagtgcacctgttcgcccagtgctgtgcggcagtaccgcagccgtgtgtccggcccgctgctggaccgcatcgacctgtgcgtggagatggaccccatcgcctttgacgagctgcacgccgtcgtcccttccgagagcagcgccgatctgcgcaaacaggtgcttaccgcccgggccattcaggcaaagcgctatgccgccccgggttttgagggtgtgctctgcaacgcccagctcaccgccgggcaggtgcggcgcgtctgccgcatgacccccgccgccgagcggctgctgcgtgcctcctacgacgctttgggcctttccgcccgcgcccatgaccgcatccttcgggtggcccgcacggtggccgatctggcaggcaaacagctgctggatgaggactgtgtgctggaagccctgcagtaccgggcacaggaaaaagtggaagtataagagcttctccgtctttgcttcgcagatccgccttccccgaaaagagaagggtttgtgcagcttaccgttacgcgcaaaaaagccatctgtatctttccaaatgctcaatacgagcagaagatcacagatggctttttataattgctttttagaatctgcgccatgtatccggcaggaacagcaccagcatcgggaagatctccagacggccggccagcatgtcaaagatcatcaccagctttgcggggttcgtaaagctgccaaagttcatcatggggcctacctgcgcaaggcccgggccgatgttgttcaaagtagctgcaatggctgtgaagttcgtcaccatatcaaagccatccagactgatgagcaggaaggataccacgaagatgaagaaatacgcgcccataaacacattggtggtgcggatggtctcgtggttgagcagcttgccgtccatgcggacgggggccaccacctgcgggtgcagtgcctgcttgagctccttgcccaaggtcttgcccagaatgaggaggcggctcaccttgatgccgccgccggtgctgcctgcgcaggcaccaatgaacatgagcaccaccagaatttctttggagagggtgggccacaagtcaaaatcgcagctggaaaagccagtggtcgtaatgatggaacccacctgaaaggctgcctgacgcaccgcttcgccaaagctgttataaaggctgtagatattggccgtgataatgccaattgccaccagaataatggcgaagtagccgcgcacttcctcgctgatggcgcggttgaatttgcgcagcaacagcaggaagtaggcattgaagttgacaccaaacaggatcatgaagatggttacgacccactggatgtagggagaaaagctggtaaagctgtcgttcttgaagccgaagccgccggtgcccgccgtaccgaaggccgtgagcatggactcaaacagcggcatgccgcccagcagcaggaataccacctccagcacggtgagtgcaaaatagatgctgtacaggatctttgcggtagactgcaccttgggcaccagcttatccacctgagggccggggctttctgccttcatcaggttgacgtgggagccgccggtcaggggcagcagcgagagcaggaacaccagaacgcccatgccgccgatccagtgggtgaagctgcgccagaacaggatgcccttgggcagatcctccaccccgggcaggatgctggcaccggtggtggtaaagccggacaccgtctcaaacagggcatccaccgggttcgggatgcagcccgccaccacaaacggaacggcgcccacgatggaaatgacgatccagctcagcgaggtagcagcaaagccctcccgcatatagaacatcttgcttttaggcttgatgccgcgcagggcgtagccgatggcggcgctgactgccgccgtgatcagaaacacgcccagcacgaaccattcgccgtagatccagctggccgctgcgggcagcagcagcagcgcaccctcgatcagcatgacatagcccagcagacggaaaacgatcgcataattcatagtctgcctccgtcaaccctctgcgcccttgtccagaatatcgcgcaggtcatgcagaccatgctccagcgtgaccacgatcacgttgtcgcccacctggatctggtcgccgccgcgcgggatcaggatctgatggccgcgggtgatgcagcacagcagcagattctttttcaggtgcagctggctcagggggacaccggtggcagcgctcttctcgtggacggtaaattccagcgcttccacgcggtcgtccagaatgcggtacagcgtcttgatgttgctgcccgcttcgttctgcagtgcacgcacatactgcacgatgtaatcgcaggtcatgtacttggggtagaccacgctgcccagatccagaccggccagaatatcatcgaactccagacggttgactttggtgaccagcttgcccttggagtgctttttggcaaacagagtcagcagcacattctcctcgtcgatgttggtcagggccacaaaagcctcggtggactccatgccctccgagagtaggaattcgcggttggagccgtcctcgttcaggatctgtgcgccgggcagctgctcggccagctccatgcagcgggcagggtcgcgctccacgatgcgcacacgcacgtggttttccagcagctcctggctcagatagaaggcgatggcaccgccgcccacgatgaaggcattgcgcaccgggcgcaccggcaggtggatgcgctggaagaactcgtgggccttatcctgtgttgcaaggaaggtgacctgatcgccgttctgcagtacaaagttaccgttcgggatgatcacgccgccgctgcgctccactgcacacaccagaatgtcgctcttcaggcgggtggggatctcgcggatggccacgccatccagcccctgctctgcagtgagtgcaaacttgatcagccgcacacggccgtctgcaaaggtgtcgatcttgcttgcacccgggaagcgcagcagatgggagatctcctttgctgcagccatttccggattgatgatggccgaaatgccgatctgctttttgataaagtccagctcatgactgtaggacgggttgcgcacacgggcaattgcatgacagtggcccgcctttttggcaaacatgcagcacagcaggtttagctcatccgaaccggtcacggcaatgaacacatccgcgtcttcaatgccggcctctgccagcgtggtgatcgaggaaccgttgcccacgatgcccagcacatcgtagctttcagtcaggtgctctacacgcgctttgttggtatccacaatggtcacattatggtcttcctcactgagctgccgcgccagcgcagtaccaaccttgccgccgcccaccagaatgatcttcataacaagtcctttctctttccgcgtcccttctgccgggacagcacaaatccatcatagtataccatatctcctgccaaagttccactgttttccacattatgcaacaaaaacctgccaaatgacgcaaaaaagccccgggagaaaccgtcccggaagcttttatttcatttaatagcgcgccacgccgtccttcgttacaagggcatacaccagcggggcttcctccggcttctcagggccgtatccaaggccgctgcggtactcggcggcggcagcttcaaacttatcggctgcgccgtagaaggtagccagactctcgcccttctttacgtagtcgccgcgctttttatgcagggtgatgccggcggcaaaatccagcgggtcgccctttttctgtcggcccgcacccagcagcacgctggcagagccgatcttctcggcatcgttcgccacaatgtaaccgtcttgctctgccagcagctcaaagcttgccgcgggctgctcaaacaggctgtaatcgtccagcacgcgggtatcgccgccctgcgccgcaaacatctccttgcacttagcaaaggcagagccatcggcgatcgccgtctcggccatggcgcggcactcggcaggagtgcccttatcggccagcaccagcatgttcgccgccagctgcaggcagacctcggtcaggtcggcggggccatggcccttgagcacatccatgctttccatgacttccagactgttgccaatgttatggcccagcggggtatccatatcggtgatcatggcagccactcggcggccgtgatgggtgccaatggataccatcagcttggccagctcaatgctctggtctactgttttcataaaagctccggtgccggtggtcacatccagcaggatggcatccgagccggaagccagtttcttggacatgatgctggatgcgatgagtgggatgcagctgacggttgcggtcacatcccgcagggcatacatttttttatctgcaatggcaatgccctcgctctggccgatgaccgacagaccgatcctgttcacctgcgcaaagaactcctcctgtgagagggcagttctggtgccgggcacgctctccatcttatcgatggtgccgccggtatggccaaggccccggccgctcatcttggcgatcttcacgccgcaggccgccacgatgggggcaatgaccagcgtggtcttgtcgcccacgccgccggtggagtgcttgtccaccttgatgcccggaatgggcgaaagatccaccatcacaccgctgtgagccatcacatcggtcagctctgcggtttcttcatcggtcatgccgcgcagatagacagccatcatccatgcagccatctggtaatcagtcacttctccgctgacatagccattgacgatctgctccagctcctcacggctgtgcgtaccgccatcacgcttttttgcaatcagatcataaacgcgcatcgtatcacgctcctcgttttttcaatagtacgacattataagatatagtatagcaaaattccaaacaaaagcaagtatcattctgtaaactttgcccaatttcaaaccaaaaagggcgcagccgcccggaaaagcagctgcgcccttgttttgggaacacaaatcgtcgttttagcgggatcccttgtcgtaggggatgccctctgccttgggtgccatgctgttcttggaggtaaacgcaagaatgatcatggacgccacgaacggcatcatgttgtagatgttgctggaccagtgcagctgtgccaggaaggtggagtctgcaatgtttgccagactcttgaacacagcaaagaacatggctgcgccaaagatgttgaagggcttccactggccaaagatcataacagccatggcaaggaagcctgcgccggccacgcccacctcaaagttccaggtctgcaccgggggcacaatgtaggccatgccgccgatcgcgcccagtgcaccggaaatgacaacaccggcatagcgcatcttgtagacattgatgcccacagagtccgctgcctgcggatgctcgccgcaggcacgcaggcgcaggccaaagcgggtcttgtacagcactacatagctgatgatcagcagaatgatgcccagcggcacaaaaatgctcagctccagcccgccgatgctgaacaggaagggcctgttggtgtagttcagctttgcactgccgctctcgctgaaattcttggcaaggaccaccgcgatggccgtggccagcaggttcagggccgtgccgccgatggtctgatctgccttcaggttgatggaggcaaaggccagcagcaggctatacaccataccggccagtgccgccaccagaacagagatcagcaccacgaggaagaccggcatttcggcaggcagcatggtcagggtgagaacacccgccacaccgccaatgaccatgatgccttccagtgcaatgttgatgatgccggagtgctcactgaacataccgcccagtgccaccagcatcagaacgatgccatacagcagcgtatatttgatcagaagcagcatatcacttgccctccttttcggttgcagattttgcaggagcagcaggctctgcgttcacattggttttatcggcattcttgaacagcagtgcgtggatcttgccgcggaacagcatggagaatgcacacaggtagatgatgataccgctgatcaggtccgagatctcagtggggtaatacttggtggaaaggaaggagccgcccaccgagatatgggaaatgaagattgccgagaaaatggtgccaatggggttggagcttgccagcagtgcaacggaaatgccgttgaagcccattgtcggcaggctggtggagttcagcgggttccactgggacacattggacagatagtacaggcccgcaccaaaaccggccagcgcaccggcaatggccatggagaggatgatgttcttcttctcgttgatgccggcgtagcgtgcagcgctcttgttcaggccgactgccttgagctcgtagccgaaggtggtcttgttcagcaccacccagatcagaactgccactgctgccgccaggaagatggcaatggtggtgctgttggtctggaacagcttgttcaggccgaaatccgggatgatggactgagcgtaatcggcgttcttgctgatgttgatggtacgggtgttgcgcacatcgtacatggggccggtgccgttctggtaaatgagctcattgaccagatacaggccgatccagttgaacatgatggaggtaatgacctcgttgatgttgaagtaggccttgaagaagccggggatcgcaccccagatgccgcccagaatggtggctgcgatcagacagacgaaccacggcagcttgagcatgatggcgcagtacagagcgccgtaagcgcccagcgtatactgacccgccgcaccgatgttgaacaggccggtcttgaaggcaaacgccacagacagaccggtcataatgaggggagccgcatttgccagctccttgccgacaccgtagggtgcgtcatggaagccgcccttcaggatgcgcacaaagccgtcgccccatgcgtgagccgggttgatggccagcagcaccagaaaaccaaccacaaggccgatcaggatgcacagcagagcagccagcacactggtgatggagctgttcagactgctgtgggaaagttttttcttgttcatgtgttatttgctctcctttccctgcttgcgtgcgcctgccatatacaggcccagctcctgcacggtggtggtcttggggtcaaattcgcccacgacctcgccctcgtacatcacaaggatgcggtcggacaggttcatcacctcgtccagctccagactgaccagcagcacggccgtacccttatcgcgctcggccacgatctgacggtggatgtattcaattgcaccaacgtccagaccgcgggttggctggactgccaccaagagcttcgggtccttatcgatctcacgggcaatgatggccttctgctggttgccgccggacatgctgcgcacggtggtcaggctgccctgaccgctgcgcacatcgtactgggcaatcagcttatcggaatattcgcgcaccttatcgctgcggataaagccgcccttctggaactcgggctgccagtagcgctgcagcaccatgttgttttccagactgtaatccagcacaaggccgtgcttgtggcggtcctccgggatatggctcatgccgtccttggagcgctgacggatggactcgttggtgatgtccttgccgtccagcgtgatcttgccgctgctgatcttttccagaccggtcaggccgtagacgaactcggtctgaccgttgccctcgatgcctgcaaggcagacgatctcgcccgcatgcacctgaaaagagacatcccggactgcatccttcttgtgttgggcgctgtgcatggtaacgttttccacatccagcaccacttcgccggggttagcaggctttttgtccacctgcagctgcacatcacggcccaccatcatgcgggaaagctcttccttggtggtgtccttgatgtccacggtgcccatatacttgcccttgcgcagaacagtgcagcggtctgccaccgccatgatctcgttgagcttgtgggtaatgaacaggatggacttgccttccttcttgaacccgcgcatgatctccatcagctcgtcgatctcctgcggggtcagcactgcggtaggctcgtcgaagatcaggatctcgttgtcgcggtacagcatcttcaggatctcaacgcgctgctgcataccaacagagatatcgctgatcagtgcatccgggtccacgcgcaggccgtacttttcgctcagggccatcacctttttgcgtgcctcggccttctgcaaaaagcccatcttgttgggttccacccccagaatgatgttgtccagcacgctgaagcattccaccagcttgaagtgctggtgcaccatgccgatgcccagtgcgtttgcatcattggggttgcggatgacaacctccttgccgtttttgcggatctgaccagcttccggctggtacaggccaaacagcacgctcatcagcgtacttttgccggcgccgttctcgcccagcagggcatgtacctcgcctttgcgcagctgcagggtgatatcgtcgtttgccttgattccagggaactccttggtaatgtggagcatttcgatcacaaaatcctctgccaatctgctcactctcctttcgtgtcgtttcgacaccgatacttctttaagttccattatacctgatttgcggcaatttgcacatgtcttttttgctttttggcagaaagcacagacaatagtattacttttgtactcttttcacgaagagtacgctgcatttttcccgcattacgccaatagaagacagaaaaaagcggggcaccccgctaacaggatgccccgctttgaaaagaactatcgatcgtccgcaggcaggcctgccggacaacagcttactggatgtagttgacagtggtgaactcgctgacggtgggcttggtagcgtcgtcggagctgttatcaacagtgatctcgccgctcttgatcttgcccttgacttcctcgtactcgtcggtggtaaaggactcgaagttccagctgtctgcatcggtgggcaggccgatataatcgccgtcctccagaccgaagttgccattggaacctgcgatgtcgccccagctgccggcatcgatatcagccagagcagtgttgacagcctcggacaggcccttcatagcagaggtaatgaacgggttatatgcgtaggtgccatctgcaacgccgtttgcaccgatgtagttctggtcaacgtcaacgccgatgacgtagccgttgttcttcagagcagcctcaacagcggaggtgtagatgccgccgccgcaggcaaagacgacctgagtgccgttggagtaccagccctccatacgggaggtgatgtttgcatcgccgtagaactggccgccgtagaagtagttgatctcgatgttctgacccagctcagcagcagcagcgtcagcgccctgcacgaagccgtagccgtaacggataacagcgggaacagccatgccgcccaggaagcccagcttggtcttgccgtcctttgcgatggcgtagcctgccagatagcctgcctgctcctccttgaaggtgatgcagtagcagttagcagggatagcgtcggtgccgatatcgccctgagtcacatcgatggcgatgaacttgacatcgggatactggtcagcagcccatgccagagaagcgccgtacaggtagccgacacagacgatcacatcagcgccgtcgttgacagcctgacggatcatggtctcgcggtcctcatcggaagcatcagcctcgggaatgtagtactggcagtcatcgcccatgtagccggaaacagcagtccagcatgcctggttgaagctctcatcatcgatcgtgccggtatcgcaggtcagagcgaccttgacgatcttctcaccgccctcagcagcagaggaagcagtagaagcagcagcggaagaagcggtgctggtagaagaagcggaagaaccgccgcaagcggtcagagcagcggcagcggcagcggcaccagccacagccaggaaattacgacgagaaatcatcataatcaaactctccttttatttttaataaaattgcgtcaaacaaataaaatgcgcagaactgcacatttactggctcaagtataacggcaagccgtgtcagatgcaagcgaattccgattacaaaatctttacaataattttgtaagtttttatcaaaagtagtatttatgcacaaatttgccgtagttccgtgcgttctctgtgctttggcacacaatgcacgtattgccgtcactttattgtcctgcagtgcacctctgcgtttttatcccgtcacttcacggcacggttgcccgccacattggaggggccaaaaccgaagggcagcagttcgtccatgctgcgctcgataaagtcttccggtgtctttgccatgataacgttcagttccggcccgccgaattcaaacagagcctggcggcacaccccgcagggagaagtgatctgctcgttcacctcgccgcggcggctgcccaccacagcaatgtcggtgaactcggtcacgccctcagccaccgccttgaacagagccgtgcgctctgcacagctggtgggggtaaaggcagcgttctccacgttgcagccggtaaaaatgcggccatccttggcgcgcagggcagcgcccaccataaaatcgctgtagggcacataggctttttcccgtgcagccagtgccatgcggatgagctccttcttttcttccagggtcaggtttgtcatatccgtcactccttttttggttttcaggggtcgaaaacagcgcggcaagcccttttgcaggcaaaccgcgctgaaatgcgtttttaacgcttagtattctgcacccagtgctaccttcatcatatcggtaaagctcttctggcgctgttctgccgtggtgatttccggcgaaacaaagctgtcggaaatggtcagcaggcaggcagcgttcttgcccagcacctgtgcattggcaaacagggcaaagctctccatctccacgcacaggcagccgcgctcgtcgcgcagcttttcccagtaggtgggctttgcatcggagggctgacggtagaacacatccgaagagtggatgtttccctcgatgagggggatgccctgctttgcggcagaagcgcgcagcttgtcgttcaggctctggctgggcagcgtgatgtccccttcaaagccgctctgcacacgggcatagttgctttcactcacagcaccggcggccagcaccacgtcaaacagcttggccttgtcggtatagctgccggcagagccgatgcggatgatgttctctacatcgtagaacttgaacagctcataggaataaatgccgatggaaggcatacccatgccgctgcccatcacgctgatgggccggccctcgtaggtgccggtaaagcccagcatcccgcgcacgccggtcacctgacggacatccttgaggaaggtgtccgcaatgaattttgcacgcagaggatcgcccggcatcaggacggtctttgcaaaatcgcctttttcagcactgatgtgaggggtagacataagatcatctctccttttctgttacataatacagcagatgggccttttccggagaaaaagccctctgcaaacttacctttacctatactttctgcggttgaacacattctgcggcgcgatgtagctgccgttgcggcggatctcaaagtggcagtggttgccgctggagcgtccggtgctgcccacatagccgatcagctggccctgcttgacggtctggccggagtgcaccgccagcgacagacagtgcgcatacaccgtggtgtagccgctgccgtggctgatgatgatggagtagccataacccgtaccggcaccggccttgttgtagccggccttggtcacggtgccgcccgccgatgcgtagatgggcgtaccggcagccgcacagatatccacacccttgtggctgccgccgtaccagcgcgagcagttccggtagccgggcaccggccagatgaactgaccgctgccggtgatgtagctggtgctgctggtcacctttttggtgcccttcacgatcttttccgtgacaggctcctgcaccacttccgtgctcaggatcttctgagaaagctggatgccatcggtgttataaacacgctgcgccgtgatctgacgcaggccgttcacaccgttctgcaccgttttcttggtacccaccgtgtactcgttggaggtggtggtctcggtggtatagggaatctcctcctgccaggtttccaccttggtgatgcgcacttccagcgtagcttcctgcttggtcacgatcagctcatcaccggcctgaatgttagatttctcgttcaggggcgcgcccttgaaattggtattcagttcgcacagctcacggaaggtgaggtcgtttttctgggcgatgctccatagcgtgtcgcctgcgcccactgtgtagatcttttcctgctgctgcacaccggaaagttccttttccacatccgcttcgtcctgaaagctgtcgttgaagtagatgccgttttccagcgtgacttccttgttgaagcccacggtcacgttggagttctcagggtcctcatagggttccagcaggctgctcaggtagctctgcaggctgacgccatcgctgcacactgcggtcagctcaccatccagatacagggccgtgccctcgctgatctcgtcgctggcgctcttcaggatcgcgtccgccatctcgttttcatccatggtcttgtgggccacggtaacggtgtaggtaggctccacggtccactttgcatggtcggtgtctgcgtagttgatacgctcctgcaccgcctcgcgggccgagttgaacacatcctcattggccacatagccgacggtctggccgttcacctgcacctccagcgcataaggctggcggacggtatggttgaacacggtcaccataacggccagtgcgcacaccggcagcacatacatggccatgcgcggcagtgttttcaggttgcggcgcacgccgctggccagataatgtacgctggctttgcaggctgcggcaaagcctttttctttccgcacccgttgggcgtgcaccagcagcgaaccgcagccccggaagaacagccagatcgggccgaacaggtcccggaacatctgcgctgcccccgggaacgccattgccgcagcatttgccagcagtgtcgtaaatgcctgccacagccacagccagccgctgcgcaggccgcgcccaacgcggacgaatccatactctgtagaatagcccagtgcatacagcgtctccccgatgactggcacggcagaattctgggcaagctttctgccaaaatcattcacatgattctgggttttacggcgcagccggtgccggtgcaaaagccccatgcattgcagctgtgcccaaagggagcgcagcctctggccgcgtttcggttttaccggtgaagcgggctgctgctcctttgtcttgtcttcgatcaaaaggtttttctccttccttgccgccaatgcacacacggtgccgggataagacggcggcggtcttgggcgcacatgccctttccagcaggctcatgcacacaacattcttattttattatacaccctgccgtctttgaaacaagcattgtcacaaaatttgggcggttctttcacttacttttcaccaaaaagctgtttcatatcctgcggcagcgggctttccgccgcagcagtcttccagttatttccattcgccgggcattccacccggattccgccctccaccagggtgtacaccggcacccggaagctctgccttgcgcagtgcagcgcctgccgcccaatgcgctcccggctcccgccgtaaaggtcatccccagccagcgggtggccgatggacgcaaaatgcacccggatctgatgggtgcggcccgttaccggcacacaggcggcaaggctcaggccgttttctgcctttaatatggtatactcggtgcggctgggcttgccgtccggggtcacgcagcggccaatgatgctctccgcctggcggccaatgggcgcgtcgatcacgcccggacccagcggcagctctccctccacaacggcatagtaaagtttttccacattccgggccagcagcggcgcagcataggcgtgctttgcagccagaacaaggccgctggtgtccttatcgatacggttcaccgggcggaacaccgggctgatgccctgctgcgcagcccatgccgcatacccgttggcaagggtatcgtaggggtagttcagggtggggtgcacggccagatgcggcggcttttccagcaccactgcaaaggcatcctcatagaccacgtttaccgggatctccggctgcggggccacgccttccccttccggcggcagctcaaagctgaccgtctgccccgggtacaccctgcggttggcaaggacaggctctccatccgcaaaaaagccgctgccccggaacttgactgcacgggcaaggtcggtagaaacggcacactggcgcagaaaattgcgcagaagcactccgttttgggtctgcggcgtatcgggcaccgtaaaaaacagccgcatatgcacccacctcctgcgcaaaaaaacataaaaatatataagatattatatcaaaaaaggcttctacttgcaaatcctgcttttttatggtatcatgaggagcggaaaacgagtggaacatacggcggcggggcggctttgaccgctctgaggaaagtccgggcctcacagagcacggtaactgctaacggcagccgagggtgaccttagggaaagtgcaacagaaaacaaaccgccgcagcaatgcggtaaggatgaaacggcgaggtaagagctcaccagcgcatgggtgaccatgcggctttgtaaaccctaccggaagcaacgcctatatgggacgtacagcgctgctcgcgtgtcccgaaggcggcacgaacctgtcagcaatggcaggtctagacagatcgtcgtttaatacagaacccggcttacggtctatctcgttttccatttttcagtctttgattcccgcacatttttgtgtgggattttttattttttgtcttgcccgctttctccatcgggcagtgcgagatggagagagcgcggctgttttgtttttgtcattgttcttttacttcccgtttgggtctgtttgtggtatactatgtgcactgcaggaaattgcagtcaactaagaaagacaggatgtgaaatcctccgatgaaagatggttttttgaaagcagccgccctttctcccgcactgcgggtggccgactgcgcctataatgtccggcagatcacggatgctttgcacaaagctgcagcccgcggcgtaaagctggccgtgttccccgagttctgcctgaccggctatacctgcggcgacctgtttctgcagcgcacgctgcagaccggtgcactggatgccctgagcactctgcttgatgaaacaaaagcactggacgttgtcacgctggtgggcctgccgctgctggtgcacggcaagctgtacaactgcgccgccgtgctatgccatggccgcattctgggtcttgtgcccaagacctatttgcccaactacggcgagttctacgaaaagcgccagttcaccccgggcagcaccgaggtggagctggtggaggtgtgtggtcagcaggtgccctttggcacctccctgctgttccgctgccgccagatgcccagctttgtgctgggcgtggagatctgcgaggatctgtggagcgccctgccgccttccaccttccacgcgctggccggtgcgaccgtgatcgcaaatctttccgccagcgatgagaccgtcggcaaggccgagtaccgccgggcgctggtgtccaaccagtctgcccgcctgctgtgcggctacctgtatgcttccgccgggcacggtgagagcacgcaggacatggtgttcgccggccacgacctgatcgccgagaacggcactattctggcggaaaacgctccctttgacggcggctgtgccgagaccgagatcgactgccagcgcatggaagccgagcgtgcccgcaacaccagttttgagctgagcggcgagggctaccagaccgtggagttcgatctggaaccggcagagaccacgctgacccgctggatcgaccccgcaccctttgtgcccggcgaccccaagcgccgagccgagcgctgtgagctgattctgaaaatgcaggccgacggccttgccaagcggctggaacacgcccacgcaaagaccgccgttatcggcatttccggcggcttggacagctgtcttgcgctgctggtggccgtgcgtgccatgaagcagctgggccgccccgcccgggatgtgctggctgtgaccatgccctgctttggcaccacgaagcgcacccgcagcaacgcagagatcctgtgcgatgagctgcaggtctcctttaaagagatcgatatcgccaacaccgtgcacagccattttgcagacatcggtcaggatgagagcgtgctggatgtcacctttgaaaacggtcaggcccgcgtgcgcacgctggagctgatggataccgccaaccgcaccggaggccttgtagtgggcaccggcgacctttcggagctggcgctgggctgggccacctacaacggcgaccacatgagcatgtacggtgtgaacgccggtgtgcccaaaacgctggtgcgccaccttgtgcgctacgaagccgacattgccgccaccgatgctctgcgcacggtgctgctggatattctggatacgcccgtctccccggagctgctgcctgccaaggacggcgagatcgcgcagaagaccgaggaccttgtggggccctacgagctgcacgatttctacctgtatcaggtgctgcgcttcggctttggcccggccaagatcttccggctggcaaagactgcattcgcaggccggccggagtacccggacagcgtgctgtacaagtggctgcgcaacttctactggcggttctttgcccaacagttcaagcgcagctgcctgcccgacggccccaaggtgggcagcgtgaccctttcgccccgcggcgactggcggatgcccagcgatgcctgtgccgcactgtggctggccgagctggaacaattacagatcaaggattaacgcatgaaaaacaaaaagctgcttgccaatcttctctttgccgtggtcattctggccattgccgctgtgctgctggtggtgcgccgcgtgcacgcttccggctccgggctgcgggccgagctgatctacggcgacaacaacaccaccatgaacctgccgctggacgtggatgagacctatgatgtggacaccggttactataccgtccacatccagatcaaggacggtgcagcccggttcgtggattcgccctgcccggatcacatctgtgaaggctttggctggctttccaacgaagatcagaccgccacctgccttccggcccgtgcagtgctgaccattgtacctgtttcctgacaaaaaggagtggttttgaatgatggatgaaaacgatcgttcccacgaagattaccgttctctgcggcacatcagccgcaaggaaggctctgaggatactgcacccatcgaggtagacagctcggcgtttttttccgagctgccgccggaacagcccagcacaccgcctccggcccagcctccccagaagccgccgcgcagcggccacaacacacccgtaccgcccaaggcccagccgcccgtggatggagccgtggcagtaccttccaagtgggggaaaattttgctgatcttacaaggtattttaagcattctggcactggtgcagctgtggcgcacccagatgctgccggtgctgtatctggtcattctggccgcgctgctggcgcttttgtggctgctggtaaagcgctgtcaggagtacaatgttcccggcaaggtggcccgggtattctcggtgttcctgtgcgctgccatggcgctgggctgcttctgggcccagcagggcctttctgccctgggcagcatgacctctggcctgctcaccggtgccgaggccaacaagatcaccaaggagccctttgtgatctacctcagcggcgtggacacccgcggcgagctgaccgaaaatgcccgcagcgacgtgaatatccttgctgccgtgaatcccgtcaccaagagggtggccctgatcaacaccccgcgcgactactacgtagaccttgccggcaccgacagcaaggataagctgactcacgccggtctgtacggcgtggaaaccagcatggccacactgggcaatctgtacggcgtcaatgtggaccattacatccgcatcaactttgcgggcttcatcagcatcatcgatgcgctgggcggcgtggatgtctactccgatcaggcgttcacttctgtgggcagccccggctactatgaccccaccacctttgtggagggctggaaccatctggacggcaaggccgctctggcctttgcccgtgagcgtcacgcctttgcatccggcgatatccaacgcggcatcaaccagatgaaggtgatcgatgccatgctgaacaagatcaagtcccctgccctgctgatgggcttttccaagatcatggatgccgcagccgactgcttcgtcaccagcttttcacaggatcagatcagtgcgctggtacggatgcagctgagcgactttgccgagtgggatattgaaagctataccgtcaccggcacaagctccagcagcaccaagtgctactctgccaagggacagaagctctacgtcatgaaaccggatgatgcttctgtgagcaaggccagggaaatgattgcgtccgtgctgggcggtgagggcaccgttgccgacaccacccagaagccggaaaagaccgaggtgttcacccccaccaccgacccgaacgctgccgtttcggaggtgcctgcggagagcgttcccgaggaagtgcccgccgacagcctgccggaagagaccgtcccggctgaccagcctgcagatacagagcagcctgccgacacccagccgcaggagccggaagctcccgccgagggcgagcccggcagcggtgatacggccggagaagcaccttccatctccctgcccacacaggaagaggtggaacaggctgcatcgtccatctacaatgcggcttcctccatctggggtgccattcaggatgctgcttcgcagcagaacgacgcggcctgacgatttgaaatctcctctgcgcaagctccggactctatcgcggaaatattttttatttgcaaaacaggaaacgactgcggtcatttcctgttttgctttttcaccagaaagtccgtgccgataaactgcataaaaatgccgcctgcatcttgaaccaatgcaggcggctttctcattctataaaatcattatgccttgatctcgttccagacgctcttgccgtccagagaggaagcatccacatcaagatactcgcagatggtctgggcgatggtgccaaagcacagacgggtgccaaggtcaacgccaggcttcacgcccttgccgcagatcaggtacggcacatactcgcgggtgtggtcggtggtcttggtataggacgggtcgcagccatggtcagcggtgatcatgaggagatcgccctcccgcattccggggatgaagtcggccacgaacttgtcaaactcggtggcagcggcggcatagcctgctacatcgcggcggtggccgtagagcatatcgaagtccaccagattcacaaaggcaaggccctcaaagtcgcgggtctgcagggccttggtaaaggcgatgccattggtgttgccagtggtcttgatcttttcggtcacaccctcaccgtcgaagatgtcaaagatcttacccacagcgatcacatccctgccagcatctttcagcagatccagcatggtggcgcggggcggcttcaggctcagatcgtggcggttggtggtgcggtagaaggtatccgcagtgtggcccaggaaggggcgtgcgatcacgcggcccacaccgtactcgcccttgagcatctcgcgggcgatctcgcagtagcggtacagctcatgcaccggcaccagctcttcgttggcggccacctgaaatacgctgtcggcactggtgtagacgataagggcgttttctttcatggcctgctcgccgtaatccttcagcacctgcgtgccggagtaaggcttgttgcacagcaccttgtggccggtcttttcctcaaactcgtggatcagctcatccgggaagccgttcgggaaggtgggcagcggcttggggctgacaacgcccgcgatctcccagtgaccaatggtggtatccttgcccatgctctgctcctgcaggcgggcaaaggagcagatgggcgctgcggtcttttcgcctgcggtcacgccatcaatgttgaacatgcccatcttttgcaggttggggcagttgaagttggggtgttttgcaatggcacccagggtgttggtgccctcgtcgccaaaggcggcggcatccggctctgcgccaatgccgaagctgtcgaggacgatcagaaaaacacgcttttccatatcgttttttctccatttcttccggggacctgccccggataagtgatactatctttacttatcattataagcaaatcctgtgccggatgcaagctttttcgccttcccgcaaatatccgtcattttcaccaaaatgttcgtcattttgttcacgaattgaccgggcgttttttcatttt

SEQ ID NO: 1205 - DNA, 834 bp, Unknown
  gut microbiota DNA sequence
acgatcacgtccttaccggtgccgtacttgattttgtggctcagcacaaaatcctgaaacgcgtcacccacgcagcggttgccgttgacagcaagggtgcgctgggtgccggtcttttcggtgacgttgccggtgcggatgtactgggcatcctcggtggtggcgttcagagagccggaatgctccttcacatggtcggcgcagacgatccactggctttccttggtctgggtgctctcgatctggaacgccagcacaaaatcgttcgccgtctcaatgccggtatacgacgcgctgggcgtgatgccggacttggtaatggcttcggatacagtcatatcaaaactcctttcattttggcatgtagtaggtcaggcgcatctgcagctgcatcttacagctgcccgcgctgtttgtgacgatgtagccgctgttcgtcacggcaatgccggtgggggttttattcccgccgcaggccgagaggtcgggcaggttgtgccgggcatcctgccgcatgacccactcggtgagctgctcgaaaaagccgctgttctgaatgttaacggaatccatctcgctgtactcaccgcgagacagaaagaggtaattcttcgccatttcccagccggagatgtactcggtgatgatgggatcaccggggctgtcctcgatggaaaaggcggtggattcttcttccagtccggcaatgcggaaagccgcgccggtggcttcctgctcgtcggcgatcagcgggcaggtcttgagccatgcccgcagggcggcaatggtgggctttacggtttcgctcatttgttccctcccagaaactgcttt

SEQ ID NO: 1206 - DNA, 471 bp, Unknown
  gut microbiota DNA sequence
gctatcgttccgaatacacatgaagcaatcatcccacaagaccgttgggagaacgtgcagcgaatcctttacagccgttccagtagttttatgtgcgataagaccgactacgacaatatcttcaaaggcatcgtccgctgtgcagactgcggcagaacgatgttagtcaaggttgagcacaggcgcaaacgtaacagtgttctggatcagaccttttattgttgcagcacttatcggaaatatggtgcgaaagcctgtgactctcacaacttggaagcccgtgttctgcatgaagctgtccttgcggacattcaggcacacgcaaaggccgctgtgagcaatcgggaagcccttgtgaagaagattgcaaatcagatgcacctccggatgtcctctgaccgggcgcagcacaaacgggatttgaagcagtgtaaagcacgaatcgcagaaatcgaagacctgtatgcaaaa

SEQ ID NO: 1207 - DNA, 2368 bp, Unknown
  gut microbiota DNA sequence
gggcctgccaaagttacctgcaagatgtatagaggggttagaccacaaccctcacatgataccttttgaagtagaaaaaggtgaccgctttcctgagcccagaaaacccattttgacgcatttgcgctgctttgaaaaatgagtgggttctcttttccatctgaaagtgcgctggggagaggatagcattttcaatgcaccggctggcgtaggtggaaaagcgtgcccgacggtcagagtcgaaagtatccaccgctttcatcaggccgatggtgacgatggaaataaggtcgtcctgatcgccgggcagggcgtagtatttttttacgatgtgtgccaccagacgcagattgtgccggatcagtttttcccgtgcggcagggtcaccggcacgcagtgcggaaaaggcttcggtttcctcccgggcagagaggggccgcggaaagctgccgctttccagatgaagcgccagaaccagaaactttgtggcaaaaaattgcagaagagataaaaacatgccgacccctccccatagtatcataaacggttactgtaatttatgaaggagggcttgccttttttccggactccgaggagaacaacgctgcttcgttgtccacaaaatacggatatggcagctttgcggagcaatgcgcctgttacccatatattttccccacgatctttccgcgtgctgcggcaggcaggagcttgcacaaaaggctcaggaatttatactgtgcaccggcaacataaacgactgccgggtcctttttctccacaataccggcgatgtaccgtccaatgcgtgccgggtccatgccgttttgctcgtcgtgctccatctggctgacgctccgggagatgcgtccaccgtattcatcatcgccgagaatgcttttttgacgtgcttttgtaaacccggtgcagatgtcacccagttctacgacggtaacatggatgccgtagggcttgacttcgtttgccagagcgtaagagtaagaagaaacggcggctttgcttgcagagtagaaggtctggaacggaatgtgcgctacggcagcaacagagctgatgttcacaatatgccccttcccttgatggcgcatgaaggggagaactgctttatttacagtgactgtcccgaaaaagttcacatcaaactgcgctttggcttgctccatggacgtaaactccaccgcaccggaaatgccaaagcctgcacagttgatcactgcatcaattttggtctctttttggatgacctgctgcacagcggcgttgaccgcatcttcatcggtcacatcgacagacagatgggtaacaccctccatagggatatttctgcggctgaactcatagacgatgcagccattctctttcagagcggatgccgtgcaccgtccgatgccggagcttccgccggtaacaataacgaccttgttgttttctcccgccatgattttcctcctgaaaatgttgatctggttcgagtataccgcatcgcaagatgactgtctatacggatagccggattgtgaaaaagcacagggatcaacttgcgcaaatttttacgcagattggcctctcttttttacacagccaatgccaattagcgcttgaaatcgaaatgctgcgcaagtatactatactagctatgctgtacaagcttgatcaaaaatcagtatgccagttgaccataaaagacataccagaattgaagtgcgcggcagaatcaaaaccctacgaggatgaaaatgaaatttgatagaaggcttacagatgaaatctacacttccgatacggtaaggctgggaaaaatgcgtttcaggccatgcgggagacgatctatcataatggtggtgtttcgtttcgcggtgcatcgggcgagatgattttgcatcgtttggatttaaagaaaatttttatctcgacaggatcagcatgcgattcaaaaaacaaaggagaggtgttttgctatgatttacaaaaagcaatacgggcaaccgtttgataccgaaagtgtagtgggttcttttttgcccatgatggaaacgataccctatctgaccaaggagccggatggtttctcctatgccatggaaccgcaggatgtcctgtatggtcttggcgaaaacgtccgtggtatcaacaagcgcgggtgggtgtacgaaagcaaatgctccgatgacggcaaccataccgagggcaaatcctcgctgtacggtgcttataattttatgatcgtgtccggcaaggatacatttggcgtttttatcgactacccgggcaaggtcacctttgactgcggctacaccgacctggataccttacgcatcacggtggccgaggaaaattacgatctcta

SEQ ID NO: 1208 - DNA, 1743 bp, Unknown
  gut microbiota DNA sequence
gcgaaaggacgaagcccggtgaggggcgtgggtgaggttgggtttattcacacatcgatccgtcagagtgttgttcatttgacctcctgctgcggtacggcgtggctgcgctcctccttgcggaagaaggtttccacgttctgttgtgcggtgcggagttcacgcagttcgatctgcgctttcttgtagcgggtgtagaaaccgtttttctccgaggaaagggtctggtattcggcatccagttttttgaggtccggcagagtccgaagcccattggccttgaaataggcgcaagcggcctcgtacacagcaaactctgcacggtgctgctccttgaacttggcgggattccgcacagtctggagcttctgtgcaagaggcttgtactgccgatagaccacaagatgcccgcgcagctccttgagggagaccatgcgggcatccatgtctttgaccaccgccagtgcatcgtcgtgctgggtttgcagttcggcaatgcgctggttcagggcatcttcactgagcagctttttctcctgcaggagacacaaggtctgcgaccagcgtttgaggttgaactttttcgcccaacgctcatagccgatgcccttgcctgcagcaacgttcgcctgaatgtcaaccagtttcctgatcttatccggtttcttctcgctgctgggctggatgatggcggcaagctggatgttctgggcgagggcggtcagcacctgctctttttccagcttcttgctcagtttcttggcggtgatgaactttgtccggccgggcgggcagtagctcaaccgacctcggctctctttcacggcgatgccgtgttcctgcatgagcaatgcagaaaattcctcgaaggtggtggtcttgttcagcacagcgtagatctgctttcgcagcttgtccagctcggtctggtagacggtctgggtgggctgctgcccttcggcggcaagtttggcgttggcatggtcgaggcggcgctgtccgcgccgctgcgcccaatactcgcgctccgaaacatggtcgccttgggcttccagcaggttgatctggttcagatcggcttgctcgcacatttccatgaccgcgacacggaggtgccggagcatggcagaggtgcagcggtgcttcttgcccgcttcccagtcgcacggcttgtccatgaagggctgccgttccacggtgcggacgcgcaagctgccgatgacgatgtggacgtgaatgttcccggcactgttgtgcccgtccgggtgggtacagacgatggcgggatgaccggggaaattgtccctgcagaactgcaagccaagggcttgcgcccgctccatggtcaggccgttctctactgcgtccttcgggtcgaagctcacaatataatggtgggtcttcacgtcctcccgcctgccgttcttgccgtacttgcgattggcaatcaggcaggccatagcgaacgaggattcgccgcactcaagggtgtcgagcaggtacgaatcccgcagcttgggtctgcccttctcgtccagaatgggcagaccagtgtactcgttgtgctgaaaggtgagatagctttcggcggcggcatagttagagtttttcgaggtcaaatgcttgatggttgccatacagttcaccaaccgtttcttcggctttcagccgaaagttcgtgagtgcggacagttcctccagaatttgcgcccggagctgctcggtgtctttgccgccggagtt

SEQ ID NO: 1209 - DNA, 1621 bp, Unknown
  gut microbiota DNA sequence
attatatttattcgtttatcatttttgaagctggtgcctttttcggcttctttgtggcagctctgttgaacgccgcccgtgctgggcaggaaatcactatcaaattcgaggaggaagataatggaacagaccgagaacaccttgtcggtgctgaaaattgcgccggggcagtatccgcagcaggtcgagatcgataacgacctgaaaacattgcagcaggctgtcggcggctccatcggcgcaagctacccttttgaagatccggttgccatcgtctataacgatgacggcaagctcatgggactgccgttgaaccgtgccttatgggacgaggacgggctgatgtacgatgttattgccggaacctttttggtggtaggtctgggtgaggaggattttgtatcgctctccccggagctggcgcagaagtatgaagaagaatttcatcaacccgaagcctttcttcctctggggcgtcgcctgatggtcattccggttccggatgaatcggttcagaatgacgcagagaaggccgtaaacaagcccccggtggaacatgaccgctaagacgattttctgcacaggaggtggtaacgatgcaggaagaaatcgagcataagacggtcaaccttgccatctcgaccacaaaactgtccgcccgcaccctgctgcgcgggatgcagtttctgttgcggcagtacgacaagcacgcttcgcagggcaagcagtccatgaagcggttggtacggcagaaccgtggcgtgaccaatgtggagattcagaaaaccggtatcaaggattttgaccgctatgccaagcggtatcacatcgactactccatccagaaagacctgtcctgcaagccgccccggtatctaatctacttcaaggcacaggacacggatgccttgaatgcagctttcaaggaatattcggcatcggtgctggataaaaccaagcgtccttccgtgctggcaaagctgcatgatctggcgcagtccgttgcaaatctgccagacaaagtgcggcacaagcaggaggagcgcggcctatgagcaaaaagaagctttccaagctgctggcgctctatctgccctatgtggtaattggcttgctagccactaatctgggcgaggcgtggcggctggccgtgggcaaggaactgggcgataaaatcgtatcgctgatgggaactatcccggcagcgtttgccaatccgctgcccagcctgcacccatttgacttgttcattggtctgtgctgcggcgctggaatgcggctggcggtgtacctgaaaggcaaaaacgccaagaagtaccgtcacggcatggagtacggctctgcccggtggggcggacccaaagatatcgagccgttcatggctccaaagttcgaggacaatatcatcctcaccaaaacagaacgcctgatgatgtcaaaccgcccgccggaccccaagaatgcccggaataaaaacgtgttggtggtgggcggttccggcagcggtaagacaaggttctttatcaagccgaatctgctgcaatgtgattccaagaattttccggtatcattcgtggttacagatccgaagggttataattattgaggataaagcaaagat

SEQ ID NO: 1210 - DNA, 1694 bp, Unknown
  gut microbiota DNA sequence
gttgctgcttgcgttcaacgccatcaggtaagtattttcggagattttttcttctgaaattccgtacttgttttcgatgttcacaatggactgccgcaaattggtacgtggcttgaactggatgaaatactgtgtttcaaaggattcttctacctgtgcggcaatctgagaaaatgtactgcggttcatcaccagcacaacagcatcatactggttcgcatcggaggtatcctcattgaaacctgcgacagtaagcgaaatgttctgtccatccgggagcgtcagcggaatcgctgtaccgaccgtgacatccagccaatcccggatgtttgctgtcacgagcacttcgccatccgccggggcagtgctacactgcattcccggaaagatttgaaggattgcatcatctgctcctaccagtgcggcacgtttatctccggcaaagtagttttccgtaagggaagcgttgatgtcgctatacgccgaaaatgcagcaacatcctcctgtgcggcaagctctgcggctgtttcaggggagatgtcctttaccatgatatgccagtttccgtttttgttcagctggtttgaggtttccatccgaatcgccatatctgccatactgaacaccgccgtgaccagaaacaccgcaaggacgatgcacaaaatcgtcatgcggctctgccgtctgcgtaccttggcagaaatcggaatcaggctcagatagcttttcatttctgtgttgctcattcccggcacctcccaaaatcggtcaggcagccgtccgatacctgcagcacccggtctgccgtctgtgcaatgctgcggttgtgggtgatcatcaggatggtctgctcgtatttccgggatgtttcttttagcagggcaatgacctcgctggtgttctgggtgtccagattgccggtcggctcatccgccaaaatcagggaagggcgggtcatcagggcgcggccaatggctacccgttgctgctgcccaccggaaagctggcttggcagatgcttccgacggtctttcagattcagcacggtcagcagttcttccagatatgccctgtccggcttttggtagtccagcagcaccgggaacaggatgttctgttctacggtcagttccgggatgaggttgaatgcctgaaagataaaaccgatattgcggcggcggaagatcgtcagctcccggtctttcatggcaaaaacatccttgccatcaatcagcaccttgccggaagtcggcgtatccagtccgccgatcaggttgagcagggtgcttttgccggagccggattcgccaacgaccgccacatattcgcctttcggcactgaaaagctaacatctttcagcgcatggacagcggtttctccgctgccgtaggtcttgcagagatggttgacttctaatagttccatagtgtatccctcactttgcaggttccttcgattcagacggatcttctctgtctgtgcagaaaaggataacacgtcaaccttactgcaagcctacactcagcctacaattttgtaggaatcggaaaattcagagtaaaggtcgtgccctttcccagctcgctgtctacttcaatggtgccgtgatgggcttccacaacggcttttgccagcggcagacccagcccgatgccctgtgtatcctgtgaaaagcggctgcgataaaaccgt

SEQ ID NO: 1211 - DNA, 648 bp, Unknown
  gut microbiota DNA sequence
tgtcagctcccggtctttcatggcaaaaacatccttgccatcaatcagcaccttgccggaagtcggcgtatccagtccgccaatcaggttgagcagggtgcttttgccagagccggattcgccaacgaccgccacatattcgcctttcggcactgaaaagctgacatctttcagcgcatggacagcggtttctccgctgccgtaggtcttgcagagatgattgacttctaatagttccatagtgtatccctcactttgcaggttccttcgattcagacggattatctctgtctgtgcagaaaaggataacacgtcaaccttactgcaagcctacactcagcctacaattttgtaggaatcggaaaattcagagtaaaggtcgtgccctttcccagctcactgtctacttcaatggtgccgtgatgggcttccacaacggcttttgccagcggcagacccagcccgatgccctgtgtatcctgtgaaaagcggctgcgataaaaccgtttgaagatatggtacaaatcttccgggtggataccgctgccgttgtcgcgcactttgatctgaaccatggacggcagtgcattccactctacctgaatcgtatctccgctctttgtgtggtcaagggcattctttacaaga

SEQ ID NO: 1212 - DNA, 427 bp, Unknown
  gut microbiota DNA sequence
gccgctgccgttgtcgcgcactttgatctgaaccatggacggcagtgcattccactctacctgaatcgtatctccgctctttgtgtggtcaagggcattctttacaagattgtccacagcttcctgcatccagtcacggtcgcaccaaagtgtaaccgcctctgagccggacagaacaagctttttctgttcctgctctgcacgatagttatactgccgcgcgatgtcctgcaccatttcagcaacattttcgtttttcttttccaagacgaccgaaccggcatccagccgggtgattttgagcagattctgcaccagtgtttcgatgcggtccaactcctgttcggacaggtctgcaaactctttgacctccgacggcgaaacaacttcgtcctgaagcagaccgttgtagatattcaacgccgcc

SEQ ID NO: 1213 - DNA, 1392 bp, Unknown
  gut microbiota DNA sequence
acctctgagccggacagaacaagctttttctgttcctgctctgcacgatagtgatactgccgcgcgatgtcctgcaccatttcagcaacattttcgtttttcttctccaagacgaccgaaccggcatccagccgggtgattttgagcagattctgcaccagcgtttcgatgcggtccaactcctgttcggacaggtctgcaaactctttgacctccgacggcgaaacaacttcgtcctgaagcagaccgttgtagatattcaacgccgccagcggtgttttgagctggtgcgaaatatctgcaatggtatttttcaaaaaacgcttctcccgttgctcgttgtctgcgtgtgcgctcagaactgccgccaatgcattaacggagtgaaacagacggtaaaattctccctcccggtcgcagtccagtcgtgcatccgggttaccatccagacagctttggatttgctggactgcctgttccagaagcgcactctgcctttgaaaatagcgaaaaagcacgccccagaggcagccgcctagcagcagaaaaagcaacagtaaaccgaaagaaaacacatgcgttgtatgccatacgatgccctgcgtgagagccaatgccactgcccagaccgccagcacggcttggaataaattccggatctcccggtttgcgaatactttcatacggcacctttacccattccatttatagcccatcccgcggacagtcagcagcatctgcggtttgccggggtcgtcctcaatcttcatccgcagccgccggatgtacactgttaaggcactgctgtcaatgtaatccccatcgcagtcccacagtgcatccagaatttgttccttggatagcacggcattcggatgctgcataaagaagcagagcagcttgtactctgcgccggtcagttccagcaagattccgtttttgtacgcctgcccctgcaacagccggacggtgatgctgcccgattccagtacgggttctcctgcgctggacgcatttgcacggcgaagcagtgcattgacccgcgacaacaggacacccagcttgaacggcttggtcaggtaatcatccccgcccagttccagccccatgatgatattcatttcctcatccgaagcggtcaggaacagaatcggcacgttggatgtgcgccgcaccttctggcagaaatcgaagccagagccatccggcagggaaacatccagcaccagcaggtcatattttctgtctgaccacagcacctcggcttctgccagcgtccgggctgtatccagtgcaaagccctgtttcttgaatgcaaaggtcagcccactgatcaggctcagatcatcttccaaaaggaacagttttctcatgattccctctcttttctgc

SEQ ID NO: 1214 - DNA, 344 bp, Unknown
  gut microbiota DNA sequence
attgggatgtagattacgaatatgtcggatatgataagagctgggatgatatgcagcagatgcttgaagatggcgagattgatatggtaacatctccccgcaaaacaccggaaagagaagaaaagtttgatttttcacgtccgatcggaaccaataatgggattctgaccgtccgcagtgacaacagcacgattgtggatggcaattacagtacttacaacggtatgcgtgtggcgtttttgaatggaagctccgagataaagagttttgcggattttgcaggcaacaaaggatttacatatgatccattttattttgatacgacagcagagatggaggaagct

SEQ ID NO: 1215 - DNA, 528 bp, Unknown
  gut microbiota DNA sequence
ctgattcagccacttcttcaattcttcttttagtgcagaggtcatgaagatggtgcggcaggaggatgcggttttggtgcttttcaggatgagggaagtggtgctgcgctccagcttgtccgggaataccttgatgatgcagccatcgtccacttggttcagggcttcttttcgcacccgctgcatggatttgttgatacggaaggttccgataccatctgctgcgtcaaaatcaagatcttctggggtcagaccaacgatctcgccttctcgcagcgcgcccaccagtgtgagatggactgccagatgcaggatggggtcctccatgctgtccagagccgcccgcatttcctctaccgtccagatggtgcgctcctgcgtggacttcttggggctgtccacaggaacaggacttttgataagaatgccccattccacggcgtactggaacgctgtgcccagcagccgatgcacctcatggatcgtcgtgccggaaaggaatcgctgcttctgcttttcggtcaattc

SEQ ID NO: 1216 - DNA, 860 bp, Unknown
  gut microbiota DNA sequence
cttaatggcggcgttggcagcggcctcgaccggggtgaaagcgtccttcttgacgaaagtcttcttgatctctgcggtcaggttgcggatggtggtcttggtagaaatctgcttagacataatagtgtcctcctaaaattatttcagcatatcaacgatttcctgctgcgtttcttcctcgttcagcaggtcttcgctcgtcataacggtttctttgcggacagtcagcgcgtttgcgctgtcaaagtcaaggccttcgccaatgcggacggcaatagcgccgctcgcgtcacgcttcaagccctgaccgatgcttacgctaccggcttcacccgaaccacctcctttcccgaacagggttacggtcgcctgaatgtctgctttcgggatgcgctgagaaaagaatctgatgaaaccatcatgcgtttcgcacccgttcaggacacccgctttggtcgtagtatagaaactgccgggagatacaacgccaacgggtacaagctcactggtgctgtccgacagttctgcatcatagatacactggtagtaatccataccaccggcattttcgtaatcatcctcgctgcgggcgggcttccacccgtccgctgcaagagtgagttcgtaggagccatagtagccgccgcccgtaccgccgtccacctgctccttgataagggccttgacctgttcttcgttcaggatttccccggattcagacaggttcttcacggcagcgctgaccgctgccgtgatggtcgctgcatgggcatcagcggctgcgttgtgcttctcaatttccgccttgaccagcttcatcaacgtctgcacctgagggtcaacggtgatggacaagttgg

SEQ ID NO: 1217 - DNA, 1600 bp, Unknown
  gut microbiota DNA sequence
agtttgccgtactcgttccagcagggtttggggcaggcacgccccaacaagaagctgtcccaaggggcagaaaattttcaagaattgaaaatttgtggccacgggacgattcttgctctcacctttttcgctgcgtttcgcaattttcacatttcaatctgttcgcagattgttgacaagctgcgcttgccccgatactataaaggcaacccgaacacgctgccaaggaggtgcaactatgaccgccgtgatctacgcccgctattcatctgacagccagcgagaagcgtccattgaaggacaactgcgcgactgcaaggactacgccgagaagaacggtatcaccgtggtcggcacctatatcgaccgtgcctactctgccaaaacggatgaccgcccggacttccagaggatgataaaggacagcgcgaagaaaatcttcgatatggttctggtctggaagctcgaccgctttgcccggaatcggttcgatgccgtgaactacaagtaccagctggaaaagaacggtgtccatctggtgtctgccatggagcccatctcgcaggggcctgaaggcattatggtggagagtatgctgattggcatggcggaatactattccgccgaactcgccctgaaagtggcgcgcggtgagcgcgaaaacgccctccagtgcaagtacaacggcggtgtggtgccgctgggcttcacaattggcaaggaggacaggctgtaccatatcgacccggagacggctcccatcgtgcaggaaatcttcagccggtatgccgacggcgaaccggctgagaagatcgcagcatccctgaacgagcgcggtctgcgtacccgcaccgggaagccgttcgtgaagaacagcttcttccagatcttccggaaccgccgctacataggcgagtatcgctataaagacatcgtgacaccgggcggcattcccgccatcgtggacgaggatttgttcaaccgggtacagcagcgttttgagcagaacaagatcgcccacggtcggcctgcaaaagaggatgtgagctatctgctgaccaccaagctgttctgtggcaagtgcggcaccctgatgggtggcgaaagcggcaccagccacatgggaaacacctactattactacaagtgcggcaacgccaaacgccacggcaaggcgcactgcgacctgaaagccatccgcaaggagcctctggagcggttcgtggtggacactgccattaaggtgattttcagcgatgaaatcatcgaacagctgatagatttggtcatggaagcccagcagaaggagaacacccggctgcctgtcctgaaagaccagctcagggacacagagaagcggctggcaaaccttctggaagccattgaacagggcatcctgaccccgaccaccaagcagcggttggacgaactggaagcccggaaggaagccctgaacaccagcattctggaagaagagctgaaaaagccagtcctgacccgcgaatggatgcggttctggtttgaaaaattccgcaagggtgacatgagggacatggaacaccagcggcagatcattgatacctttgtcaactcggtctac

SEQ ID NO: 1218 - DNA, 1993 bp, Unknown
  gut microbiota DNA sequence
tttcctgtcaagagggctggcatcgtccagccctctctctttttgccaaagtttccctcgctttttcttacaagctgccgaaagtaacgtattctcaaaactttttgttgacacagctcgatttttgtggtaatctatctcaacaattgaatataacatatttttacatattcgttctggccctgcggggctgaacatcttggctttcagccgttacataaccgactagcatgaccttccagaaaaagcgaaggcagggctggtctgttttgtgacggcttttttgttgccgttttgcctgttgaaccttgaaaaccgcatgaccgtctgcatgggatacccggcgatgacccccaagtgggagagccggaaaacgccgccggaagggggcaggaaagccatgcagggagaacggcaggacgttgatttctcagttgcggagtaaaacgatgtggtcaaagtgaccacatcgttttactccgcaacgccaatgaaaggatggaatgcctatgagcaattttacccctgcatggttcaagaaaggttttttcaacgaatccctgttctgtgacgattttctgagtacccaccagctgctttactcgaatggcgcatttttcaccccggatggccgcatgaccgataccatgcccctgcgctgcgagattttcgagatgatgcgtgaatatgtcggggcaaaccttgccaagaaggtcaccaatgtggtggatgtgctgaaactggcggcacaggtggaggactttccacctgtcaccgaccgcattgcgctggcaaacggaaccctgtatctggacggcacctttcaggagggcaagccggagatcgtccgcaaccggctcccggtcaaatatgacccgaaagctgcacagcccacccattggctgcggttcctgtccgacctgctctacccggaggacgttcccacggtgcaggagttcatcggctactgcctgatccccagcaacaagggtcagcgcatgatggtcatcaagggcagcggcggtgagggcaagtcgcagatcggcgtggtgctgtcccggctgttcggctgcaacatgaaggatggcagcatcggcaagatctcggagaaccgctttgcccgtgccgacctcgaacacaccctgctctgcgtggacgatgatatgcggatggaagccctgcgccagaccaactatgtcaagtccatcgtgaccgcacaggggcagatggacttggagcgcaagggcaagcagagttatcagggttggatgtacgcccgcctgctggcgtttagcaatggcgatttgcaggcattgtatgaccgctcggacggtttctatcgccgtcagctcatcctgaccaccaaggacaagcccctgtctcgtgtggacgacccggacattgccgagaagatggcggcagaggtcgagggcatcctgctgtgggcatttgagggcttgcagcggctggtgaagaatggcttccagttcaccgagagtgaccgtgccaagcgcaaccgggaactggtgaagcgggacaacaacaatgtgttcgatttcctcgaatccgagggctacatccgcctgaaggcggatgcctgcaccagctcgaaagagctgtatgaggtctacaagatgtggtgcgaggagaacagcctgaatgcgatcaaggcacgagggttcagcgatgcgctgatcgccaaccagcgcaggtataatctggaatccaccaacaacatcgtcaactcgtccgggcggcgtgtccggggctttgtgggcatcgaagcccttgtgcagcccgacctcacccccaatagctggcgggcatgacccgcttttgatccccctatatggtgcgttttcggtctttcgctgcgtacgtgcgtacaaagaaagccgcctgttgcgtacgcacgtacgcagcaaaacgccaaagttctcctttataggggggtggcaaagtgtcaggttgacagtttgccaagagtggtaag

SEQ ID NO: 1219 - DNA, 896 bp, Unknown
  gut microbiota DNA sequence
cactcccatgataaacaggaaacaaagagcagcatctggttcttttgcacttttcatattgtaattcctgtatatccaaagaatcctctgcaacatatcgttctaatagttcatcgcttccggaaataatcatatcccatttgtccaaatcagaaatatcggtcatggttatctttggcgacagggaaacctcctgcatgacaatcatatcactggtaagtttatctttaatgctttggtaaacacgccgcaggtcgatcccattttggtctatcttatttataaagataattgtcggaatgtccattttctgaagcgcatggaataatatacgggtttgtgcctgtacgccgtcttttgccgaaatgactaaaacagctccgtcaaggacagataaagagcggtatgcttcggttaaaaaatccatatgaccgggagtgtccacgatattgattttataatcattccagcaaaaagaagtaaccgctgtctgaatggtaattccgcgctgccgttccaaaatcatagtgtctgttcttgtagttcctttatccacgtttccttgttccgcaatcgctccactggtgtacagcaggctttccgtcaatgttgtttttcctgcgtctacatgggcgagaattccaatattgattattttcatgtgattgtcctccttttacagccccaaaagggcataaaaatccccagcagtaaaatacttttaccactggggattataatttgcggacatacacatatacagcatacacctgtttgtgattgctgtttttcggatatgtcaaaattgataaggcaaaagtattcttaaattgggtacaaaaaaccaagcccccacaaaagggactatcataatcctttgttcccactatttgatt

SEQ ID NO: 1220 - DNA, 1230 bp, Unknown
  gut microbiota DNA sequence
gtttcgatgcggtccaactcctgttcggacaggtctgcaaactctttgacctccgacggcgaaacaacttcgtcctgaagcagaccgttgtagatattcaacgccgccagcggtgttttgagctggtgcgaaatatctgcaatggtatttttcaaaaaacgcttctcccgctgctcgttgtctgcgtgtgcgctcagaactgccgccaatgcattaacggagtgaaacagacggtaaaattctccctcccggtcgcagtccagtcgtgcatccgggttgccatccagacagctttggatttgctggactgcctgttccagaagcgcgctctgcctttggaaatagcgaaaaagcacgccccagagacagccgcccagaagcagaaaaaccaatagtaacccgaaagaaaatacatgcgtcgtatgccatacgatgccctgtgtgagagccaatgccaccgcccagaccgccagcactgtccgaaacaaaatccggatctcccggtttgcgaatactttcatacggcacctttacccattccatttatagcccatgccgcggacagtcagcagcatttgcggtttgccggggtcgtcctcaatcttcatccgcagccgccggatgtacactgttaaggcactgctgtcaatgtaatccccatcgcagtcccacagtgcatccagaatttgttccttggatagcacggcattcggatgctgcataaagaagcagagcagcttgtactctgcgccggtcagttccagcaagattccgtttttgtatgcctgcccctgcaacagccggacggtgatgctgcccgattccagtacgggttctcctgcgctggacgcatttgcacggcgaagcagtgcattgacccgcgataacaggacacccagcttgaacggcttggtcaggtaatcatccccgcccagttccagtcccatgatgatattcatttcctcatccgaagcagtcaggaacaaaatcggcacattggatgtgcgccgcaccttctggcagaaatcgaagccagagccatccggcagggaaacatccagcaccaataggtcatattttccgtctgaccacagcgtatcggcttctgccagcgtccgggcggtatccagtgcaaagccctgtttcttgaatgcaaaggtcagcccactgatcaggctcagatcatcttccaaaaggaacagttttctcatgattccctctcttttctgc

SEQ ID NO: 1221 - DNA, 1366 bp, Unknown
  gut microbiota DNA sequence
agttcaagttctccgacaccacctatcccggcgccaccgaccccaagctggacggcaagccggtcatggttctggccgtcaagggtgagaaccccgacagctgcacctactctttcctgaacatggctgctctggtcgatacctataaggccaaggccactggcaaggatgcatccaccaccgttaccatcgctggttatgaggtggatgtcaaggtcaatgtttccgctgctgccggcaacgccctggttctgaaggacgatggtctgtatgttcccacccctgagaaagtggacatctccggcaaggccgataaggccaccggtgccaccaccggcaactttgctgcgctggatggcgagggcaatctgaccgacagcggcaagaagcctgcggacttcgtgggcgccgaggctggcaagcgcctgatgagcgatgccgagggcgaaaagctggccggtgtctctgagggcgcaaccaagactgccgccagttccaccaacggcaatgtgaacatcgacggcaaggaagtcgtcgtgtacaccgagccggagaatgttctgcacgacgatgacgtggaggacttctccgcagaggagatcgccgctctgctggctgactaagacatgaggaggtaagctctatggcaaaagcgaagatcaaaacgcttttgggcacagggcttgccgcgctttgcagccacatcaagcagtgcaacaccgcactcggagacctttccgaagcaactgcaaacggattcgaggaaactgatgacatcctgcacgaaaagcaggatgtcacggctgcggtgtcttttacgattccggtcgatggctggggcgaagatgattctttccccggctatttttattgtgacatccctattgcgggcctgttggctaccgacattgtggatgttacggtactgccggaattttacgatgtggcgggtgcggtgggctttattgcgaccgaaagcctcgaaggaaagctgcggctgagggccgccaaagctccgaccgagaaaatttctgcacagtatcacattacaagcaccgtgaaatacacggatgcacaggaagggggaacctaaatggcatacggttcttttaacgcaggccccggcaaggcgccggatgaagatgttgtccgcactgaccagatcggcattccgggcggcattgccacgctggatgcagacggccacctgaccgagagccagcggtgggaagtggacggctacaaaaaggccgagaccgaccagcgcatcagcgcggcggtggattcccacaacgaagcggccaacgcccacggcgacatccgcgccagcgtggcagccatgaaagccagcatcaaggccattgag

SEQ ID NO: 1222 - DNA, 965 bp, Unknown
  gut microbiota DNA sequence
catcctgaagcgcaccagccacatgaccgttgttctgaaagagaaagagtaaggagggaaaacaatgggccagaaagtaaatccgcacggcattcgtgtcggcgttattaaagactgggacagccgctggtttgcctccaagaaggatttcagcgataacctcgtcgaggaccacaagatccgcactgagctgaaggctcagctgaaggatgctggtgtgcccaagatcgagatcgagcgtactgtggacccgtccacttccgctcctcgcgtaactgtcaacatctactgcgctaagcccggcatggtcatcggcaagggcggcgaagagcgcgttgctctgcagaacaagctgaccaaggagtatggcaagactgtcatcgtcaacgtcatcgaggtcaagagcgctgctaccaacgctcagctggttgctgaggatatcgctcgtcagctggagaaccgcgtgaccttccgtcgtgccatgaagcagtgcatgcgcaatgccatgagcccccgcgatcgcgcaaccgttcccgcaaagggcatcaaggcaatgtgctccggccgtctgggcggcgctgatatcgctcgtaccgagagctatcacgagggcaccatccccctgcagaccctgcgtgctgacattgactacggctttgcagaggctgctaccacctacggccgcatcggcgtcaaggtgtgggtctacaagggcgaagtcctgaagagcgctaagaccgctcagaagaaggaaggaggcaacaagtaatgttactgcctaagcgtgttaagtaccgccgcgtccagcgcggccgcatgaccggcaaggctacccgcggcaacgtggtgtgccagggccagtacggccttgttgctctggagccggcatggatctcttccacccagatcgaggctgctcgtgttgccatgactcgttacatcaagcgtggcggcaaggtgtggat

SEQ ID NO: 1223 - DNA, 605 bp, Unknown
  gut microbiota DNA sequence
cttctgaggttattttatcgaaagaactgtcccataaatatctctttcaacatttcttgtcatctcattcttccccgatgcccagatacacatcaatgtccatgataccctccccgctgacctccaccagatcttcaaagggcaccacggtgtcgcccacctgcaaggtgcggaacaccgggtcgatgcggtctgcttttccggtcagggtgaggtagctgcccaccgccggaacctccgggtgggcggtatcctccttgaagtaccgcaccgtgatggtcatgcccttggtaacctgcatcagccgatcggacagagccgacatttcttcctcggtcaaaatgcgcttggtcacccgctcggtgcgctgcttttctgcggcaagctgctcgtcatagccccgcagcggagagaagggcgagaagattttggcacggttctgaagggtcatgcgggggtgcttgcggagggattcttcggtctgggggcgttccatctctaggatgtccccatacttttgggcggtctcccgcccgattttgctatttttgtagttttccatctgaacctcccgccgaatctcctgcactgtgcccgccgatttg

SEQ ID NO: 1224 - DNA, 1147 bp, Unknown
  gut microbiota DNA sequence
tccggctgagcggcaggctcaggcattgtcacacagcagctgccatgtttcctcggcaagggcttccagcgtttcgccgtccgcaaggcgctgggggtagtccttctggcgctggcgcaggctgtcgtacagggctttggccttggcgtggtaccccacgatgcccggttcggacaggggcgtgttctggatgcgcatctcgttgtaaacatcgtacagccgctgatagctctgctgctcaaagggatagtccgcaatggcatcaaaggcggcgctggacaccggcatgtagccggtatcggcggcaaattccagattgcgctgctgctcggtgagccagcgcaggaacacggcggcggcttcggccttctggtcggtggtcttgaaggcgcacaggcccacaccggcctgcggcatcaggggcgtggcggtgcctgcggcgtggggcaaaggagccagcagcaggtcggtgggctcggtggtgttgtccgggtaggtgacgaaatcattgtaatagaggatggccgcagagctgccaaggcccgccagcgtctcgccggtcatcacctgcgtgttggagtacaggtccgagatcagaatatcgccctgcaccagcgcccgggcaaactccatccacgaagcgcggaaggtctcgttggtcagatcgtaccagctgcccttgtacagctctccgctgccctgttccagcgcgttcagctccaccagacgcagggggtaatccagtgcacagaagggcttgccctgcgaccactgccggtaggcacccgccatttcaaaaaagccgtcccatgtggcaagggcggaaagctgcgccccggtgtctgccgcaaaacgggcgtactgggagccattcaaaaagatgagctgggtggatttggacaccgggaacaccacctgccgcccctcaatgatgccgtcctgcacaaagccgggcacataggccgccatgtcctcggcggtgaaccagtcgttccagtccacaaggttctcaatgcccagagcgctggcgtccgcggggtgggccgagaacaggtccggcaggtccagcgcgccgggcttgccggccttggcgtcctgcagctggccgccgatggcggcactgttggtcatgttggtcacgttgagc

SEQ ID NO: 1225 - DNA, 335 bp, Unknown
  gut microbiota DNA sequence
tctctaaggtggggctttctttgaatcgaccgcttggaattattgcagccaataaaggtctttcactcaatgattgcttttgggtagatgcagagggctccggtgacacctttgaaaaagtaaatctttacgataaccgattcagtcaggtgctggcagcaatcgcctttacaggatatggcagcagcatacgaacttcgcttgcgtcctgcccggagttctcgactaacgggatgctgccaaaatgctggcgcagacaaaacggaaaaatctatctttataaaggtggcacgtcagggttcagcaattttggatttgaaccgtactcggaactg

SEQ ID NO: 1226 - DNA, 525 bp, Unknown
  gut microbiota DNA sequence
agcgccgacaacatcgaacacctgacagaactgatcggacagatgaaaccgatgtaccgtgacccactgcgccttttggcaatgggctacaccaaccgggagattgccaaatcgcttggactgacggacgaagtggttcggatgcggcttttccgtggaagaaaactattatggaaggagttgaaccaccatgagtgaacggacagaagtttcttttgatgcagctttgatgatggcactccgtgcagatgcacagaaagaactggacgagctgcccactccggcacagcttaaggaacgctacccggacacttcccgatgggatgctcgcctgcaagcggcattgcataaacgccgccctatgctgaaacgggtgcttgctgcagccctgacgctggtaattttaactctcggtgcgcttgcagtaagcgcagacttccgcaagacagtctatacgatgattcagaagttcttaccaattgagatgcaagtcacttataaagttgagggagaaccattagagcg

SEQ ID NO: 1227 - DNA, 2117 bp, Unknown
  gut microbiota DNA sequence
atagaaaggagcaaccaatttgacttacgaagagaaaaaggcatggctctggcggtaccggacggccaagcggttcgagctgctcaaactggacgagctggccacgctgcagaccgatgccacccacaccacccagcgcttttcccctgtgccgggcggcagcggcgacggacaggctctgccccgcagtgtggaacgcatcgacgaggcccgccgggccgctgaggcgcagtctgccgtgtgcgacaccatccgggccgagatcatggaggtgttcagccagctggacgatgaggtggatttcatgatcctgttccggcggtacatcctgctggaggactggccggacatcgcggtcatcgtccgcatttcccgcagccagatgttccagcgccacagcgcggccatcaaaagactggagatcaaaagtccggactgaaccggagcgaaccggacttgataatactgtcaacccctgctaaaatttaaaatgccagagcccgcaggaaagacttactcccttcatccctgcgggctttgtgctgcccggctgacacagaggatcacctttcccgaccaacagcctgaatgcatcagccgggtttctttgttatatcctgccgttcggatcttccgggcggctttttgattttacggcaagagaggtggtgacgtggccaacgaagaaaatctcatcccgttcaatgaacgaacggagagcgaacagagacagatcgcccagaagggcggcattgcttccggtgcggcccgccgccgcaagcgcagcatgaaagaagccgccgactactatctcagcctgccggagaccgaccgccgccgggtgaatgccctgctgcgggatgaggtggacaatgaggatatcgacaatcagatgtcggtggtcatgggcattactgaagccgccaagcgcggtgatgcccgtgccgccggggtgctgctgaagatgctgggcgaggagaccgtgcaggaggacccggcagcggatgcactggaagctgcccgcaagctgctgggaggtgtggacagtgccattgactgagtttcagcaggagttccttcgcaattgctcccaccgctggaacgtcaagactggggccacccgctccggcaagacctatctggactgcgctgttaccatccccaagcgcatctgcgcggcccgggacgagggcctttgcgtcatgctgggcaacaccctcggcacgctggagcgcaacgtgctggagcccatgcggaccctctggggtccggagcttgtgggcgtggtgcgcacctcggcgtccggcaacatcgtgcagctgtttggccgcaaggtgtacgtgctgggtgccgacaacaaaaagcacattgcccgcattcagggcgcagccttcgagtacgcctatggggacgagatcaccacatgggacgaaggtgtatttcagatgttgaaaagccgtctgtcctgtccgcacagccattttgacggcacctgcaacccggataacccacagcactggttcaagcagtttctggacagcgacgcggacatctactgtcaggcctacaccatcgacgacaaccccactctgccgccggagttcgtggctcagctgaaaaaggagtacgcgggcacggtctactataaccgctttatcctcggccagtgggctgcagcgggcggtatcatctaccggccctttgcggacagcattgccgccggggatgggcgtttcctctggcctgcggacaagccctgccgcccgtggcgtatccacatcggggtggactttggcggcaacggctcccggcacgcattcgtggccaccggcatcctgccctactacgcgggggtcgtgggtctggcatccgcccgcatcgacccgaaggatcaggatgcagacttcctcgccgcgcagctcattgagttctgcaccgccgtgttcgcacggtacggcgagatccactatcttttctgcgacagcgccgaacagacgctgatcaaccacatccgcacccggctgcgggcctgcccgctttcctggctggccgaccgggtcaacaactccgccaagatccagatcatcgaccgaatccgcctgacgtccatcctgatg

SEQ ID NO: 1228 - DNA, 833 bp, Unknown
  gut microbiota DNA sequence
ctgccaccctgcgggactcccttgccgccgccctgtggagccagaagcaccccggcgtggatgaacgtctggacgatggaaccaccgacattgatacattggatgccttcgagtacaccattgaacgcgattacaggagactgactgcaagatgaacgttgccgcttttattgaatacctgaacaaaacaaagcatcttcacctcgatgcggactactacggcaacatcgaagtctggcggcagtggtggaagggcgatgtgcccgacatccacgaccagaaagaggatgccccggacggcagcgtcatttcgcggcgtctggcttccctgcggatgcctaagcacgtctgcgaggactgggcaaacctgctgctcaacgacaagaccactctccagatcggcgatgcatccacctctgcctatttgctgggcagcgatgaacagcagaccgggggccttttgcggcagcttcatttctgggagaacgcaaaccggctggtggagcaggcctactggtcgggcaccggcgcttttgtgatgagcgtggagaacctgacggtggatgcctccggcaacgctctgccttcgccgcaggggagcatccggctggactacgaccccgcctgctgcatcctgcccatcagcgtggagcgcggcgttgtgaccgaagcggcctttgtgtccgagtgcatgatgggcggaaagcctgccgtctacctgcagacccacacggtcaggaacggaaagcgcaccatcaccaacgaatggtttgaggtgacggacgatgtttccggcacaccgaagttctccaagctcaccgaggacaagaccc

SEQ ID NO: 1229 - DNA, 898 bp, Unknown
  gut microbiota DNA sequence
gggctgggcatgagcatcttttccgaagcgctggacgcggcacagatggtggactacgccttcgacaactatcggcaggacatccgcctcggcggcaagaagatcttctatgaccgctccctgtgcaaaaaatgggtggacaaggaaggcaaggaacacgccgtgccgccggatgccgtccaccgccagatcttctacgaactgcctgcgccggagggcagcatcgaccagcctgctgcatggcgggagtacaaccccgacctgcgcaccgcttccaaccatcaggcggtgcaggacgcgctggacatgatgagctttaagtgcaaactgggctgccaccgctataagttcgatcagggcaccgtgaccaccgccaccgagtacaccggcagccgtcaggatctggtgcagaacgccaacaagaaccagatccccatcgagacggcattgatcggcatcctgcgtgccatgctgtgggcggcgaagaacctgctgggtgcgccggtagacccggagtccagcatctcggtcaactgggacgacagctacatcgtcagcgagcaggaacgcacaaaccagctgcgggaggacgccattgcgggccttgtgccccgctgccggtatctcgctgcccggtacagcctgagcgaggacgaggcccaccagtggacggcagaggccaaggcggacagccacactgacgaagccctcaccttcgggggtgcctgatgctgccgccgagctatctcgaccagatgccggacgcctttgtgcagctctggcagcaggtcgaggacgcgatcttacaggacgttgcccggcgcatcggcaagatggacgccgtgacccccaccgctaactggcagctgtggcgctaccagcagaccgaagcggtgcg

SEQ ID NO: 1230 - DNA, 1790 bp, Unknown
  gut microbiota DNA sequence
acgtggtgaagctgctggcgaagtacaccggcaagagcgaaacggccatccgcaagctgcttttgcaggccgccaccgaagccatggagcgggaggatgcgatctattaccactacgacatggagccgcccccttttgaagagaacgccgccctgaacaacctgctggatgccggcgcgcggcagacctgcggcacatggcagaacctgaccgccaccacggcaaacaccgtcacaggggcctttgaacgcacactggacgctgcatggctcaaagtgggcaccggtgccttcgactacaaaaccgccgtcaaacaggccgtggacagccttgcagacgacatgcccatggtcacctatcccagcggccacaccgacagcatcgaggtggccgcacggcgtgccatcctgactggcgtgaaccagacgactggcaagctgcaggtggcccgcatggacgaaatgggctgcgaatttgtggagacgaccgcccacggcggtgcccgtccttctcatgcagaatggcagggacggcgcttccatcgcggtggtgcggtggactacaagggcaggcactacccggattttgaagccgcaaccggctacggcaccggcgcaggcctttgcggctggaactgccgacaccagttctttgcctgcttcccggagctgggcgacccgccccaatggacgcaggagcagctgcgggagctgaacgcccgggacatcgagtggaacggcaaaaagtacaccgcttacgagatatcccagatgcagcgcgcccgggagcggaacgtccgccgctggaaaaagcggtatctggccgaggacgccgccgggctggacaccactgacagcgctgtgcgcctgaaagccgcccgccagagcctgagtgatttcaccaaggccaccggcggcagagtggacagcgcccgtgtcagcgtgccgaagttcggcaggagtgaagccagtagggcaagtgcaaaatctcaggcgcatcacaccgactggctcaagtctatcaatgcgcagagtaccagcctgaataccgttgcaaaatattatgatgcacggtataataataccgaagaatatcggttgctgatgcaatatgccaacagcgtaaaaagtggctggctttcgccgcttgcaggttttgacctgtacaagagtacgcacgagcgcatccagaccgagcttgttggcaagactactgcggatggtactgttattaccggacataccgcccatttcatggagcgtatgttcggcacattggtcgaccccgataagttaaaatatgaccttaaaatcatccggcgaagcggtgttggctatgaagccatgcgtgataccgttttgaatcctgagcgcatcaaccctgtaaaaacggattcaagaggaaagcgaagcgtgcgccttattggcaaagcgatcgtcacgataaacccagacacgggacagctgattcagctgaatccaaggagtgagcagaaatgaccttttgttttgaagatttagatcctgattccaaggagtttttgaagaagcatgttcccagcgcggtaaactgcaaaagtctggatgaacttcttttggagcttgatgatttcatcacatcgacctttgacgagaatgacgagccgacagctctttctcgtgagggcgaagcagtgtacgacagaatctactgttgcacgccgtaattcataatatcaactaaaccacgatgcacacgcaccgtggttttcttttgcccatttttaagcactgtgcaaaatttgcccagtg

SEQ ID NO: 1231 - DNA, 2361 bp, Unknown
  gut microbiota DNA sequence
gtcggaagagcgccggtctccaaaaccggaagcggcaggttcgagtcctgcaaacggtgccatgcggcgggcggcgcgtaccccgcccacgaccgaatactgacagagaacagtgtaaaaaactgaggtctcacacacgaaaggagtttccaccatgaagcgtgaagacgtgaagaacaagatccccggcatcaccgatgaacagctgaactggatcatgcaggagaacggcgcagacatcaaccgggagaagtctgcagccaccgccctgcagacccagcttgacaacgcaaacgcccagctcaagaccgcacaggacggcctgaaagcctttgacggcgtggacgtggcaggcctgcaggagcaggtcaccaagctgaaggccgacatgaagacgcaggccgagggctttgcctttgataacgcgctggacgccgccatcctgggcaaaaagggccgcagcgtcaaggcagtgcgtgctttgctggatctggacgccctgaagggctctgccgaccgcggtaccgacattgcaaaggcactggacgatgccgcaaaggccaacccatgggcgttcggcgaggacggtgcagccggtgtggccgtggtctccaccggagccgagcacggtgcaccgcccgccaacgagagcgatggtgtggaagccgctttcaaatccctgaaccctgaactgaacctgtaacaacgaaaggagatttctatggcacatgcaagtcaggagcgttactccgctctggtggatgcaaagctgcgtgcgactctggtcacccgcgacaataccatcttcaacaaccgctacgagggcagccccaaggccggtaaggtcaagatccctgtccgcgacactgaggttgccgtcaaggcctacgacaaggcaaacggcgtggatgccgatgccggcaccaccacctatctggatctggacatcgacaacgacgaggccgtgaacgagatcatcgacggcttcgacgccgcttccgtgcccgacgacatcaccgccgagcgtctggacagcgcaggctactccatggctctgtccatcgacaaaaagtccatcgaggcgctgcagggcgcagcgggtgccaacatcagcgccaccaagaccgcctgcaccgtttccaccgcctacaaggaggctctggctgcaaagcgcaccctgagccgcaacggcgtgccgcaggccggccgctggatgatcgtcagccccgagtatctggagatcctcatgcaggacgaccgcttcatcaagcagggcgatttgtcccagcagctggtgcaggccggcgcggtgggccagatcgcaggctttgcggtgtacgagtccaacaacatggattttgagaacgccacccgcgtggccaccaaaaagaccaccaccgagttcatctgcggccatcccaactggtgccaccgcgtcatggagtggcagaccccggtgcacctgcaggatctgggcggctccggcaagtacatcggcgcatccgctgtgcaggggcgcaaggtgtacggcatcaaggtgtccaagcccaagaccctgtacatcaagcgcatcgaggcgtaaggccatgctctactgcacctatgaccagtatgcggcggcgggcggtacagtgccggaagccgccttcggggtgctgtgcagccgggcttcccgcatgatcgatgccgccacctttggccgggcggagagccacgccgccgggtgcgaggcctgccgggaagcgctggcggatgcctgcgggcagatcgtcggcctgctggccgctgcatctgcggcgggcgctgtgcctggtgctgccagcgtctcaaacgacggctacagcgtcacctttggcagcaatgccagtgtgaccgcagccacccggcaggaagcctatgagatcatccgcaccgcgctgggcagtgacccgcacggcctgctgtacagggggattctgtgatgcagacagctgttactgtggtgaacctcatacacgacaccgccaccgagacggacaggccggtgtgctgggtgttcccgttttgcagctggcgggaatgccgctccacctccggctccggcaccgccaagaacccggagcgcaccacccacatccgcatcccggccagcgtgtgcaccatgggctacctgccctatgcccagtgggcggcgctgtctgcagcggaaaagaccaagcactggaccctgaaacgcggctggaagctggtgcagggcgcggtgcctgccttgaccgaagccgagtatgccaaactcgaaaaaacgcacctatgctgcacggcagcggctgtctccgataaccgggagccgctgctgccccactggcacgtggaagggagctg

SEQ ID NO: 1232 - DNA, 536 bp, Unknown
  gut microbiota DNA sequence
cttgatcctatgaaaggacgtgatacatatggcaatcaagcagtacagtttgaagaatgatggtgcaaagcagctctctcccgcgttccgtgtgcgggaattccgctgccgcgacggcaccgacaccatcctcattgacgagggtcttgtggtgctgctgcagtgcatccgggagcacttcggcaagccggtgaccatcaccagcggctaccgcaccgccagccacaacaccaaggtgggcggctccagatccagccagcacctgctgggccgggccgctgacattcaggtgcaggacaccgacccactggctgtggccgcctacgccgaaagcctgatgcccggctggggcggcgtgggccgctacccggtcaagtcaggccgggcaaagggctgggtgcatgtagacacccgcccgaacaagagccggtggacactgtgaggggggtgacgttttgaaagattatttctgcatggcggtgggtgcgttgggcgctgcgtttgccagcctgtttggcgggtgggacgcagcgctg

SEQ ID NO: 1233 - DNA, 94967 bp, Unknown
  gut microbiota DNA sequence
ctgcaggctggatgccgtgatgggttccacctttgtgcgggatgccgttgtgatcggctttatctgcaacgagaccatttccatcatcgaaaacgcgggcttgatgggactgccaatcccggcagcgatcaccaaggccgtggacattttaaagcagcgctcggaaaccgagcagaaaggataagctcttatgaatgaattcctgaaagtcgctcttactgcctgcatccctgcaatgaccgtcattttcggctggggcctgaacaaaggtgtcagcattgcaaacggctacatcaacaacaagtttgcgcagacctgtctccagaatgccgccaacgcggtgttcaacgccgtccagtacgtcaaccagacctacgttgatgccctgaaggaacaggacaagttcgacgaggctgcgcagcgcattgcctacaaccgcgcactggctgcagcgaagaaagccctgacgcaggagaccatcacgttcatcaaggagacctttggcgacctcgacagctacctgaagccgatgatcgaagcacaggtgcgcagccagaaaacctatatgtgatgttttcgcggcatcacgaaaatgttaacgccaacaaagtcatagtatagcagcagcccttcaggcaggccagacctacgacaagctgaaggcgcagggaaagtatacacagcgatacagagcacgaaaataatctgatgctgtgtgccattctgcgccactttttgcgccactgatttagggaagttgtggtaaaataagggtaattaaggcgtttttttctaaaaaccgaaggacggctataaaaagagaaatccccaaaaagctaggcacaaagccactttttggggatttctctttggagctactgacctgattcgaacaggcgacctgctcattacgagtgagctgctctaccagctgagccacagtagcagataaaattttcttgcatgttctgcaacgagaaatattctatcatacttcctgtgcgctgtcaagatttgattttgcggcagaacaggtgcaaatagtctgtgacacaaaaatataactgctctccgagaaaaaactcgaagagcagccttgcacacaagaaaaatcagttgaacagcttacggccgatccagatgcagatgcaggcacccacaacggaaacgaggatctcacccacgatgccggtagcgctcagaccgatcaggccgaacacgatgctgcctacaaaaccgcccagaatgcccagcacgatattgcgcacggtggaagtttcgctgcccataatgcggccggcgatgtaaccagccagagcgccgatcagcagactgaaaataaaaccaaacataatattctacctcctgagttttaaagctctgcgctctgcccggcggtttcccgggcaaagcggcaaatatccttcaaacaacatttttcgcattctggtttgcgcgcattgcacactgcccgaccatgcatcacaaagcggtggcacaggtcgctgccttcttccggaggaacgatcttccacagggccatttccaccttctgcggttccttgatgccgtccacaaggccgatcttgttgcacagccggatgcagtgggtgtctgttacgatagcaggcttgccaaacacatcgcccatgataaggtttgcgctcttgcggcctacgccgggcagggcgagcagctcttcaaaggtggtgggcacctgacaaccgtatttatcgcgcagcacccgcatacaggcggagatatcccgcgctttggagtgtcccaacccgcagggcttgacgatggcttcaatgtcttcgggttccgcagcagccagcgcagcaacattgggatatttggcaaacaggtcttccaccacaatgttcacgcgggcatcggtgcactgggctgccagacgcacgctgaccagaagctgccaggcgtggtcataatccaatgtacagccggcatctgggtattctttctttaaccggtcgatcacttccagcgccagcgccttttttgcagtaaggtcttctggtgcttttttgcgaacaggcatttcatccactcctatcgacaaaagctgatacgataataccatgttttgcgttttttgtaaactgcgggtaaaaattatctgagaatgattttcagataaaaccttgctcttactgccaaaatgcgatatactatagaaaaatgctggggggaatcgcgcctcggtacgggaggaggaaaacacgatgaacgaaccactggcacagcgtctgcggcccaaaacactggcagatgtctgcggtcagcagcatctgttggcaccgggcagggtgttccgccgtaccatcgagagcggacgcatcccgaacatgatcttctacggcccgtccggtaccggaaaaacgacggtggcacgcatcattgcggaaaacagcggtatgacgctgcataagctcaatggcacttcctgcggcaccggggacatcaaggcggtgctcaaggatatcggcacgctggcaggtgcgggaggcatcctgctgtatctggacgagatccagtacctgaacaaaaaacagcagcagagcctgctggaatgcattgaggacggctcggtgacgctcattgcatccaccaccgaaaatccatacttctacatttataatgcgctgctgtcccgctgtacggtgtttgagttcaaatcactttcggcagcggatgtggagcgtggggtgcacaatgcactgaaaaagctttcggaaggggagagcacaaaggtctgcatggacgaggatgcctgtgcctaccttgccgagagcgcaggcggcgacctgcgcaaggcgctgggctgtcttgattttgcggtgacggcagctcccattgaggatggggaaaagcacattacgctggaaatgatccagcaggtcacccgccgcactgccatgcggtatgaccgggagggcgatgaccactacgacatcgtgtcagcctaccagaagtccatgcgcggctccgacccggatgcggcgctgcattatctggcccgtctgctggaagcaggagatctgccctcggcctgccgtcgcctgatggtatgtgcctgcgaggatgtgggccttgcctatccacagatcatccccattgtgaaggcggcaattgatgccgccaacatggtgggcctgccggaagcacggctcccgctggcagatgctgtcattctggtggccaccagtcccaagtccaacagtgcccatgatgccatcaacgcggccattgcggatgtgcaggcgggccgtaccgggccgatcccgcgccaactgcagaacaagcactacgacggtgaggatgctctggtgaagggccagaactacaaatacgcccatgactacgaccatcactgggtggaacagcaatacctgccagatgccatcaaggacgtgaaatattacacctttggcgataacaaaaatgagcaggcggcccgtgcctactgggcaaagatcaagggcgaagagaacgtctgagccacgccttacacccaaaacccaaaaacaaagaaaaaggagaacgatatgcgatattccaaacagcgcgagctggtcatgcagacggtgcagaacctgtgcgaccaccccaccgccgaggaaatttatgatgctgcggtcaaggaatgcccgggcctgagccttggcaccgtataccgtaacctgaatagtctggtggatgcgggccgggtgcgccgggtgtccattccaggcaaggctgaccgctttgaccacacgctgccctggcacagccatctgtactgcaccgtgtgcggcagcgtgaccgatgccgaggtggacgaaaagcaggtaatgaagctggtgaaaaaccagaagggccatgtgcaggactgcgctgttgtgctgatcggcgtatgcgaggcctgctgcgagaagcaggtgcaggaaaacgcccactgaaccataaaatttgcacggaacctcttgcccggagcgtataaacagggtatactatagagaaggctcttttcagaaagtgcaagtagattttcgccgcacagggcgcttcggcccggcggagaaggatggtttgattggaatacattagttttgaacataataacattgccgctgagctggtaaagcaggcctatgatacgccgccgctggcctttgtgcacagctatggctgtcagcagaacgtgaacgacggcgagcggatcaagggcgtgctgatggacatcggctatggcctgtgcgataagcccgaggacgccgacctgatcctcttcaacacctgcgccgtgcgtgagcatgccgagcagcgtgtgttcggcaacgtaggtgccctgaagggactcaaggaaaaaaagcatgacctcatcatcggcctgtgcggatgcatggccaaccagaagcacgtggtagaaaagctgcgccagagctatccttacgttgaccttgtgtttggcgtggacggaatcgataccctgccgcagctcattgcccagaagctgcagaagcataagcgtgtgctgatggagcccgcccagcgcccggtcatcgtggagaatatccccatccggcgtgagagcgagttccgcgcatggctgcccatcatgtacggctgcgacaacttctgtacctactgcatcgtgccttatgtgcgcggccgcgagaagagccgcaagcccggcgatatccttgccgagttccgcggtcttgtggaggcaggctataaggagatcacattgctgggacagaacgtcaacagctacggcaagggcctggaagaaaaggtggacttttctgatctgctcaacctgctgtgcacggtgcccggcgattatcacatccgctttatgaccagccaccccaaggatgccagccacaagctgatcgacaccattgccgcccagccgaagctgtgcaagcacctgcacctgccggtgcagtgcggctccgatgaactgctgaagaagatgaaccgccactacacggtggaacagtatcttgagctcatcgaatacgctcgcaaaacggtgcccggcatcaccttttccagtgacatcatcgttggcttccccggcgagaccgaagcggactttgtaaagacgctggaactggtgcagaaggtgggctatatgcagctgttcacctttatctattccaagcgcaccggcaccaaggccgccgatatgccggaccccaccccccgcaaggaaaagaccgaccgcatgacccgcctgctcaagctgcaggacgagatcgccatggcgctggtcaaggcgcaggttggtcagactgtgaaggtactggtagagggctttggccgcaatgagggcaccctctccggccgtctggacaacaacctgacggtggagttcacggcagacgcttccctgatgggcagctatgccaacgtacatctcacgggcgcacgggcgactgtgctgctgggtgagcttgcctgagtgattccggggcagtacccctgaacgtataaataagaaggagaccattcaaatggattgcattgatcttttcaagcgcgcagccgttgcgctgcagaccgatagccgctacctcgttctggatcagacccgcaaggcaaacgataaggacgaagagctgcagaacctgatcggcgagttcaacctcgcccgcatggatctgaacaatgagatcggcaagagcgagcgcaacgatgcccgcatcgccgaactgaacgaaaaggtgaacagcctgtacggccagattatgggcaacgagggcatggtggcttacaacgaggccaagcgtgactgcgagaacctcgtgaactatatcgatgccatcatcaacactgccatgaatggcggcgaccccatgacggtacaggagccttctgcttcctgcaccggcagctgctccacctgcggcggctgccactaaaaccggcaaaaacaaaacgcggctgtgcaaaacagaccgcgttttgtttgcaaaagcggttacaagccgcaaacttgtgcacagaaccatagaacgggagagagggtaaaccatggcagagctgtcgcccatgatgcagcaatatcttgagatcaaaaaacaacataaggacgaaattctgttttaccgcatcggcgatttttatgagatgttctttgacgatgccctgacggcatccaaggaactggatttgaccctgaccggcaagcagtgcggcatggaagagcgagcacccatgtgcggcgtgcccttccacagctacgagggctatgtggcgcggctgatcgccaagggctacaaagtagccatctgtgagcaggtggaagacccggccaaggccaagggccttgtcaagcgggacatcatccgcgtggtcacacccggaacggtcattgagagcagtatgctgcaggatgaccgcaataactacattgccagtatcttcctcaaaggaaagaaagcaggtttgtgctttgcggatgtctctaccggtacggcccatatcacagagctgaatgcagacaagatcgccccggcggtcattacggagctatgccgctaccatcccagcgaagtgctgatgaatccgggtctgctggactgccgcgaggtgacggcgtacatcaaaaagaatatgacttgttcggtggagctgatcgaagaggagcgctatgcaccgggccttgtggcggcatcgctggaaaaccagtttggccgtgactgggcgcagaccaccggcattgcatcggacggccttgtgcgctttgccatggcggcactgctggaatatctgcacgatacccagatcaagggcgtggaacgtctgaaaacggtcataacctataataaggctcagttcatgcgtctttcgcccgtgacccgcgccaatctggagctgaccgagacgctgcgcggccgcgaaaagcgaggcacgctgctctgggtgctggataagaccagtacatccatgggcaagcgtatgctgcgcagctggatcgagcagccgcttatttccagtgcactcatcaaccaccgcctgaacgctgtggagagccttgtcaagcagaccatggcccgcggcgacctgaccgaagagctgggttacattgcggatatggaacgcctgatgacccgcacggtttacggctctgccacacccaaggagatctatacgctggcccagacctgcgaccggctgcccggcctgcgcaggctggctgaggcctgcggctgcccggagcttgctgaactggcagtacagatcgatccgttggaggacatcaaggcccgtatttatgcggcggtggacccggaagcgccctctaccctcaaggatggcggtgtcattgccaaaggctaccatgccgaagtggacgagctgcgttccatccgcgacaataccaagggcgttctggcgcagctggaagcccgcctgcggcaggaaaccggcatccccaagctgaagatcggctataaccatgtgtttggctacttcatcgaggtaagcaactcctataagagcatggtgccggagacctacatccgcaagcagaccctgacttccggcgaacgctacatcacgcaggaactgaaagagctggaaagcaagatcttaggtgcccacgaacggctcatcacgctggagcaccgcctgttcagcgaactgctggaaagcatcagcgctcagctggaccgcatccagcgcacggccaatgcggtggcccagctggatgtgctcacggcgctggcgcaggtggcagcggaaaacaactactgccgtcccatcgtggacgacagtgacgagctgaccatcaccgagggccgtcaccctgtggtggagcagatgctgaaaggcagcctgtttgtacccaatgatacaaccctgaactgtggtgcagaccgctgtctgatcatcaccggccccaacatggcaggtaaatccacgtacatgcgccagaatgcactgatcgcgctgatggcgcagattggctcctttgtaccggcttccagctgccatgtgggtgtggtggatgccattttcactcgcatcggtgcgtcggacgacctgtctgccggtcagtccacctttatggtggagatgaccgaggtagcggagatcctgaaaaatgccaccgccaaaagccttgtggtgctggacgagatcggccgcggcacttccacctttgacggtatgagcattgcccgcgccgtagtggagcacattgcagaccccgccaagggccttggctgcaagactctgtttgccacccactaccacgagctgaccgagctggaaggcggcgtggacggcgtaaaaaactacaatattgcagtaaaaaaacgcggcgaggacatcaccttcctgcgccgcatcgtgcgcggcccggcggatgacagctacggcatcgaggtggcaaagctggcaggcctgcccggcagtgtgacccgccgcgcccatgaggtgctgcgcgcgctggaagcaactgcacctaaaaataaagtagagcagatggattttgatgccctgcaggagtataactctccggctgtgcccagcgagatgatggacaagctggaagctctggatgtggaaacactcacccccattgaggctttaaacttcctctacgagctgaaaaagaccctgaagggcagcctgaacagatgaaactgctctacctgacccagaccatacaaggagggaaaacaccatggcagtgatccatgttctggataagcacacagccgagctgatcgcagccggtgaggtggtcgagcgtccggcatccgttgttaaggagctgctggaaaactccattgatgccggtgccacgcaggtgaccgtcagcattgaatccggcggcgtcaagctgatcgaaatcagcgataatggcaccggcatcgaggcagaatatatctccacggcgtttatccgccacgccaccagcaaaattgaaacaccggacgatctgaccaacatccatacgcttggcttccgcggtgaagcactggcatccattgccagcgtggcccgtgtagagctgaccacccgaaccgaggtggacgagtttgccacggtctaccgcattgagggcggggaagaggtctcccgtgagccgggtgccagagctgtgggcaccaccatccgggtaaaggatctgttttacaacacgcctgcccgtatgaagttcctcaaaaaggactcctccgagggcacctttgtgtcggatacagttacccatgtagcgctcagccacccggaagtcagcgtcaagttcatccgtgagggcaagctgcagtatgtcacgcccggcgacggccagctgcgcggtgcagcctatgcggtgctgggccgggagttcagccgggacctcattgagctgaaaaatcaggagggcgtgtaccgcatcaccggtctgattaccccgcccaaaagctgccgcgccagccgaagtatgcagcatttttacatcaatggccgctatgtgcgcaaccgcaccatgatggccggtatggagatggcgttcaagggtaccatgatgcagggcaagttcccgggcggcattctgctgctggaaatgccggccgaccttgtggatgtcaatgtgcatccggccaagatcgaagcccgctttgcccgcgaaaatgatgtttttgatgtggtgtatcatgccgtcaagctggcattggctcagcccggcactggtgaacggctttttacctttgaagcagacaaagaagaagaaaaagctgaaaattcaaaaaaagacactgatataattaaaaatgatgtaaagaataataactttacaggcctttctgcgatcattcggggacaggcagacccgggcgttctgccacagcagcactgggaaccggcaaaacccgccgcagcaccgcagcagcctgccccggctgctgcaatgcaaataccgacagcacccagtgagccgcgctggaaaggcagtgctcagaacgaggatatgctggatccgttcgtgacccttcacagcccgaagctggaaacgacaaaggcaccagagccgttccgtgcggcggcaagtgaaacgcagctggatgtggaaccggaatttggtgagacaaaactgcattcgcctcaggaccatatggcagcgtggaaccctgcgcaggaagcgccaaaggaagaacctgagagtgcaccctgtgcagaaacagaaccggatgcgccggaagcggcagaacaggaaactgtactggccgagccggagcagatgaactttgatccgacggcggatcagccggaaccgctgcgctatgtgggcgaggtgttcagaacatatatccttgcagaacgcggcgacgagctgtgcctgatcgataaacacgctgcccacgagcgccagctgtacgaaaaactggccgcgaactatggcaatgtgcccagccagatgctgctggagcctgctgccatcgaccttgctgcggaggaaaagcaggccctgctggataacattcctctgctggaaaatgcgggccttgagatcgcggactttggcggcaataccgtggtgctgcgcgcggtgcccgcagatgtggagccgcagaatgcggaaagtctgctggtggagatcgcaaataagctgctcaagggcggccatgatgcgctgaacgagcacaccgagtgggtgctgcattctatctcctgccgtgcagccatcaaggcgggggacaagtcctcgccgcaggaactgctggcgctggccgaaaagatcctttccggcgaggtgccgccgttctgcccgcatggccgcccctgcgtactcaaattgacccggaaggagctggaaaagcagtttggacgcatcgtataaacatcccgtggtggccgtcgtcggccctaccgcaaccggaaagacggcgttgggcgtagagcttgcaaaacatttttccggcgaggtcatcagctgtgattccatgcagatctataaaggtctggacataggcacggcaaaggtgacaccggaggagacctgcggtatcccgcatcacggcgtggatatccttacgccggacaaggctttcagcgtggcagactttaccgccatggccggaaagctggaagaagagatctctgcccggaagaagctgcccatccttgtgggcggcacagggctgtatgttcagagctttctgtatggggtgcgctttacagaggaaaaagcacctgccggtctgcgggagcagctggcggcggaactggctgcaaaaggcggtgctgccatgtacgaagaactgaagcaggccgacccggaagctgctgcggctatccacccgaacaatcaggtacgggtgctgcgcgcactcgagcattaccgtgccactggcaaaaagctgagcgaacagaaagcggagtctctcccaccggagcggccctaccgcagcctgatcctcggtctggatttcccagagcgcgcggtactttaccgccgcattgacctgcgtgtggacaaaatgctggaagcgggccttataaaggaagcggagcatgtctggcagaaccgggaaagcttccgcacggcagcgcaggccatcggatacaaggagttctttccgtattttgagaagacggctccattggaagcctgcacggaaaagctcaagcaggcatcccgcaactatgccaagcgccagctgacctggttccgccatatggacggtgtggtctggctggatgccggtgcaccggatgcagtgcagactgccatccgcaaaactagcgaatttttagcgaaaggatgatcgatatgccggatgagacccagaaggaacgccatgtgccgcatgtgcttaccactctggcaggcgtgctgatcgcgtttctgctgctggcagcaatttatgtggtgtatcaggccgcacatatcctgttcccgcagaatgtttatgagactgcgctgcctgcggtcatttcggatacggtggaagccgacggagttctgctgttcgacgaaagctatgtggcaggcagcggaaaccttggatatcttgctgccgacggcgagcgcgtttcagcgggcaccgcagtggcagaggtgtacagcaacgcttcgcaggcttcgctgcgcctgcagctgaaccagctgaatgatcagatcgacctgctgcagaaatcgcagaacacttctgcgctgcagctggatacccttttaaaagaacgttcttctgcgctgtatgacctgctggatacgctggacgacagcgattatgaagcggtggatgatgatgccaatgcctacctgctggcccagaacaagctctgggtggtaacgggcgaagctgcaaactttaccgatcagatcactgcgctggtccagcagtcccagagcgtgcaggcgcagctgggcagcccggcgcagatcactgcaccgcagaccggctattttgtgcgctcttccagcagcggacggctcaatgccagtgccgatgatatccttgcactgaacgcacaggagctgcagggctatctgcagtccgacccagtgctggcactggacggctgcgccggtaagatcgtggcagggttcacatggcgctatgtgggcgtgtgcactgcaaagcagggcgaaaagctgctgggtcagaacggcaagccgctgagcacagcggtggagatcagcttcccgggtcaggtggagaacagcctcaaggccaccgtcaccgaggtggagatcgatcaggacagcggccttgcccgctttgtgcttgcctgcaactccatcaacggcgatgtgctttgcctgaaccgggctgcagcacgcatctcggtaggagagcgcagcggcctgcgggtgcctgctgcggctgtgcactatttaaaagaggatggcaccgaggcacaaacgcagggcgaaaactacattcccggtgtgtacgtgaaacttggcaacattgcccgcttctgcccgatcgacccggtggacgcagaccatcccctcatcacggacggcgattacatccttgttctgcccgaagggaccgagggctcggtcagcaaggtgaggctttatgacgaaataatcgtttccggacaaaatttgtatgatggaaagcttttgtagttattgacatctgaggcaaaaaatccgataatagataaagctattatttgcatctatttgcaaagaacgccaggcagcgccatgctgcccgaatgaaaggagcagattgtatgtctttgcttgacagcattaagaaaggtctgtttgaccaggaagacgattacgaggatcagtacattgacgatggcccccagatggtaaacaataacaatggcatcggccttggtgctgacgacgaaaatgaagagcctgttgagggtgccaagaagaacggcaaggtggtcaacatcaatgccaccactcagctcaaggtcgttctggtcaagcctgagcgttttgaggatgccagtaccattgctgaccacctgaacaacaagcgcaccgtggtgctcaatctggagtccaccaacaaggaagtgtcccgccgtctggtggacttcctgtccggtgttgcatatgcaaacaatggccagatcaagcgcgtggccaacagcaccttcatcatcactccgtacaacgtggatatcatgggtgatctgctggacgagctggagaacaatggcgcgttctattgatccgcagcccaaggcggcgcgcgggttcatccctgcgcgtaccgatgaagaacgctatctcatgcgccatatcgaggacttggcccacacggccttttcccgggacattgcgcggtattcggctttcctgagtgaccgcgagcaggacttggcccgcgcggcactgggccgtgccggtgtgcaggagggcttccggtttgagggcggctggctgaatgcggagcgcagggtgctctgtatcgagccggagtatagctgcggcgaagcacccatctgctgtgtgcggctgcagtgccgtgcacaggcgggggctgcgctgcccgcccacaaggattacctgggcagtctgatgggccttgagctgcggcgcgaggcgctgggagatatcgttctgccagagaatcagccgggcacagcttatgtgtttgcgctggaaccggcagcacagctgatctgccgggaactgtttcaggctggacacacggagctgaccacggaactgctgacgctggacgaggtgccgcagtttccgcaggcggagcgtgagatgcacagtgcaacggtatcgtccctgcggctggacgctgtgctggcagctatgctgcactgcagccgaggacaggcttcggaactgatcgaggcgggcagggtggagatcaaccacctgccggcggataaacctcatgcgcaggtatatgagggcgatgtgttcacggtgcgcggcaagggccgcttcaacctgactgcactgcccggcaaaagcagaaaagatcggtcaatcatcgaattttttcaatattaaaagcaacgggaggaaatgactatgctgactccgcaggatgtccgttctgtgcaatttgagaaaaacctccgcggctaccgcacagaggacgtagaccgttttctggataaggtggaagaacagctgcgggacgacgatgcgcaggcggaacagcttcgcaagcagattgcggacctgactgctgaaaaccagaagctgcacgatgaactgaagagctttgaggcagatggtgaaatgctcaagagcgcgctgatcaatgcacagcgcatgggcgaaaatgtcatccgcgaagcaaaccagaaagcagaagagatcatccatcgtgcaaatctgcgcggtgatgatatcatccgcgatgccaacgaactgctgcagaaggcaaacgaccgtgcagacgagatcgagaacgaagcaaacgagaagcgccttgcagaggagcgcgagtatgaccgcgtgcgtctggaagtgacccgcttcaagtctgacgtgctcaacctgtaccgcagccatgtggagtcgctgagccgtctgccggagttccagaaggaaacggctgcacaggatgccgaacaggcagagcctgctgcagaggaaagtgagcctgccgctgcagcccagccgcaggcagcggacgtgcaggagccggaagcagagcctgcacagcccgcacaggaagatgcagaacctgctgccgttgttgaagatgacgacgacaaggcagctgacagcagcgaggatttctgggcaaaggatgagagccagctcaagctggacccgccgcccgcgcctcctgctgattttaagccggacgagccggactacgatgcttttcagggtgtcaagttcagcgagtaaggcaaccccataaggaaatatagaggagagtgtaaaccattggctaagaacaaatcgcagtacgatagtactctgaacctgcccaagaccctgtttgaaatgcgtgccggcctgcccaagaaggagccggtcatgctgaaggattgggacgacaacgacctgtacaatcagctcatgaagcacaacgagggcaagccgcagttcatcctgcatgacggccctccgtacgcaaacggtaatatccacatgggtactgccctgaacaagatcatcaaggatatcattatccgcgataagaacatggagggtttccaggctccctatgtgcccggctttgatacccacggcctgcccatcgagctgaaggctctgtcctccgtcggtgataagaagaaggacatttccaagctggaactgcgccagatctgcgaaaagtttgctactgagcacatcgatatcatgagcgaccagttcaagcgtctgggcgttatcggcgatttcgagcatccgtatctgaccctgaagcctgagttcgaggcacgccagatcgagatttttggcgagatggcaaagaagggctacatctacaagggcctgaagcccgtgtactggtgcccggactgccgcacggctctggcagaggccgagatcgagtacggcgaggacgactgcgattccatcttcgtgcgtttccacgtctctcaggaccccaacggtgtgctggcaaagcacggcatcccgatggacaagacctacttcgtcatctggaccaccaccacttggactctgcccgctaacgaggcgatctgcctgaacggccagttcgagtactccttcgtcaagatcggcgatgagttccacatcatggccaccgaactggtcaagagcgtcatggatgcctgccacatcgagaactacgagatcgtgggtgagccggtctccggtgccgagtttgagctgatgcgctacaaccacgtctacctgcccaaggagggctgggtcattctgggcgatcacgtcacgctggagagcggttccggctgcgtccataccgcaggcggccacggcgtggacgacttcaacgtctgccagaagtatccgcaggtgcccatcaccgtccccgtggacgatggcggctatctgaccgagctggccggtaagtatgcaggtcagcgcgtgtgggctgccaacaagaccattctggccgatttgaccgagtccggtgctgtcatgggtcaggtgcacatcaagcatcagtacccgcactgctggcgctgccatcaccccatcatcttccgtgcaacggaacagtggttctgctccatcgcaaagttccgcgaggatgtctacaaggccatcgacaccgttacctggatgccggattggggccatgaccgcatgaagggcatggtgcgcgaccgcaacgactggtgcatcagccgccagcgcacctggggcgtgcccattcccgcattctactgcaagaagtgcggcacctaccacatcaccgatgccaccatcaaggctgtcagcgacctgttccgcaaggaaggttccgatgcatggtataagtacgaagccgagcagatcatccccgcaggcgaagtgtgcgaaaagtgcggtgcttccgagtggaccaaggacaccgacatcatggatgtctggttcgactccggctccacccacgccgctgtgctggaggagcgccccgagctgcgcttcccggctgatatgtatatggaaggcggcgaccagttccgcggctggttccagtccagcctgctgaccagcgttgcaagcaagggctgcgcaccctataagtctgttctgtgccacggctgggtcgtggatgagcagggcaagcagatgcacaagagcgccggcaacggcgtggagcccagcgagatcatcaaggactacggcgctgatatcatccgtctgtgggtggcttcttccgactacactgtggatgtgcgtgccggcaagaacatcttcaagcagctgagcgaggcttaccgcaagatccgcaacaccgcccgcttcattctgggcaatctggacggctttgatcccaacaccgactgtgtggctgacgatcagctgcaggagatcgaccgctgggcactagctgctctggatgacttgatggtcaacaccagcgcaggctacgctgtgtacgacttcaacaaggtctaccatgcagtgtacaacttctgcgttgttgcaatgtccaacttctatctggatgtgaccaaggatcgcctgtactgcaccaacggcgcaggccgcaaggctgctcagaccaccatgtacaagatccttgtggctctggacaagatcattgctcctatcctgtgcttcaccagtcaggagatctgggacttcatgcccaagactgagggcatgaacaagtacgttgtctttgaggagatgcccaaggccggccagtatgccgccgatgaagccttcaaggcaaagtgggcacagctgatcgccgtccgtgatgaggtgaagaaggttctggagcaggcccgtgccgaaaaggtcatcggtgcttctctggaggctgccgtcaccctgtactgcaatgatactgtgtacagcctgctcaacagcatccccatggacgagctggccgacctgatgatcgtctctcaggtagagctggtcaagggcgaaggcggcgctgcaagtgctgttgaaggcctgggcgttgctgctgcacatgccaccggcgaaaagtgcgagcgctgctggaagtattcttcttccatcggcagccatgccgcacatcccaccctgtgcgcacgctgcgccagcgttgtggaagcctaagcgttccgcataaaacaatgttttaaagggcggcgctcccttataccggggagcgccgttttttatactgaatgattttgggagtatcctatggcatttgttgtttttaatctgctcgcggctgcggcactcattggcatcgatcaggccatcaagctgtgggccacaaatgtgctgcagccggtgggagccatgccgctgatcccccatgtggtggagctgcggttcgtgctcaacccgggcatggcgttcagcctgctcagcggcaagcagctgttcctcatcatcgctaccagcatagcgctgatctttgtggcctatgggctgttcttccgcagccgcggcagatacctgcagcaggctgcgctgctgctgatccttgccggcggcatcggcaacctgatcgaccgtgtgctcaacggcgaggtggtggactacatcaatctgctgttcatgcagtttgcggtgttcaattttgcggatatctgcgtgtgtgtgggcgtgggcctctgggtgctggtaatttttctggaagagctgcacgctgagaacgggcagtccccgaaggagcagtgagccatggaacagcgtgaatttgtggtggagcaggagacggcaggccagcgcatcgaccgctttctgagcggcgaggacaccggcctttcccggtctgctctgcaggcgctggtggccgacggtcatgtgttgtgcaacggcaggctggttgccaaaagcctgaagctcaaggcgggcgacaccatcgttttggaaattccggacgcaaagcccattgaggccgtgccgcaggacatcccgctggaaatcgtctatgaggacgagcatctgctggtggtcaacaagcccaaaggcatggtggtgcacccggctcccggcaacccggacggcacgctggtgaacgcgctgctgtggcactgcaagggaagcctgtccggtattggcggcgagattcgccccggcatcgtgcaccgcatcgataaggacaccagcggcctgctggtggtggcaaaggacgatgcaacgcacatcggcctttcccagcagatggcggtgcacagtgtggagcgcgcgtatcgcaccatcgtgtacggcggctttgcacaagatgagggctttgtggaaagcaatctgggccgcagcaagaccgaccgcaaaaagatggcggtctacccggccagtgagccgcacaccaaatatgcctataccggctatcaggtgctggaacggctgaacaactttaccatgctggaatgccgcctgaagaccggccgcacccatcagatccgcgtgcacatggcatccatccagcacccggtggcgggcgacccggtgtacggcccgcacaactgcatcaccagcctgcacggccagtgcctgcacgccaaaacgcttggctttgtgcacccgatcaccggcgaacatctgcggttcgattcggaattgccggaatacttcactcattttcttgcaacgctcaggaggggaacggtatgaaccatctttcttcaacgcttgtactgtgtgatctggaccatctgcttttgggtgccgacggcaacctgacgcaggtggtgcgggatgtgctgcagctgttcgtccgccgcggcggacgttttacggtgttttcccagcgcacgccgcgggcagtgcggtccattctgggcagtgtgcggctcagcgctcctgcgctggtgtgcggcggtgccatggcctaccatttttccgatggcacccgtcagccgctgtgcacctttgccgggcaggatgccgacctgttcgcccgcctgccggtggcagagggcgtgggcattgccctgcagatgaccgacggtactacccgcgtgctgcgcatgagcgaggcattggagcgtcatctgcggcaggaatggaccccttatctgctggcaaacgcggcagacatcaagggggaagaagtgctgcgggtgctgctgtatcaggacagcaaggcagtgcccatgatctcgctgctggaaaaatctctgggcgaccgcacagcggtgctgctgggcgagcgtgccgcagcggatacgctgatcctgacccccagaaccgtctctggccgtgaaatgctggatgccgtgtgtatgccggtgggcatcgacccggaagatgtgctggtacttgccggagggctgcctatgctggacatggtgcgcgcttccagccagagcaccgcagctgcggatgccccggctgagctgcgtcttgctgcccaaaaggtcactttgaccgatgctgcggcaggttctgcagtggaagtgctgtaccgtatggtgcgggatgctgaaaatttggcgtaaaatttgtgcaagacttctgcaaattctttcgcagaagcctttctttttggaggaaagtcaggtacaatgagagaaacgcatcttctggccctgcaaaagaaggaaaaactctttcttgcgctgtcgctggcggcggtggttttgtgcacagtgctggcctttggctttgccgtgccgctgcaggctgccgaaccgcaggtcctgccggatacgaccgggctggaacagtatgtgctggtggatctgaacactgctgatctctctgcgctgtgcacactgccgggcgtaggggaaaagcgcgcacagacgattctggattaccggacgcagaatggcccgtttgaacgggtagaagatgcagccaatgttccgggcctgacacagaccattgtggattcctgggcaggaatggcaaccgtgagctgagccgcagccggcggcccggcgcagcaaaaaggggaatgattatgagtgacgataccatttttatcaaccgggaactgagctggctggatttcaaccggcgcgttcttgcgctgggcaaagataaaaatgttccgcttgcagagcgggtcaaatttcttgcgatctacggctccaatctggacgagttttttatggtgcgcgtgggttctctgcaggagcgcgccaatctggaacaggaacagggcaaaaaggtcaagagggaaaacaagaccaacatgtccgcggcggaacagctgactgccatcatgcccaaaacggcacagctgcaggaggagtgcgataaatactacgcaaaggcgctggaagcactggcggagtgcggctggcgcaaggtggatcttgaccacttgtccaaggaggacgagcacttctggaagaagtacttccaaacggagctgttccccatcctcagcccgcagatcgtggataaccgccatccgttcccattcctgcgcaataaggagatttaccttggcgttctgctcaaggaaaaacacccggcagggcagagccttggcatcattcccatttccagccagatggaacggatgcacgttgtaaaaaaagacggcgaaacgcagtttgcacttaccgaagagctggtgctgcactttgcggccagcatctttggcaaagagacgattcaggaaaaatgtctcttccgtgttacccgcaatgcggatatcgacgtaaaagagggcatgatggatcatgatatcgactaccgcgagatcatgaccgagttgctcaagcgccgccgcaagctggctgcggtgcgtctgcagatcacgcctgccccggccccggaggtagaacgcctgctgtgcaaccgtctgctgctcacccataaacgggtgttcgagcagaaaagcccgctggatctgagctttttctacaagctcaccggccgcatggaagcggaggggctgccggaactgttctacccggctgcacggcccatgctgccgccgccggactacgaccttgccgctgaggtgcagaagcacgatgtgctgctcagctacccgtaccagtccatccggcccttcattgccatgctcaaaaaggctgcccatgatcctgaggtcatttccatcaaaatgacactgtaccgtatggcgcgggagtcccagatcgtgcaggcgctgatggaagccgctgagaacggcaaagaggtggtggcgctggtggagctgcgcgcccgctttgacgagcagaacaatatcgactggtcgaagcagctggaaagcgcaggctgtacggtcatttatggctttgatgattacaaagtgcactccaagctgacccttatcaccaaaaagagcaaagagggctactcttatatcacccagatcggcaccggcaactacaacgaaaagaccagtgagctttacacggactattccttcattacggcagaccatggcattggcgaggaagcttccaatgtgttccagaaccttgccgtgcagaagctgactgaggagagcgaccggatgctggtagcaccgctgcgcttcaagagcgtattgctggaagagatggatcgtgtcattgccgccgcccacatgggccgtccggcatccataatcctgaaaaacaattccatcagcgaccgggacatcatcctcaagctgcaggaagccagctgtgccggtgtgcgcattgatatgatcgtgcgcggcatctgctgcgtgcgcgccggcgtgcccggcaagacggagaacctgcatatccgcagccttgtgggtcgttatctggagcatggccgcatttacagcttcttcgatggtgcacatacccgcatctatattgcatccggcgatttcctcacccgcaacaccgagtgccgcgtggaggtgggcgtgcgcgtggaggatcccgtgctggtgcggaagcttaccgacattctgcagctgcagctgcgggataatgtcaatgcccgcgagatgcgcccggacggcagctaccagaaggtaaagcccgctgagggcgaagcactggtgaacggccagatgggcatgtatgagctgttgaaaaatgactggacgcagccggagccttggaagctttctgccgctgtgcaggaaaaacagcctgaaccttctgccaaagcagcaaagccagaacctgcgaaaacggaagcagctcccgctgcaaaacaggcagaagcttctcacccggaatctgctgcggcaccggaaagcggcgaccgctttgaccagctggaacagatggtcaatcataaaaagcgtacagagccgcagcctgcccctgcagccaggccgataaagccggtggtggtggagacacccgcccccagaagccgcctgaaacggattttggattttttcaagttacgcagataatatttgcaagacccgacagagcaaaccctctgccgggtctttttgcgtgtttgcctgcataaataaaaagcaaacggaaggcgggaggcagaaggtgcgggcaaagcgatggggacgagccgggcacggcagggagcagcccagacggagggtgatttttctggcagttttagccggactgctggtgtgcgtggtgcttccggtgcgggcgcagaaaaaaacggggaagctctgtttcccgctggacaccacacagtaccgtgtttcggacggatacggctggcggcaggatccttttaccggggaaaggacgttccataagggcattgatcttgcctgtgcagagggaacagaagtgcttgctgcggaaggcggtgcggtggtgcaggcataccgcagcacaagctatggcacctgtctgcgtgttctccatacagatggcagcgagtcactttacgcccatttgcagtacgcctatgtccgcccgggcgaggtggtggaagcagggcagctgctgggcgcagcagggcgcagcgggcgcgctacgggagcacacctgcattttgaactgtaccggaagggaacagcctgtgacccggcggatgcgctgggcctttcctcatgaagctgcatgattcccggcagctggggccgctggtgttccgcgacccgctgcttttgtgtagcgcactgtattttttgctctactttgatgcaagcggctttctgcggctggggttgctggcggcgttcctgcacgagtgcgggcacattctggtgtattgtgtgtttctgcgccgctttccggtcattgaggtgaccatgactggcttttgtatgcggatggacgctccggcccggggcctttcaccggggcggctcttctggctggctgctgtaggcccggcggtcaatttcatgctggcaggcatctgggcactgcggctggaacaggaactgaccatccgcggcagtgccttctgggcggcaaatctgctgaccgggggattcaatctgttgcccgttccaccgctggatggggcgcagctggcatcctgcctgtgcgaaatgcggcgtgcaggcaaaaagtttaagggaaatgattgaaaaaacagctcgtttcgggtacaataaaatgacgtgtaaaaatggactgtttattggaggactcgatgtttgatccaaaactgaaagaagcactgggacgggtacagaagcctggtcgttataccggcggagaacccggcagtgtatataaggacaaagaaaaagtggatgtccgctttgcgttctgctttccggacacctatgaggtgggtatgtccttcctcggcgaaaagatcctgtatgagctgctcaacagccacgaaaactggtggtgcgagcgtgcttttatgccgtggctggatatgaaggccgagatggagcgtcttggtctgccgctctacaccatggagagcaaggatccgctcaccgcttttgatgcagtgggcttcaccctgcagtacgagctttcctataccaatattctggctatgctggatctggcgggcatcccgttctattccaaggatcgcgatgaaagctggccgctgatcgtggcgggtggcccctgcgcctgcaacgcggaacccattgcggacttttttgatgtggtccagctgggtgagggcgaaaaccagctgcccggcatctgtgccgagatcgaaaaggccaagaaggagggcggcgtctccaaaaaggagctgctgctgcgcattgcaaagatccccggcgtctatatcccggcgttctacgatgtggagtattacgaggatggccgggtcaaggccatcacccccaatgagccgggcatcccggcgcgcatcaccaaggccatcatcaaggacctgaacgagtttgccccgcccacgaatttcgtggtgcccatggtgggtgccattcaggaccgcgccagcatcgaggtgctgcgcggctgtgtgcgcggctgccgcttctgtcaggcgggctttctgtaccgccccatgcgccagcgtgacgcgggccttctgaacagggcggcgcaggagctgtgcgctaacaccggctatgaggaactgagcctttccagcctgtccacctctgaccacggccagctggaagagctgctggatgatctgaacgagtgggcacccaaggagcatgtgagtctgtcgctgccttcgctgcgcgtggacaacttctcccagagcctcattgaaaagaccaccaaggtgcgcaagagcggcctgaccttcgccgccgaagccggcacccagcgcctgcgcaatgtcatcaacaagaatgtcacatgggacgagatcgaaaagacctgcaccattgcattcaacgcgggctacacctcggtcaagctctacttcatgatgggcctgcccaccgagaccatggaggacattgagggcatcgcagagacggcgcagaaggtggtcgatctttactattctctgcccaagcgcggcaagggcaagggtgtacaggtgaccatcagctgtgcctgctttgtgcccaagccccatactccctttgagttcgtgcccatggacactgaagaaatgctgcgcgccaagcagaagcacctgctggaaagtgtgcgcagccgcaagatcaaggtcaactaccacgacagcaccaccagctttctggagggcgtgttcgctaagggcgaccgccgccttgccccggtcattgtggaagcctacaagcgcggctgctactttgacggctgggaagagtgcttcaagtacgacacatggctgcagacctttgcagatctgggcattgacccggcgttctactgccagcgtcccatcggtctggacgaagtgacgccctggtcccacatggattacggcgtcacccacgaatatctggtacgggagtacaaaaaagcccttgccgcccagactacccagccctgcaaccgtgcctgccacggctgcggtgcaaatcatctgttaggaggtccctgctttgattacagtaagaatctcgtttgagaaaaagaatgaggcctcctacatctccctgctggacctgcagcgggtgatgcagcgggtgctcaagcgcagcggcctgccggtgtggcatacgctgggcttcaacccccatatctacatgacctttgcctgcccgctttctctggggcaggagagcgagtgcgagtgcgtggacgtcaagaccgaagcggaagccccggattttgagcagtggaaagcggccctcaatgccatcatgcccgcaggcatcgtgatcacgcacgttggcccggtgcagatgaaggcggacctcattgcttacgcatgctatcgcatcacctacccggcggcagcggctgcggcgctggatcagtacaacgcgctggaaagcgctccggtggaaaagcacggcaaaaaaggcaacaagatcattgagctgaaggaacatctgcccaaggtggagtacaccacggagggggacagcctgcacatggatctgtgcatgcccgctgcgcaggagctgaacctgaacccctcgctgctcaccggctttctggaagaaaaattcggcctgcctgccgtcagcgccaacatcctgcgcaaaaagtttttgacggcagataagcagctgtttgtctgatcggagcgtgaatgactgtctgttgggcaaaacagaaaatttttgcatttattttggtcagaacgcttgcatttacgcaggttttgtgatatcctatttaggcgttagtgtccgctgagaccacagcggggttaatgacaatatcattaaacgggcggtcctctgacggcaaagtgccgtgtatgaacgtctaaaaacaaatggaggattcaaaaatggacgcactgaagattatttctgaaggcagcatcaaggctgaaaagcctcagttcaacgttggcgataccgtccgcgttgatgttcgtatcaaggaaggcgaccgtgagcgcattcaggcctttgagggcactgtgatcgcaaagaagcacggcggcgttgctgagaccttcaccgttcgccgcgttgcttacggtgttggcatcgagcgtgtcttccccatcaacagccccttcgttgagaaggtcaccgttgtccgcaagggcaaggtccgccgcgcaaagctgttctacctgcgtggtcgtacgggcaaggctgccaaggtcaagagcgatatttgatcatccccgatttgaaacgggagaaaagggacaaccttgttgtcccttttttctttatcaaaatttcggaaaaaatgcggctttttgcaggcaccgttcttgcgaagagcctgtcggctgcggtataatcgggtcagcagtgtaaaaccagaaggtgaggtgtaccggatatggaaaaacaggaacaggcaaagcccgtgcgtgggcagaacctgctggaatggtacgaggcattgatctcggcagcgctggtgctggtgctgatcttttcgtttttcttccgcatcattcaggtggacggcagctccatggtgcccacactggtgaacggtgataagctcatcgtgtggggagcaggctatacaccgcagcgtggtgacgtggtcattgtggacagttatacctcctacggcaagccgctggtcaagcgtgtcatcgccaaaggcggcgatacggtctccatcgattatgcgaccggcaccgtggcggtgaacggcgaggtcttgcaggaggactacattgcagagcctacttatcttggctatgatgtaactttcccgtatacggtgccggagggcacggtgttcgtgatgggtgataaccgcaaccagtcgctggacagccgctccacctatgtcggctgcattgacgaacgggacattctgggcagggtgcttgtgtgctttatgccctttacagattttggggtggtaaaatgaacgaaatggatacccgctttgcaaaccagtacaatattcagtggttcccgggccacatgaccaagactctgcgcatgatggagcaggagatccagcacgtggatgccagccttgtgctgctggatgcccgcatcccgctttccagcctgaacccggagatcgagcgcatcacggcccgcaagccgaaactatacgcgctgaacaaggctgatctggcagacccggctgtaacggaagaatggatcaagtatttccgtgcggcagatgccggctgtgtggccatcagcgccaagcagaagggcggtgccaatgcggtaaaggctgccattgaaaaagaactggcgggcctgctggaacgccgccagaaccgcggcatgggcggtgccaaaacacaggtgatgctgtgcggcatccccaatgtgggcaaatccactttcatcaacacctttgcaggctctgcccgcgccaaggcggcagaccgcccgggcgtaaccaagggcaaacagtgggtcagcaccgacaaatttgatttgctggatatgcccggcgtactgtggaagaagtttgactccaagaccattgcgtccaatctggcctttatcggctccatcaaggatgatattctggatgtggaagagctggccatgaacctgctggatgaggtgcgccgcaactaccccgaccttgtggcccagcgctacaagctggatgccgaaacgctggccctgccgccctacgagctgatggaagccatcggccgcaagcgcggtctgctggtgcgcggcggcgaggtgaacaccgagcgctgcgccattatgctggtggacgaattccgcgcctgcaagtggggccgcatctcgctggagcgtccgccgcagcgggatgatctggctgattttgccgaggaggatgacgaatgaagcgccgttccgacgaggaaatctcggctccgctgtatgagtacgatgccgctgtacgcagtcagtatggctgctttgcaggcgtggacgaagccggacgcggccctctgtgcggcccggtgtgcgtagcggcctgtattctggacccggagaatccggtctttggcatcaacgactccaaaaagcttaccgagaaaaagcgggaagctctgtttgatgagatcattgaaaaggcgttggcctacaaaattgtttttgtggggccggagatcatcgaccgggacaacatcctcaacgccaccatgggcggcatgaagcaggctgtggaagagctggacatcgtgccgaaccttgttctcgtggatggaaaccgcaccccggcagggctgctggtcccggcacagccggtggtcaagggcgatgccaccagtgccagcatcggcgcagcatccgtccttgccaaggtcagccgtgaccgctatatgctggaactggacagacagtatccgcagtatcagctggcaaagcacaagggctacccgaccaagctccactatgagctgatcgcccagtacggcatccagccgttctaccgccgcagcttcctcaaaaagcagggctactggccggagaacggaaagtgaaccgcgccgagacagggcgcaggggagaagctgctgcggcccgctggtatcagaagcagggctgcaggctgctggcacacaacttccacacccggatgggtgagctggatgttgtggtgcaggagccggatgggaccattgtcatctgtgaggtcaagacccgtgcggaaggctctctggccagcccggcagaagcggtggaccggcccaaacagcgccgcctgatccgtgcagcacagtattatctgcagcagaacggcctgagcgatgcaccggtgcgatttgacgtggcagaagtgttccctcttgacagcgggcgctggatggtacatattataaggggcgcttttctcacgtaaagcaacggccccggtgggaaaatgtacgggcagagggcttctctgccacagcagaagagcgtgctttgcacgttctacggcgaaaaaggagcgacaacaatgcagttttttagtaccagagaccaaaaccgcaaagtgacttcctcggaagcaatcgcacagggcctgtccaacgagggcggtctgtttgtaccggaaagctttccgcaggtggatgtgaaggcactgtgcgagctggactacccggccatggcagctgccgtcatcaaagaatatctgaccgactactcgcaggatttcctgaccgaagctgcccacaagacctacggagaggcctttggcggcaaggcaggctatcttgccccggtggaaggggacacctatgccttagagctgtggcatggccctacctgtgcattcaaggattatgctctgcagctgatgccgaagcttctggtggaagccaaaaagaatctgggccgcacggaaaagaccctgatccttgtggcgaccagcggcgataccggcaaggcagctctggacggctaccatgatatcccgggcgtggagatcgcagtgttctatcccacgggcggcaccagcgagatccagcgcctgcagatggcaacgcaggagggtgccaacgtggcagtgtacgctgtgcgcggcaactttgatgatgcacagaccggcgtgaagaaggtctttggtgacactgccattgcagcagagcttgccaagcggaacatccgcctgtccagcgccaactccatcaactggggccgtctggtgccgcagatcgtctattactttgccgcctatgcccagctgctcaaggcgggcaggatcaccttcggcgatgaagtggacttctgcgtacccaccggcaacttcggcgacattctggcaggctactatgcaaagcgcatgggcctgcccgtgggcaagctggtctgcgcttccaacgagaacaacgtgctgaccgatttcctcaccaccggcacctacaccgcaaagcgggagttcttcaagaccacctcgcccagcatggacattctggtgtcctcgaacctcgagcgccttctgtaccatgtcaccggcagtgatgccgaggtggcgggcctgatgaagagccttgccgagaccggcagctatactgtgcgtccggagacgctggctgccattcaggagaacttctcctgcggctggagcagtgaggaagaagtggcaggggagatccgtgtccgctacgagaaggacaattacctgtgtgatacccacaccgccgttgcgttccatgtggcagcgcagaaaaagcgcgagggcgtgcccatggtggtgctgtccaccgcgtctcccttcaagttcccgcgcagtgtgctggaagcactgggccgcaccgccccggaaaatgattttgaagcaatgcagcagctggaagcagctaccacgcataccgcaccggcaagccttgccgcgctgcgccagaagccggagcgctttaacaccgtgatcgatcctgcgcagatcgccgaggtggcgctgggctatcaggaataacacatcctgctgcatttagaacaggagaaaaaacatggcactttttgtgcttggcgatacccacctttctctgggcgcttccaagccgatggatatttttcccggctggaatgattatgtggagcgccttgagaaaaactggcgcaagctcatcaaaccagaggataccattgtattggcgggcgatatcagctgggccatgcgcctgaccgatacccgtaaggattttgaatttctgcagagcctgcccgggcagaagatcatcatgaagggcaaccacgattactggtggtctaccgtgaacaagatgaatgcctacctcaaagcagaaggctttgataccctgcacattctgcacaacaactcctacagtgtagaggggtatgcactgtgcggtacccgcggctggctgtttgatgcaggcgaggcccacgacgaaaaggtgatgaaccgcgagatcggacggctgcgcatgagtctggatgccgccgaacccgggctggaaaagctggtgttcctgcactatccgccggtgtataccggcaccagtgcgccggaaatcgtggccaccttaaaggaatacagcatcaggacctgctactatggccatctgcacggcaatgccatccgctatgcggtgcagggcgatgtggatggcatccactacaagctggtcagtgccgatgggctgcgtttttgcccgtaccgcatcaattgaaccgttaaaaccaataaaaattaacaatttgggctggcaattgtgtcgggagcgtgctataatagtttttgacgcgattgttgcacccaattgagcgcgcgcgtccccgcatattgcaaaagcaagttcatccaggacgcagtgcgcggttgcaaagggcaaaaacttcctgccctgcgcaatagaatttttgagtggaggaaaaacaaatgaatttcatcaagtgtgaaaagctcgagaagagcatggcagaactgcagttctccatcgacgcagaggctttcaagaaggctgttgccgatgttttcaagaaggaaggcaagaagtacgctgttcccggcttccgtaagggcaaggctccccgcgctctgatcgagaagatgtacggcgctgatgtctttacctatgatgccatcaatgagctgttccccgaggctttcgaggctgctgtcaaggaagctggcgttgagccggtcggccgtccggaggtcactgttgactctgctgatgagaccaacggtgtcaccctgaccgtcaaggtcgctgtcaagcccgaagtcaaggttggcagctacaatggtctgacggttgaaaagactgtccatactgtttctgacgaggctgttgaagctgagctgaagcgtgtgcaggagcgcaatgcccgtgagctgacccgtgagggcgctgctgagaacggcgacatcgctgatatcgacttcgagggcttcgtcgatggcgtggctttcgagggcggcaaggctgagcactacagcctgactctgggcagcggcagcttcatccccggctttgaggatcagatcgtgggccactccgctggcgaagagttcgacgtgaatgttaccttccccaccgagtatcaggctgccgaactggctggcaaggctgctgtgttcaagatcaagctgcacgaagtgaagtacaaggagctgcctgctctggatgacgagctggctaaggattgctctgagtacgacactctggacgagttcaaggcttccatccgcaagaacaatcaggagcagctggacaagcaggacgatctggctgttgagaacgctctggtggatcaggtcatcgagagcatggagggtgagatcccccaggcaatgtatgatgcccgcatggacgagatggtcaacgactttgcattccgcgtggagcagcagggcctgcgcctcgaggactacctgaagtatatgggccagactatggagcagttccgcgcttccttcatgccgcaggctgagaagcaggtcaagatccgtctggctctggaggctgttgctgctgctgagaacatcgaggcttccgaggaggaagtttccgctgagatcaagcgcattgctgaccagtacaagatggaagaggacaaggttcgtgagctggtcaatgttgacgacctgaagaaggatctggccatcaacaaggccatcgacttcatcaagagccacgcaaacatcgtggagaaggctgctgaggaagagaaggctgcagacgctgagtaatcagctcctgtgttcctttgaagcgggcagtatgctgcacggtttcaatcaaaggctgtaaaaattgaccgatacggcagaaccggcagggaaaccgtatcggtcaattttgcaaatactatattccatttcaggaggcgaactttatgagttttgttccttacgttgtggaacagtcgtcccatggcgagcgttcctatgatattttctcccgtcttttgaacgatcgcatcatcgttctgagcgaggatgtcaacgatacctccgccagccttgttgtggcacagctgctgtatctggaagggcaggacccggataaggacatcagcctgtatatcaacagccccggcggctccatcagcgccggcatggccatccacgataccatgcagtatatcaagtgcgatgtttccaccatctgcatgggcatggcagcttccatgggtgccttcctgctggcaagcggcaccaaggggaagcgttttgcactgcccaactcggaaattctgatccatcagccgctgatcggcgggcagggtggcggcctttccggccagaccaccgatatcaagatccatgccgagcacatggtgtatatccgcgataagatgaaccgcatgctcagcgagtacaccggccagccgctggaaaagatccagctggataccgagcgcgacaactatatgtccgcactgcaggcaaaggaatacggcctgatcgatgaggtcattgcccaccgctgagccgccgacatttaatttacccaggataaggaaaaacagctatggcaaataacaattccggcagagacaaaaacgaaaaggatctggtctgcagcttctgcggaaagcatcaggacgaagtggagcgtatgatcatcggccccggtgtcaatatctgcagcgaatgcatcggcctgtgccacgacctgctttccgacaagccggatcagcccaaaagcgcccgaccggcccgcggtgcgaaccgtgcacacatccagcctgcggacgatctggatatcaacatcctgaccccggccgagatcaaggaaggtctggatcagtatgtgatcggtcaggacgaggcaaagcgtgtgctggccgtctcggtctacaaccactacaagcgcatcctcagcggcaagggcagcgatgtggagctgcagaagtccaacgtgctgctgctgggtccttccggcgtgggcaagaccctgctggcacagactctggcaaaaatgctgggcgttcccttcgccattgccgatgccaccaccctgaccgaagccggttatgtgggcgaggatgtggagaacattctgctcaagttgatccaagcagcggattttgatgtgcagaaggcacagatcggtattatctatatcgacgagatcgacaagatcacccgcaagagtgagaacccctccatcacccgcgatgtgggcggtgagggcgtgcagcaggccctgctgaagattttggagggcactgtgagcaatgttcctccgcagggcggccgcaagcacccgcagcaggagttcatccagattgacaccaccaacatcctgttcatctgcggcggtgcatttgatggcttggataagtatatcctgcgccgcaccgataagtccgcactgggcttcggcagcagcctgaaggataattccagcgaagcggagaaggctctgctgcgcaaggtggagccccacgatctggtcaagttcggcctgatcccggaactgatcggccgtctgccggtcattaccgtgctggacgatctggacgaggacgctctggttcgcgtgctcaaggagccgcgcaacagccttgtgaagcagtataaggaacttctgagcatggataatgtggaactgaacttcacggatgaagcactccacgccattgcccgcaagacgatcgagcgcaagaccggtgcccgcggcctgcgcagcgtgatggaaagcattctgctgcccatcatgtacgaggtgcccaccgatgctaccatcatccgcgtaactgtggatgaagataccgtggaaggcggcgaagcacatctggaatacggcgcggtgcgcaagcgctataaaaatcaggccgctctgagctgacgcttttagcgtacagcaggggagcaaagacccggcattcaagctctgtttcaaaagctttttgcttttggcagggctttttgctttattattcttgtttccgagggcaaaatgtactataatattaaggtctggaatggcatggggaacgctccctggcaggaatgctccgcaaaatgccgctctggcgctatgggtaacaggaagtacgataaaggagtgtgttttcaatggcaaattatcttgcaatgaatcgtgatgaactcactgccgaaaaggcagcgcttgaggcaaagtacaaagaatttcaggccaagggcctcaagctgaatatggcccgcggcaagcccggccctcaccagatggatctggctatggacctgctgaagatgaatgactataccaccgatgctggcacggatgcccgcaactatggcgagctggaaggcctgcaggaggcccgcgtgctgtttgcggatgtctttggcgtaaagccggaggaagtgttcgtgggcggcaactccagcctgcagctgatgtataacctcgtcaatatcggctatgtgttcggtttcccggagtctccgtgcccctggtctcaggtggagaagcgcaagttcctctgcccggtgcccggctatgaccgtcactttgctattaccgaggagtttggctttgagctggtcagcgtgcctatgacccccaatggcccggatatggacattgtggaaaagctggtggccgaggatcctgacatcaagggcatctggtgtgtgccgcagtattccaaccccgatggctacacctacagcgatgagaccatcgagcgttttgccaagatgaagaccgctgcgcctgatttcaaaatcttctgggatgaagcctatatcgtccatcacctgaccgatgagatcatcgagactccggtgctgctgaacgagagcaagaagtacggcaacgaaaaccgtgtgttcatgttcacttccaccagcaagatcaccttcccgggcgcaggtgtctctgccattgcctgcagcgagagcagcatgaagtatatctgcaagcgcttctcggtcatgatcatcagctacgacaagatgaaccagctgcgccacgtccgcttcctgaagaacaaggaaggtgtgctggcccacatggcaaagcaccgtcgtcgtctggtgccctgctttgatgccgtcaagaccgcattcaagaacaacctcatcccctgcggggatattgcccactggacggaccccaagggcggctacttcatcagcctgtatgtgatgcccggctgtgcaaagcgcgtggcgggtctgtgcaaggatgcgggcctgaccctgaccggtgccggttctgcatatccctatcacaaggaccccgaggattctcacctgcgcattgcgcccacctatcccagtctggacgaggtggaaaccgcttccgaactgctgtgcatctgtgtgcgtctggctgtggcagaaaaactgctggctgacaaggcagactaacattttttgattttatctcctctgtgcggcccgtctgggccgtcaggggagttttgtcgcaagaaagccggcacgacggcccccttgcggaaatgataaggcccgccggagcaggcggtccgcactagaatacgggcggcagctgcaagaactgctgcttttggaggttccctgaattttatgaaaacaaaaggaaaagcatggcatctgatcgccacagtgctgttgatcgtggtatttgtgtatactgcgttcttcggtgtgtatgccaagtacggcgatacgaccacgacctatatcaaaggtgcaaaggatatccgcttcggtgtggatattaagggcggtgtcaacgtcacctttgtgccgtcggatggctacgatgctaccgaagaacagctggaagcagcccagctcgtcattgagaaccgtctcgtggcgctgaacgtgaccgactatgagctgtatgtggacaacaattccgacagcctgatcctggaattcccgtggcagtccggtgagacagattttgacccggaagctgcgatcgatgagatcggcaccaccgcctatctgaccttccgcgagggaagcagtgcggacggtgagctgatcctggacggctccatgatcgagagcgccgcagctcagtatggccccgtcagtaatggcggtgcttcggaatatttcgtctccttgaagttcaccgatgacggtgccaaggcatttggcgatgctaccacaaagctggctgcatcgggcggcaccatcagcatctggctggacgatgaaaacgtgagcacggccacggtcaacaccgctattaccgatggctctgccatcattacaagctcggcttccaatcctttcacgcaggagcaggtcgtcaagatggcccgccagatcaactccggcgcactgccctttgcactgacggtggacagctattccaccgtcagccccagtctgggcgagaacagcctgagcgccatggttctggccggcctgatcgcctttgcactgatcgtggtgttcatgacgatgctgtaccgtctgccgggcttccttgcatgtattgcactggctggtcaggtggcagcaacgctggcgttcgtttccggctacttcccggtgtttgaaagctttaccatgaccctgcccggcatcgcaggcatcatccttgccatcggcatgggcgtggatgccaatgttatcacggcagaacgcatcaaggaagagctgaaaaacggcaagtctctggatggcgcgctcaagagcggttttgcccgcggcctgacccccatcgttgacggcaacgtgaccatcgtcatcgtggccatcgtgctgatgggtgcctttggcccctcggacggcatgtttgcaaaggcactccactttgtgttctttgcctttggtccctccaccgcaggcactatttatgccttcggttacacgctgctcaccggcgtgttgctgaactttgtgtttggcgtgtttgctacccgtgtgatgatccgcggtgcggcatccatcaaggctctgcgcaacccttggctttacggcgctgaaaagcccggcaaggaaaaaaccgagaagaagcctatcgactttgtgggcctgcgcaagcgtttcctgacgatctcctcctgcctgatggcagccatcgtgctgtgcgctgtggttttgggtgtccatctggataccgagttcaccggcggtgccatgatcaccctgagctacgagggcagctttaccatgtcggatgtgcagaaggttgcatcctctgcattggagaataacggcctgaccctgcagaccggcgagaatgttgctaccggtgaccagaccctgaaaatctcgatgcccggtaccgaaacagtgactaccgagcaggtggccaagctgctggacagcctgaacgaaagctgcccggacaacaattttgaacaactgtcgctaagcaacgtcagcgctgccatgggcaccaagttcctgcagaagagtctggttgccgtggtgtttgcactggtgctgatcctgctgtacatcgctctgcgcttcaagaacatcggcggcctgaccggcggcatgatggcagtgctggcgcttgtgaacgacctgatggtggtgtttggcaccttcgtgttgctgcgcaccgcgctggatggcaacttcattgccgccatgcttaccatccttggctactccatcaacgataccgttgtggtctacgaccgtatccgcgagaaccgcaccctgatgggtaaaaaggcatcctttgaagagctggtgaaccactcggtgaaccagtccgcccgccgcaccctgatcaccaccattaccacggtgatggcgctgggcgttatgtgcatcgtggcaaagctgtatggtctggacagcatctttacctttacgttcccgctgatgatgggcatgatcagcggcgtgtacacttcgctgtgcgtttccacctctgcgtgggtgctgtggagtgagcgcaagcccaagaccaaagcctaaaaacacagcccggtcagaccggacaggaggaacagaacatgaagtgtccctattgcggagccgaggaatccaaagtgatcgattcccgccccaccgaagacagtgagcgcatccgccgccgccgcgaatgcctgagctgccatatgcgctttacgacctatgaggtcgtggagactgttccgcttgtggtcatcaaaaaggacagctcccgtgagccgttcgaccggcagaagctgctcaacgccatggtgcgtgcctgcgccaagcggccggtcagctacgaatcgctggagcgtgcggtaagcagcattgagcagacgctgctcagctcctacgaccgtgagatccccagcgtgcgcatcggtgagctgactatgcaggaactgaaaaagattgacgaagtggcatatgttcgctttgcatcggtctaccgtcagtttgcagacgtggaaagttttttcaatgagctgaaaaagctgatgggcgaccgcaaggaaccacagaaataatttgcatcagaacaccggctttcgcccaatggggcagggccggtgtttttgtttataccagccggtgcgagagccattccagtgtttccacctgtacctgtgcgcggcgcagctcaccaaaggcttcctctggggcacccatttccaggtgtccgtccgccgcccgcagtgcagcttccagctcggtaaaatctgcggtgcgcagcaggtggttcattttggtgcgcatttggtcgcaccggtcggcaccatcagcaagcgcctgccgggcggcagggtagtcggcattgcggatggcttcggcggcggtgtcaaggtctgccgagatcacatccgcaaagctctgcaccttccagctgctgtaaaaggccacgctcagcagtacggccacaatggcgatacatgcatagatccgcttcatccgctcacctcaatgggagccgccggcacggcggttctctttttttagcaaaaaataatcctcggtctcgttgccgatcagcagcaaaatttcttccggcagcagggtgttggcctgcgccgtgcgttccagccacgcgcggtccttgccgcaccagcgcaggttgtcttccagcacctgtccgtccagcacaaagggaatggtggcgttggtatgggtcaccttcagctgcaggtcagcaagacgggctggctctttttctggccgcagtgctgccgaaagggtgccgttcgtctcgatcaccgcgtaggagacctcccgtgggtcaaaaatatttttaccgcgcagcgcttccatcaggtcagctgtggtcagccgcagcacccgcaaggctttctgatcgatctgcccgtccaagatcaccgtctttggtctgccggaaagaaagttgaagaatttttggctgcggaagctcagcacggagcccagcagttccagcgctgcaatgagaaacagcgggatcaggctggatgtgatgggcacctcttccgattcaatggagatggatgccagattggaaatgagaatggtggacaccagttcttcgggctgcagttcgcccagctggcgcttgcccatcagccgcatggcaaacagaacgcacagataaatgatgatagtgcggcagatcagaagcttcaagtaacaagacctcctgtcgtttctggcggaatggatgccgctgcagccgggcatactgctgtgcaaaggagtggttggatgcggcagttatcacagagccttacggcaaatcttacggtgctgaacaaaatgtttggcacctctgcggattattatgccaaggagatcacgatttatcattgcaggggaagcatcctgctgtttgacggcatggcaagcctagattctttgtgggagcttttactggatgcggccagccgtcaggcaccgccgcagcaggcaggccagcgttgcaccgggccgcaggtctttgagctgatcctgcacggctcagcctttccggcagaaagtgagccggtaacagatctggctgatctgatcaaacgaatgacggcaggcatggcggtcttactgctggacggctgcgcaaagggcattgccttctcggtgcagggactgaagttccgctcggtagacgagccttccggggagggcaatctgcgcggctcccgcgaaggctttgccgacctgctgcgggtcaatctgagcctgctgcggcggctcatccgtaccgaacatctggtgcaggaggtggcgcaggccgataccgaaatgcaaacggaatacgccatctgctactgcaaaaacagggcagactccgccatggtgatccgtgtgcgcaaagcgcttgccgctgcaaagccggagcttttgctggattccagttactttgtgccgtggcttctgccgggcaaggcgcggctgttcacgccggtaagctacaccgagcggcctgccgtggcggcggcaaagatctgtgagggcaagatcgtggtgctggtcaacggaagtccctctgccatggtgcttccggctcttttctgcgaaaattttgagtgcttggacgattatgcatccaccgccgtgttttcctcttttctgcgcatcctcaaatatgtttcgttctacctcacagtatttctgccgggtgtgttcgtctgtctggcggtctacctgccggagctgatcccaccgcagcttctgtacaagatcgaagcggcggagaaggccacaccgctgccgctgtttgcggaaatgctgctggtcatactcattttggaggtcatccgggaagcaggtctgcggatgccgcagtcgctggggcattcggtcagtctggtgtccgcgttgatcatcggcgatgctgccattgccactgggcttatgagcacgccggtgatctttgtggcaagcatcacggccatcgcggtgttcgtcacgccctctttgtacgagcctgctacgctgctgcgtctgggtgtggtgctggctacaggtcttgccgggccggtgggccttgcgggggctttttttgcagttctgctcagtctttccggcacagcctgcctgcaggtgccatatctggcggcgcatccgttcccgcagcggcccatggcagaggatggcatcatccgccgcaactaccgccgcctttcagcgcacgactttaatatctggcagaaacgggagggaaaatgatgcaaaaacagaaaggcttttctgctcccgtgctggcactgagcgtgtggacagctgcgctggcagaagaaatgcagaccggtatctctccgcgtgggatgatcattcatggagcggttcaggctcttttgctcacatgcatcagtggggtgttctctgcctgctggcagcgggcagccatgcagtgggtctggctgttttccgcaggagcatggtttctggcagagttgtttggaaccgtaatgcaggcccagaacatctgccagcaggagttccgctccatggcgctgatcggcctgctgccgcttttgctctgggcagggtggtgtattccgccttccggctgggatgctccggcacgggtgctgtggtggttcgtgctgctgggtgggctggtctgtctgacagggcttgccgggcagatggactgggcgcaccttctgacagcagatgctgtgcaactggcccgctggccgcgtgttccgctgtatgcggagtatttgttctggccgcttcttgcaggttatgaagagccgcgcagcatgtcctggctgccatggctcacctttctggcacaggcgggtcttactgccgggatgtgcctcgtatttggcgcagcggattacccggcacaggaactgctgcgggcatggagcgcagatgttttctcccgcatggatgcgctgcttttgctcatctggctcacctgcgcgattttccgcaccggctttctctgcgcggcagtgcgtaccgtgtggcagcgcgcggtgcagtgcgggaaaggagcggtaaaatgaagcagaagaaactgcgctctctcagtgcggtgcttttgatcgggtggtgcctgatttttctgcgctgcgagaccaccgaaaaaagcatggttcgtgcgctgtatcttgctcagaaggaacagtccatcaccgtagggctgctgtatcaggctccggaagccgccgccgatgcatccgaggcttctggggctgtgcagctgcagttggcgcaggcggacacgctggcaaaagcgctggcggcggcgcaaaagcaactgccgcaaaaggcggattaccgcctgtgcgattatctgctgatcgatcaggatgcatcggcagagctgcttgcagcgtatgagcgtacggtgctggaaaacaggcagggcagggtatcggcaaaagtttctgtgctggaaatggacgatggatttttggaggaacttccagcggaaaagcaggaagttccgaacaaactgcttgagcagctcaagcagtgcgcagaccagatgccgaggctttaccagtatcaggacggaatgcttctgccgcagctgcgggcagagaaacaggaagtggcacttgcagatacaagcatcctctggcgagtggaaaacagcattgagctggaggcccggcaggcggaaacagcgcggcttttgttggaaatgggcggcgtgcatactttctggctggaaggtgagccggtaacggtccgccgatgcagcgtgtctgtcaccctgcgggaagaaactgccagtctgcggctggactgtcagcgcagctatgatacgccgcagcccagcgccgcacagtgcgaacagctggcagaactgtgcacgcagacggtgcagtctttctggcagcagggcatcgaccttgtgcatctgcagcagcgcagtgcattgcagaacggtgtgggcagagaaaagatcacaataaaaaacgcctgcccgcaattgcaggcagacgtgagatttttaccgatgtgattcagttggcagtggggaaggtgacagtaatggtagtgcccacatccacctgactttccagcttgatgcgtgcgttgtggatgcgtgcgatatgcttgacgatggcaaggcccagaccggtaccgccagtagccttgctgcggctcttatccacacgatagaagcgctcaaacacgctggactgtgattctttcgggatgccgatgccgttatcggccacagtcagggtgcagtgtccgtcgcggctgcaggctgtggtgatctgtaccttaccgccgggacgattataacggatcgcattatcgcacaggttctggcatagctcgtccagcagggcacggttgccgtgcacaagagcactttcgcccagacagttcagcgagatgtaagcccggcgggcattcagcttctggcgctctacgcagtccttggcaacggtaagcagatccactgtctccatctccggctcagaaccggcttcgctggcgttgtccagactggaaagctgcaggatatcgttcaccagctggatcatacggctggcctccacatggatcttctgggcaaagcccggcacatcctcaggctttgcaatgccggtctcgatcagctccgcatagccggaaatactggtcagcggggtcttcagctcatggctgacattggcagtaaactcctgccgcatcttttcattgttctcacggaggatgcggtcagagtggatgctttcggcaaaggggacaagctccttatagggaacattgtcctgaatatgatccagatcttcggtcatgctcagcacaggggagaccaatgcacgggtgagcagagctgccagcacagcggcggccagcatgagtgcaacgcagctcagcacgatggcaggcagggtcgaatcataaatagaccagaccgtttctgcatcctgtgccatgcgcaaaatctcaccgttgggcaacagtacggcatagtaataggtctcgtagcccatggtctgggaatcgcggatgtcccggcccacaccttcggtcatggcctgacggatctccgggcgggagagatggttctccatgggctgatcggtagcagattcaaacagcacgctgccgtcctgcgagatcagggtgatgcgcagatcattggtaacaaaggacgaaagctgctgcgggtcctgcaccagatcataaccggcgcttaccagatcggcttcccgctcaaggctggtccatgcctgagccgtgaatgccttgtgaaaaacaaagatgcaaagcgccgccgtgaacagcagaccaaggaagcccatcaggaacaggcggtagctgatcttttcttccatgctgcgcagcttcattcttcaccggcctcctcttcatcggtcagcttgtaacccaccttgcgcacagtgcagatgtatttgccagcatcccccagctttttgcgcagggtgcggatatgcatatccacagtgcggctctccaccgaaatgtcggtgccccacaccacctgcagaatggtctcgcgtgtcaccaccagattggtgttctccagcagcaaacgcagcaggctgtactccttgtaggtcagctccaccggcgttccgctcacagtcacgttgtgacgggcattgtccagcaggatctcgtgaaagctgagtacgttgggacgtgcttccggagccgagcggcgcaaggcggcgcgcacccggctcaaaaattccatgatgccaaaaggctttgagatgtaatcatcggcgccgcagtccagcccgcgcacggtgtccagctcgctggacttagccgtgaccataatgatgggcagcctgcgcagggaaggggtgttgcgcagctttttcaggatggaaaaaccgtcctcaccgggcagcatcacgtctaagatcaccagttccggctctgcagcgtgcatggcctgccagaacgactcagagctttcaaagctggtcacttcgtatccgctggactgcagggcatactgttccagctcccggatggcggcatcgtcttcaacaatatagatcatttgtcaaaatcctccgcagattgattttcagggaagagatagcgttcacggtaacggtcaagacggcgatggaattcctcactttccttggtgtcattgccgtgacgcagctcgttgaggtatgcgtgggtatcaaagctgtcctgtgcaacctcaatctgtgcaacggctacgttgctgcagtggtcgcacacacgctcatagttggtcagcaggtcgtccagcacaaagccatattcaatggagcagctgccggcctgcaggcgggcaatgtggtgggccttgatggcacgtaccagctcgttgaccacggcttccagcggttccaccttgctggcaagatgcagatcacccttgcggaaagcatcagtggtgcggttcagaatatcctgcaccgcatcctccagcacctgcagctcgtcgcgggcatcctgcgagaattggatgtctttggtgtgcatctcttcggcagattccatcagatttacggaatggtcgctgatgcgctcaaaatcgctgatggtgtgcagcagggtatttacgctctggctgtcggcatggttcagctcacggctggaaagcttgacgagataggtgccgagagcgtcctcgtaacggtctacctgcgtctcttcctcgcggactttctgcgcaagtgtgtcgttccactcatgagtcaggctcatggcctgcatcacgcccacacgggcaagctctgccatttcagcagttgcagagcgtgcacgctccacggccacggcaggggtgttcagcaggcggtcatccagcagcgcaaagctttccttttccggcgaatccggaatggtgaggatggccagcttttccagcaggtttgcaaagggcagcagcaccagcgttgccacgatattgaacaccgagtgcaccacagcgatgccccatgcctcgatggtggtgttcacaaaagcaaagtggcagaccgtattcaggccgtaaaagccgacaaggaagatggtcacaccgatgatgttgaagtacagatggaccatggcagcacggcgtgcattcttgttggcacccacagaggagatcaacgcggtaacgcaggtgccgatgttctgacccatgataatgggaatggcactgccgtaggtgatcacgccggtggcgctcagcgcctgcagaatacccacgctggcgctggagctctggatgatgccggtaacaagggcacccaccagaacgcccagaagggggttggaaaagcgggtgaacaggctggtgaaccatgcctcgttctgcaggggcaggacggcgttagacatggtggtcatgccagtcatcagcacggcaaagccgatgaggatggtacccacgccttttttcttctcactcttacacatatacagcaaaatgccgataaatgcaagcaaaggactgaaagaagtgggtttgagcagattgatgaggaggctgtcgccctgcaggccggaaaggctcaggatccagctggtgacagtggtgcccacattgctgcccatgatcacaccgatggcctgatgcagctccatgatgccgctgttgacaaagccgaccaccatgaccgtggtagcgctagaactctggatcacagcggtgacgcacaggccaaggaaaaagcctttaagggggttgtcagtcagcttgctcaggatcttctgcagctggccgccggcctgcttttccagtgctttgcccatgatgtccatgccgaacaggaacagggcaagacctccaagcagggaaaagacattgaagatggtcataaagatttcctcacttttgtttgacgtgtttttgatgtgtttctcctgattttgagtatacagatgcaatgtaaaatccaaaatcgagggaatgtaaaatccgtgtaaaggtaagaaaaatgtaaaaaatcagtacatggctgcgctgctgcgtgcattcttgccgggctgcgaaaaagccgcccgcacaatattgttttttaccgatcgttctattataataataagaaggaatcctgcacggtacctgacagcaggcagggctgtgcagcaaaagggagcacaggaggaacaagaatgggcacattcaatgtctcgctcaaaacgctgaccgaccgtgtcagcatggaagttgtctatacgccgaaggaactggatcagatctgtgtggagatcgccgaagtgaaccgcccgggtctgtttctggcgggctattacgattattttgataagctgcgtctgcagatcatgggtctggccgagatgaactttctgtccggcctttcaccggaaaaacgctacgaagcgctggatcagctgttccgtcagcagccgccggctgttatcgtctgccgcagcgaggaattgactcccttcccggagatgcaggagctggcccagaagcatggtgttgcactgctgcgctccaacgagaccacctgcactctgatgggcagcctgatcagtgtgctgaatctggaactggcaccgcgtatcacccgccatggtgtgctggtggaagtgtacggcgaaggcatcctgatcctgggcgacagcggcattggcaaaagcgagcttgccatcgagctggtcaagcgcggccaccgccttgtggcagatgatgcggtggagctgcgcaaggtgtccaaccgtcagatcatgggtactgccccggagaatatccgccacttcattgagctgcgcggcattggcatcgtcaatgtggcccgtgtgtacggcgtgggcgcggtcaagctgagcgaaagccttgaccttgtggttcagctggaagcatgggaccccactaagaactaccagcgcaccggtctggaaaacgaatactacgacattctgggtgtcagcattcccagcaccagcattccggtctcaccgggccgcaatctggctgtcgtgctggaaactgcagccatcaacaaccgccagaagaagatgggttacaacgcagcgcgtgaactgctgatccgtctgggtctggacgataaaatggattgatcccacaccgcaaaaggagcaagttatcatggaacgattcaagcagaaactgcaggcagcggcgatcccgttcagggaaaatgaaccgcttgcggcgcactgtacctttaaaatcggaggcccggcacagctgtttgtcatgccggaaaacgagcagcagctctgcagtgcagttgcgctttgcaaagagcaggctgtccgctattacctgctgggcaacggcagcaacatcctgtttgcggacgaaggcttttccggcgtggtgatcgatgtttcggcactggacgcagagatcgcggtggaagatacagtcctgaccgcaggcgcaggtgtccgccttgcggcactgtgtaaggcggcactgaagcatggcttgtccgggctggaatttgcctacggtatccccggcacggtgggcggtgcagtgtatatgaatgcgggtgcctacggcggcgagatgaaggatgtgctcaccacagtgcggtatctggcggcagaaggcgaggtcagagaagtgcctgccgcagagctggatctccgctatcgccacagcatttttgaagagaacagcggctgcatcctctcggcacagttccatctgcagcccggaaacgcagcggacatccgtgcaaaaatggatgaattgatggccaagcgtgtggaaaagcagccgctggataagcccagcgccggcagcaccttcaagcgcccggcgggtgcttttgcggctgcgctgatcgaccagtgcggcctgcgcggctatcgccacggcggcgcagccgtcagcgataagcactgcggctttgtggtaaaccttggcggcgctacctgtgctgatgtgctggcactttgtgacgaggtgcgcgccatcgtaaaggaaaagacgggctacgaccttgaaaaagagatccgggtcgtccgataacggaaaaagcaaaaaaggagcggtagatcagattatggagctgttgatcgtcagcggactttccggtgcaggcaagtcggtggctatgaatgcgctggaagatatcggttttttctgtatagataatgttccggccggactgctgcccagcatcactgcattctcggaagcgggcgacagccagctggagcgggtggctctttccatggatgtgcgcggctgccgcaccagcgaagagatcgagcgtgcgctcgacaagctggatgagcagggtgtggattataaaattctatttctggatgccccggacgatgtactcatgcgccgctacagcgagacccgtcgccgccaccccatcagcattgccgagggcatttccacccgggaggcctttgcaaaggaacgcaaaatattgaagcctttgcaggagcgtgcagattacgtcatcaataccgccctactttctacagcacaaaacaaagaacgcatctgcgatctttttgcaaaaaatggcggagccaagggcgccatgcgcctgaccgtgatgtcctttggattcaaattcggcatcccgccggaggcagaccttgtgttggatgtgcgctgcctgcccaaccccttctacgtgccggaactcaagcataagaccggccttgatcaggatgtggtggattttgtcatgagccacccggaagcgcaggaactgctcaagcggtatgagaactttttgcagtatgcactgccgctgtacgtcaaggagggcaaaagccagctgaccattgcggtgggatgtaccggcggcaagcaccgttccattacatttgcgcgtaagatcgcggagtattgcacgcaactcggctacgagccgggcgtgcagcaccgcgatgtcaaacgctgacagaattcgaggaagtatgagtagttttgcatcccgcgcgcgggaggagatcgcgcagcgcagcatccagaaggattgctgtgtgcgtgcggcagcttatggcattgcgtgctttgccaaatattttgatgcaaagggtctggtggtgcagaccgagcagcaggagacggtgcaggctgcccagcagctgttcgcacgctgcggcgtgcagggcgagatcctgcacaagcagcggcccagcggcgtgctgtatgagttcaacatccgcgcgccggagcaggtggcccgggtgcatgagctgttcggcaccacgggcagcgagaccagcctgcagatcgatccccgccttatccgctgtcagacctgcgtcagtgcgtacattggcgcagcttttttgtgcagtggaacggtcattgatccgcagaaggaatataatctggagttccttacctcccgcaccaatctggcacgggactttgaagcgctgctggcagagcatgagtttgcaccgcaccgcacccgccgcaacggcgtgaacctgatctacgtcaagaccggggccaatgtggaacggctgctcagctttatgggcgctggaaacgctgcagaggaaatgcatgcgcaaaaagccttcaaacaggtgcgcaaccagaccaaccgacagaccaactgtgatacggcaaaccttggcaaaacggcccgcgccaatgcgcagacgctgaaggcgatccgatttctggaagagcaggatgccctttccaccttgccggaggtgctgcagcaagctgccgccaaacggatgcagtatccggacctttcgctcacagcgctgtgcggctgctttgagccacccgtgagcaaatccggcctgtcgcaccggatgaagaagctggaggcattggccgaaaatctgcggcagaatctggaacaggaggcaaaagcatgagcgaagcattagccaatacccggccttttgtccatctgcacatccacacagagtacagcttgctggatggtgcctgccgcattgaccagctgatggatcgcgtaaaagagtgcggacagaccgccattgcctgcaccgaccacggcgtgatgtacggctgcgtgcagttttataaggctgcaaaaaaggctggcatcaagcctatcatcggctgtgaggtgtatgtggccacccgcacccgctttgacaaggtaaataagatcgacggcaacaaccacctgatcctgttgtgcaaaaatgagaccggctacaaaaacctgatcaaaatggtgtcggccgcctttgtggagggcttttattccaagccccgcattgataaggaactgctggaaaaatatcacgaagggctgatctgcctgtcggcctgtttggcaggcgaagttccacaggccattctggcgggcgattatgagcgcgccaaagcagcagcgctgtggtatcgggacctcttcggcgaggaaaactattatatcgagcttcaggaccatggtctggaagaggataatactgtgctgccgcagctcatcaagcttgcacgggagaccggaattcccatggcagccaccaacgactcccactatctgcgcaaggaggatgccaaaatgcagggcatcctgctctgcatccagaccggcaagaccattcaggatgcggataaaatggagttccagaccgacgagttctatgtcaaaacgacagacgaaatgtacgagctgttctccatggtgccggaagcctgcgagaataccgccaaaattgccgaacagtgtaactttgattttgattttggacacactaaaattccatattacaaagcgccgaacggtatggataatcaggcgttttttgaaaagctctgctgggaaggtctggagcgccgctacggccccaatgttccgcaggccaacaaagaccgtctggaatacgagatcggcgtggtcaaaaagatgggctacacgaactactatcttatcgtgtgggactacgtgaactacgccaagagtcagggtatcccggtaggcccgggccgtggctccggcgcaggcagcattgcggcttacagcgtgggcatcacggatatcgaccccatccgttataacctgatctttgagcgcttcctgaacccggagcgcgtcagtatgccagattttgatgtggacttctgctacgagcgccgtcaggaagtgatcgattacgtcaaccggaaatatggtgccgaccatgtggctcagatcgtcacctttggcaccatggccgcccgcaacgccatccgcgatgtgggccgcgtgatgggcattccgtatcagcaggtagatgttgtggcaaagcaggtgcccatggagctgaagatgacgctgaagcgtgcgttggaggtatcgccggaacttaagcggatgtacgataccgacccgcaggtcacagagttgatcgacacggccttgaaggtggagggcatgccccgccatgcttccacccatgcggcgggtgtcgtcattaccccggagcctacggactactatctgccgctggccaccaacgacggcctgcctgtgacccagttcaacatgaccgagatcgaagaacttggccttttgaagatggactttctgggcttgcgcacgctgaccgtcattcatgacgcggaaactgctgtgcagaagcaccacccggagttctccatccagaagctggattacgacgacccggatacctacaggatgctgggacagggagacaccgagggtgtgttccagctggaatcttccggcatgaagcaggtgcttgtgggcctgcagccgcagaacctagaagacattatcgctctgatcagcctgtaccgtcccggccccatggattcgatccccacctacctgcgcaaccgccacgagccggacaaaatcagctataagaccccacagctggcccacattctggatgtgaccaatggctgcatcgtctatcaggagcaggtcatgcagatcttccgggagctggcaggtttttcttttggtcaggcagacaatgtccgccgtgccatgagcaaaaagaaacatgccgtcatggaggccgagcgggagcactttgtgtacggctgcaccgatcccggcaacgaatgccccggctgtgtggcaaacggcatctctgagaaagtggccaatgagatctacgatgaaatgtccagtttcgcttcatatgcgttcaataagagccatgcggcctgctatgcctatgtggcattccagacggcctacctcaagtgccattatcccagtgagttcatggcggctttgctgaccagtgtgctggataacacggataaggtcattgaatattccggcgagtgtgcccgccttggcatcaaggtgctgccgccggatgtgaatgtttccaacggcggctttacggcggatggaagcggtcagatccgctttggcctgaatgcggtcaaaaatgtgggccgcaacctgatcgagaatgtggtgaaggggcggcagaataagccttacaccagcctgtacgatttctgcaagcggatgcatggcaatgaactgaaccgccgggcagtggagtgcctcatcaaggccggcgcattcgatcatctgggcaacaaccgccacagccatgtggaggccgtagagggcattctgaagagcattgagaccgactctcggcgcaatctggatggacagctggatctgttctcggtgatgagcggggaagcacagagcggtgcttccgaggatagctatgaaataaagcagctgccggaatacagccataaggaactgctccagcaggaaaaggaagtcagcggtctttatctgtccggtcatccgctggatgcttaccgggaacaatcggcacgcattgcatcccacaccatcaaggatcttacaggggaagatgcccatgtgaaggatggagaaaaagtgcgcattgtgtgcgcggtggtaaaaagccgcatgatgaccacaaagtccaacagcatgatggcttttaccagcgtagaagacctgaccggcaccatggaagtgatcgtattcccaaaggtgctggatgctttccgggattcactgcacgaaaatgcagtcgtcgtgatcgatggcagactgtcggtacgggaggatgaagcttccaagctgctggcagagagcatcgtcccgatcgaaaattacgatccggcccgactggataacggcaggccggacccgatgaaaacggcagcaaagaagctgtatatccgtgtgccttcccgcagcagcagggaatatgcaaaggtggtcaatctgcttggcatttttgatggggacatgccggtgctcctgtatctgaccgataccaagcagtatctgcgtgtgccgcgccatctgtacgcatccggccatccgctgctgttcaaagagctggaaaggctggtcggaacggacaacattgcaacaaaatgacatttccgtgcacgaatcttaacgcaaatccggcgggatggctgtttccaaaataaggcgtttgtgttataatgattcaaggcaaatgaagtgctttggacagcgttaaaacggagaacgctgtgataccattgggtaaatgaagaaacaaattggagggaaactctcgtatggaaaagcagatcaaaacgattggcgtattgacgagcggtggtgatgctcctggcatgaacgctgccgtgcgcgccgtagtccgtaccggcctgcataagggttaccgcatgatcggcattcagcgtggctacaatggcctgctgaacggcgaatgctttgagatgaacctgcgcagtgtgtcgaacatcatctctgcaggcggtaccattctgtataccgcccgctgtctggagtttaagaccaaggaaggtcaggataagggtgcagagaagtgccgcgaactgggcattgatgcgctggtggtcattggcggcgacggttcttaccgcggcgctcgtgagctggcccaccgcggcattccgatgatcggtctgcccggcactattgacaacgatatttcctgcaccgattacaccattggctacgataccgccatgaataccgcgctggagatgatcgacaagctgcgcgataccacccagagccacgaccgctgcagtgtggtcgaggtcatgggccgcaacgccggttatattgctctgaatgttgcaattgcttccggcgctatggctgttctactgccggagaaggaatttgacatgcagcgtgatattctggataagatcgctgagactcagaagaccggcaagcgtcacttcattattatcgttgccgagggtgtcggccatgcacaggagatcgcaaacgagattcaggcacgcaccggcatcgactcccgcgccaccattctgggccatgtccagcgcggtggttctcccactctgcgtgaccgtgtgaacgcttctgcaatgggctaccatgccgtgtgcctgctggagcagggcaagtataaccgcatcgtcggcatgaagggcgaaaagctggtggattaccctgtggatgaagctcttgaaatgaccaagacgcttgacccggtgctgatcgacgtgtgtaacaccatttctatctgatatttataaagccaatactatggagctgttctctcgaagaatcgggaggatggctctttttttgcgttttaacgtaaaaaatacatgaactgactggaactttctgcatttttaaaaaagaaaaatcgtgaatgaaaagtgcatagcttaaaattgaaatttgtggaaggtggtttacgggaaattgtgaaggaatacgcagggcgtgttttactactttggcaggaaaataacgatgatgcgtgaggcaaaaattgtagcacaaaaagccaattttgtcttgaactttttgccgtatgtgctagaataaaagagaaaggcatccttgtgtccaacagatatctggatgtgaatattggaaagtaaattcggaggtaatcacaatggctgatatgtttgcaccgctggtagcacagctgaaggcaaatcccaagacgatcgttttcaccgagggcaatgatccccgcattctggaggccgctgcaaagctgctggccgagggcgtgctgaaggtcgtcatggtgggcaacgaggctgagtgcaaggctgctgctgccgccggtaactttgatatttccgctgccgagatcatcgaccccgagaactatgccggtttcgatgagatggtcaacaccatggtggagctgcgcaagggcaagcagaccgctgaggagtgcaccgctctgctgaagaagtccaactacttcggcaccatgctggtgaagatgggcaaggctgattgcctgctgggcggcgctacttactccactgccgacaccattcgtcccgctctgcagctggtcaagaccaagaagggcgcacatctggtcagctcctgcttcattctggaccgtgactgcggtgaagagggcctgaagcgcattgccatgggcgactgcgctgttaacatcgactataccgataccattgataaggctaccggcgaggtcaagatcgccgcttctgcaaagcttgctgaggttgctattgagaccgctaagaccgcaaagttgttcggcatcgatccgaaggttgctgtgctgagcttctccaccaagggctccggcaagggcggcaccgttgctttgagccatgacgctgtgatcaaggctcaggaaatggatcccgagttggctgtggacggtgagctgcagtttgacgctgccgttgctcccgaagttgcacaggtcaagtgcaagggcagcaaggtggctggtcaggccaataccttcatcttcccctgcatcgaggccggcaacatcggctataagattgctcagcgtctgggtggttatgcagcttacggccccatcctgcagggtctgaacgctcccatcaacgacctgtcccgtggctgcaacgccgacgaggtctacaagatgagcctgatcactgcctgccagtcttgagctgactgattgaaaatagccgccgcattcaccgtacaaaacgggcagaatgttgaggcctcaaaggcagatttcaaaaaatgagtatagaaaagctgagcatctgtgaaaaagcaggtgctcagctttttgcattttcagttccgaaaaattctactctttttgagggaaaaagatgagatttttgctttccgcttttcgttggcgctattttgcaatagcctctttacaggtttgctcagttcttttcgatatacacgctggtggaggggaacgcaaaatccacaccgtcggcctgcatgatgtccataatgttcaggttcaggtcgttctgcatctgcaaaaattccgcgtaggcgttagtcagcaggtaggcggagaccagaatgttgatgctggaatcgccaaagtttgcaagctgtacgatgttggtacccttgttggtgtaagggcttgcgtccagcatggtctgcaagtctttcatcagctgttccagcttcgggcgggtggtgccataggtgacacccagattgaacttgtagggccgcatggtgcgcagggcggcgttctgcacggtggaagagcagatcttactgttcgtcaccacattgatggttttatccagcgagcggatgcgggtggaacggaagttgatgtcgatcacttcgccttccacatcgcccacagtgatccagtcgcccaccgagaagggcttgtccagcagaatcacgatgccggaaaacaggttgctggcgctttcctgtgcggccagcgagatggtcagaccaaccagaccggcaccggcgacaatgctgccgatgggaaagcccacttcttgtgccaacgctgccacgcacagcacgatcaccagcaccttgtaagcggtgtccagcaaagagcagagtgttttgttggagcggatctccgggctgcaggaagccagcagcaggtcggccagatccgatgccgcatacaggccttcgcagaccagcagggtcatgacaaggcggaagcagaccaacagcagtttggcaatgccgggaatggcccagggcagggaagctgccgccagatatacgccaaccgcagtgcacatgcgctggatgggtaccgcaaagctgcgcagcaggatgggagtgccgttaaagtgccacttgcgggccagcagtgccggaatgccctttttgctcagccagcggcgtaccagccatgcggcaagcagaatgagcagcgcgcaccctgcgcgcgcagccagtgcaaaccagccctccagcagcacagagccaaactcaaacgaaagatcacgaatagaaaagatcatgataacctcctgaattttatacgacccatctatgataccataccgcacccacccgggcaagagcttacagagaagggagcttgaaagaattactttgacattttttgcacaaattttaagatgccctcttgacaagctgggcctgccacgctatactttgtgccagaaagttcgtttcagggcggggtgagattccccactggcggtaaagtccgcgaccacccgcaagggtgctgacccggtgcaactccgggaccaacggtatagtccggatgcaagaaacggcaggcaaatcgttgtctacgcgccctgttgcagtgtttttgttgcagcagggcgcttttctatttgtccttcccgttccaaaaaacaagatacgaaaagagctttcggaacaatttttgtaaggggcatcttaccccgggaaggatcattaccatgaaaaaaagcacgactcacaatcttactgttgccgccatgctcagcgcggtggcctttatcctgatgttcattgagtttcccattccgatgctcatcccgtccttcgtcaagatggacttttctgacctgccggctctgctgggtgcctttgctctcggcccggtgtacggtgtggtcatcagctttatgaagaacctgctgcacatcgttatcaagggcacttccactgcatgcgtgggcgagctgtgcaacttcatgctgggtgcggttttctccgctgtggcaggcgttatctataagcaccacaagagccgcaagaccgccatcattggtgctattgcaggcgctgcagccatggctgtgttcagcgtaccgtccaactacttcatcacctatccggcctatgtgcagttctaccacatgccgctggaagccatcctcggcatgtatcaggccatcctgccttctgcagacagcctcatcaagtgccttgtcatcttcaatatgcccttcacgctggtcaaaggcctgctggatgcagtgctgtgcatgctgatctacaagccgctgtctcccatcctgcacggcagaaagtaacttgttctccattttttcttcttctcaaatcatataaccacagcaaaactccccggtcaggtcccgcagtgcggttcccggccggggagctgttatttagaggaaaatatatccgccagcagtcgatcaggctaatgcccctttgtccagccatctgccgcgtaccagccgcacaaggaacagcaccccgcgcatggtcagctcaaagctcatggccatccatacgcccaccagcccaaaatgcggagccagcagggaagccagcgtgagccggatgccccacatgctgacaaggttcagcacaaagcatcccgtgctgtctccggcaccctgcatggcaccgctggcaacgatactggcaccgaacatcggttcggccagtgcttcaatgcgcagcacctgtgcgcccagcgcaataactgccgcatctgcggtgaaaatacccatcaggtttggtgcaaaaatgtacatgccaacaccggtcagcgccatgatgcctatgcccatgccggtgcacagccaggcaaagttttttgccatatcccgacggtttgcgcccacggcctgccccaccagtgcaagggatgcatcctgaatgccatagcctgccatgtagcacaggctttcggcgctcacacccagactgttggcagcaatggcggtggtgccaaggccggatacgatgcggatgagcagcacctgcgccgaggaaagaactgcacgctctgcggccagcggtgcgcctaccttccacaggttctgcaggcaggctttggtaatgtgccaggagccgggcttgcggatgcacagcggtccgtcccgcagcagcaggatggcaagggtcagcacaccgctgatagcggtagcaagggcggtgcccagtgctgcgcccggtaccccccagccaaggccccagacggtcattgtgcggccaaacaccaccatctcacgggtgggattgataaggcagaagttaaagatcacatccagcacgcaggtcagcacgctgataaggcccggtgtcagggcatcgccggaggaacgcagcatggaagagtaggttcccatgatcatcaaaaagggcagggaagccgaccagatggcaaagtaggccgaagcatccgcctgcagggaagggtcggcacccagccatccgggcagaaagcggctgatgccaatgccgaaggccgcagctgcaaggcccaccacaaggttgaagatcatagattggcgcaatacaccgcgtgcatcgtcctgccggtctgcacccagatactgtgccacctgaatggcaaaggacatatatagaccggccagcattccatgcatgagccacgtgctggaactgacgatgccaatggatgccgtagcagatgcaccgatatgccccaccatggctgcgtcgatgtactctaccgcagttaccacgatctgctgcaggatggatgggatgctcagtgtgagcaccacctgcatggtgtgccgcagcggcacctgttcgccccggcgcatctgcgccgaaagctgctcaagagagatggacatgagttctccttttatagaaacaaaaactttttcgacagactgatatactattataagtgcggtgctgcagaaagtcaatcaaacgtggatttttctccgggaatgattgattttttatggatagcgtgatacacttctctcacaaacataaaagaaagaggaactttgaatatgatcgaatcactgctttcggtcgtaggacagcgcggtgtcgatgctctggcattcctgctggcgtttgcccttacggctttgatggactccgtttttcacgataagcttccgcacgaccatggccgcgagtttgcggtgaacggtgcgctttccaagggtaaggcccgtggttccggcctgatcttcgtgctgtgcatcgcactggtatcgctggcattcctgccgttcaaggtggaatacgtcatctacaccatcctgctcattgcatccatgctgtccggctactttgacgatgctgctgaaactgcatggaacgagtataaaaagggtatcattgattttgccattgccattgttgcaggtgtgacctacctcaacttcaacggctgcggtgtgaatttcctgcagtggagtttcactctgccgtatgctgtgtacctgctgctgatcgttattctgatctggaccagcatcaatgtggtcaactgcaccgacggcgtggacggcctttcggcaagtgttgcagtggtgaccatcggtacctacctgctggcctataaaacagagctggccgagtacggcaccgcaggcgttgtgttcatgggtgcgctgctggcctatctgtggtccaacgcaaagccgtccagcctgctgatgggcgatgccggcagccgcgcaatgggcttctttatcgcaatgctgtccctcaaatgcggccatccgtttgccttcctgctggcagctatcgtgttcatcgtggatggcagtctgggcatcctgaagatcagcctgaagcgctttttgcacatttccatcctcaagaacacccgcacccctttgcacgaccacgcccgcaagaataagggctggagcgacgagcaggtggtggcccgctggctgatcatgcagtgtgtggcttcggctttgctgctgctcattgtccgcggctaaaatataggaatcaaaaaagacgcttggtcttgtctgaatatgttttcccggcagggaagcatacagcagtgtatcaagcgtcttttattttatagttctatcattcgttacagcccggccttttttgctgcagcctgcacgacatggcccaccagcaccgaggtggtcacagtgcccacaccgccgggtaccggcgtgatggcatccactaccggctctgcttcgctgaactttacgtcaccgcacagcttgcccttttcgttcacatggatgcccacgtctaccacggtctggccctcacgcaggcagtcggcacccacggcacccatcttgcccatggccactactaccacatctgcttccttgcagatggcgggcaggctctgcgtgcgggaattgcagatggtcacggtggcgttctcgcggtccagcatcatggctgcgggcttgcctaccacaaggctgcggcccactacgacagcgcgcctgccggaaagcggaatgttgtaatacttcaagatttcaaggcaggcctgcgcggtgcagggagcatagccgagatcggtattagtgaacacaccggccagagaatcgtccgtgatgccgtcaatgtccttttccggagccagcgccgcacgcacagtgcggtcattgaactgcttgggcagcggacggaacagcaggcatccgtggatggtatcctctgcgttcacctcggcgatcaccttcagcagatcgtcctgcgaagcatcggctggcagaagaaactgctttacctccacgcccaccttgccgcagcgggcgatcacgccgcgctcgtaggagaggtcgtcctcccgctcacccacacgcaccatggccagcgtgggagtgatgccttttgccttgagctgctcacacagcgccgcattgcgttcgttcatagcggctacaacgggtgcgcccttcaaaatcgttgccataatacttttcctcacttattccgcaatttgttcgtcacggatgcaaaaacagcgtctgcccgcgacacaaattcatccagcagtttgtctgtttttgcgtccaacgcagcagcgcgctcacggtctgccatcagctttgtgttgatgaacacattcaggcttgcggcctgcaaggctgccttgcacagagcggctgcacagcctgcgtccgagacggccatcacgctgcctttggcggcgtattcttccaccagagcaatgccctcggcgcacttttccatgacctcaagtggcacggcacaggcggcatccagcgccttttccagcacggcggctttgtgtgtagcttgctctggtgtgtccttgggcaggccgtaggccgcagccagcggcgcaaaggcatcggcatcggcctgcaccagcgcctccagctctttgcgcagggcatcggcccttgtgttcagggcctgaatgtctgcttccacggcggcatatttctttttgccggtggtcaggttgcccaccatattgcccagcgctacaccggctgcacccaccagcgccgccgttccgccgccgcccggcgtgggggctttgctggccagctctgcgagaaatttctcgcagctcagcttagtcatttccatttgtaaatacccctctctgttacgtaggcatccagccgctggtcgtgctcgtctacggcagcatgttccacccgctgtgcctcaaatgcaatgccgatcttcaccgcgtttttgcagcggggaagataccggtcgtaatagcccttgcccatgccgacccggaagcagtctgcatcaaaagccgtgcagggtacaaggaccagatccagcgcttccggtagcagaatctccgaccggctcaggatgggggtgcggatgccgtactgtcccatctcccagccgtccgggccgggcacagcggctgtaagggaatacgcctcgccgcacaccggataggccaacgttttgccttgcgcctgcgccttttccgcaagggcagaaaggtcggcttcggaaccaaacgctgcgtacagcaggatggtctgcgcattctgcacggcagccagctgccagaggaatgcgcacaaagcggtatttgcagccttacgttcttccgggccgagagccttgcgtgcggcacggcccgctttgcgctgggtctgctttgcttcactgaccgtcaccagagaacacctcgcttcatctgaaggttgactgacttgaaaaatatacaaaaacggcactgcatttttatacaagtataataaacacttcagacgaaaaaagcaagccttttggcaaaatggaagttgaagattctgcagctttctgctatgataaaagaaagcaattcggttcgtgcgcggagcagggtggcttgaagagatccagagatccggggctttctccggaaattgagaggggtagaatattatgtacaatgaaatgatggacaccatcggtctggtcaataccgttgatccggagctggccgcagccatggatcgcgagctgaaccgtcagcgccagaacattgaactgatcgccagtgagaatatcgtctctcccgccgtcatggccgcaatgggcagcatcctgaccaacaagtacgccgagggcctgcccggcaagcgctactatggcggctgtgtctatgtggacgaggtggagaacattgccatcgagcgtgcctgcaagctgttcggcgcaaaatatgccaatgttcagccccactccggtgcacaggccaatctggcagtttattttgctctgctggatctgggcgatactgtcatgggcatggacctgtctcagggcggccatctgacccacggttctccggtgaacatgtccggcaagaactataactttgtctcttacggtgtcaatgccgacggcgtgatcgactatgctgagctggaaaagcaggttaaaaaggtgcaccccaagctgatcgtggccggtgcgtctgcatatccccgtgccatcgattttgagaagatcgctgagatcgcccacggctatggtgcatatctgatggtggatatggcccacattgccggtctggtggcaggcggctatcaccagagccctgtgccgtatgctgatgttgttaccaccaccacccacaagaccctgcgcggcccccgcggcggtctgattctgaccaacaatcccattcttgcaaagcgcatcaattctgccgtgttccccggcacccagagcggcccgctggagcatgtgattgccgcaaaagctgtctgctttggtgaagcactgaagccggagttcaaggaatatgcccgcaagatcgtggagaatgcacaggctctggcagcagagctgcaggcacgcggtgtcaagctggtatccggcggcaccgacaaccacctcatgctgatcgacctgcgtgacgaggagtgcaccggcaaggagctggaagcacgtctggacagcgtgcacatcaccgccaataagaacactgtccccggcgagacccgcagcccgttcgtgacttctggcgtgcgtctgggcaccccggctgttaccacccgcggcatgggcgaggccgagatgaaggtgatcgccgactgcatcgccgattgcatctggcactacgacgagaagaaggacgagatcagtgaccgtgtgctgaagctgacccgggatttccctctgtatcagtaaatatcgcattgtttgaaagaggaagcaccttcgggtgctttctcttccttttttgctgggtttgtgttaccataaacgcaaagacaaaaggagaaatgaccatgaagcgtacagggctgttacatctatattacggtgatggcaagggcaagaccaccgctgccatgggccttgctttgcgggccatgggcagcggaaagcgggtggtgatcctgcagttcctcaaaggcggcaaaagcggcgaggtgccgctgctggaacagctgggtgcaaaggtgtaccgcggcaaggcggggcagaaattcgtgttccagatgaacgaagcggaaaaggaagccacccgccagctgcagaatgcgaacctcacagctgccatggccgaccctgccgacctgctgattttggacgaagcgggcagcgcatgggaactggatatggtggataaagccctgttgcaaaaggctgtgctggaacgcccggcagagcaggaatgcgtgcttactgcccatgctgcgccgcagtggatgctggatgccgccgactatgccacggagatgaagtgccaccgccacccttaccagaggggaatttccgcccggcagggcattgaatactgaccacggcagcaggataccgggtgcatgagtgaaaagcgcaaaaaccgggatggggtatttttcatcttgcatttagcccactggtgtgatatgatgaagacaagaaatcatgcgtgcattttctgagcagacccaccacagaacagggaaccgctccgcaccgctgccgggcagttcccgacggcgttttgtttgaaactacggttagcgcttcctaacagattctgcgtcaacgggccgatgcgcgcagaagatctggaggggaataaaatgattgaaacgatcgtaaaagtagatggtatgatgtgcggcatgtgcgagagccatgtcaacgaagccgtgcgcaaggccttcccggaggtaaaaagggtgtcgtcctcgcaggcaaaagcccagacggtgatccactcggaacagccgctggacgagcagaagctgcgggatgccatcaatgcaaccggctatgaggtcaagggcgtaagcagtgcaccttacgagaaaaaaggctttttctcgtttttgaaaaagtaagcaaaccttaacacacataagggaggcgtatctggatgaggattctggtttacggtgcaggcgttttgggctgcgagctggcccatgtgctgatgcagaacaaaaagaacgttgtcacgctgcttgcacgcggagagtggaaggaaatgatcgaccagaagggtttggtcatccgccactgggtgcagcgcaagaccacaacggaacggatcaaaaccgtggacactcttgccccggatgattattatgatctcatctttgtggtcgtgcaggcgggccagctgccggatgtgcttcctgtgctcaaggccaacaagagccagtattttgtgtttgtgggcaacaacccgcaggcaaagcaggtgctggaattcatgcagcgcccggcggataagatcgcattcggctttcagggcacggcaggccgccgtgaacacgaccatgtggtcagtgtgtacgccagtgccggcatgacggtgggcggtgccacaactccgctttctggcaccttccgaacccggctcaagaccgcctttgacggtgcaaaatacaagctgaccttctatggcgatatggatgaatggctcaagtgccacattgcattcgttctgccggcgtgctatgtgtgctatgcctgcaacggcgatctgcaccgggccaccaagcagcagcgcggcgccattctggatgccgcctatgaagcctgcctgatgctcaaggatgcgggcatcccggtgaacgatgccaacaacaccgataatttccagcccggcacatcggcccgccgtaagatggaagcgatggtgtttaccatgacaaaaacatcgctgggcagattgtgcgtttcggatcacgccatgcacgcagtgtccgaaatgaagtatctggacgaagcgttcgatgctctgcgcaggcagaccggcacggcaatgcccatgtgggaaaagctgcgcaatgaaatgccctcgtgggatagcctgcagcagaaccggaaagcagcaaaataaaacaaaaaagaagcaaaggcactgccgctcctgttttgggtgcggcagtgcctttttgtttgggtctcatttattccagaagtcctgcagggcagcggccagttcttcgcagctgcgcagatagcggatatgccgccagtgaggagggaacagccggatgtattcctgctgggcaaaccggtcgtccagcaaaagcaccgcacctctgtcttccggcgtgcggatcacgcgccctgcggcctgcagtaccttgttcatgccgggatagcggtaggcataatcaaatccaaagccgttctgtgcgtcataataacggcgcagcatttcctgctgcggatttacctgcggcaggcccacacccacaatggcgcacccgatcaggcggctgcctgcaagatcaactccctcaccaaagataccgcccatcacgccaaaacccagaagtgtttcggccgggtccggcacaaactgagccagaaattcagcccgagcggcatcatccagacggctttcctgcacaagggtgcgaatgcccgggtaacgtgctgcaaaatcttcgtgtacctgccgcagatatgcgtagcttgggaaaaaggcaaagtagtttcccgttctggcctgcaccagctgggccagtgcatccgaaactgcctgcacgctggcttcgcggtcgcggtagcgggtagaaatattcggcaggcaatacagccccagattttcagccggaaagggactgtccagtgcgacggcacgtgcatcgctgcagcccagaacactgcggtagaacgagggcggagccagtgttgcactgaacagcgctgcgctgcgccctgcggcaaggctggcatccacaaaaggtgccgggtccagacacagcagctgcaattcaagctctctgccgcgcgcggtaagctgagtgacaaagtggctgtcgtatcgttcagcagcacgggcgatgtcctgtacagcaaaataaagctccagcaactgtgcatgtacttcggcatccgggttcgcttccagccagtcctgcaaaggtgcctgtacggcccgcagcggactgagcagggcagagggcggctcctgcaaaaatacagtactgtcctgtgcatacagcggttcgggcagttccagtgcggggacagtgttttcaggcaaaagactggtctgtgccgggtctgcggcatcggtctggctgctgtgccggggtgcaagctgtatgcaggctttccgggcttccagcagggctttgtctgctttggtcagagcggtctttaaagcacttttgcccttgcccaatgcgcgttttgcctcggtcaggctgcttttacaaaagcgtgcagaatacattgctctggctctgtcgggcagattatgtgcttcatcgaccaaaaacaaccagtcgccggaagaatcaaagaaccgcttcaggtgcaccaccggatcgaacaggtaattgtaatccccaatgaccacatcgcaccactcgctcaggtctagccccagttcaaagggacacaccgaaaaacgctttgccgccccggccagcgctgcgcggtcaaagctgccggtaccgtccagcagagctgtcagtgcatccttgatgcggtcgtagtagccgttggcgtagggacaaagctccggcaggcaggcgggatgtccctctgcgtccggatgcaggcagaccttttccttggcggtcagcgtcacactgcgcagagcaagctctggctgggccgtatgcagccgggtcaaggcatcctcggcggcagtctgggtcgtgttgcgggccgtgagatagaacagcttttctccgttgccttcgcccatggctttcagcgcggggaaaagcgcgctcatggtcttgccaatgccggtaggagcctgacagaacagccgcgtaccgcccttgcagtcggcggtcttgccagcgcggcaggcgcggtagatctcgcccgccatagcccgctgtccgggccggtactgcgcaaacgggaactgcagtgccgcaaggctctgagtacgctttacatcccactctatccggcgctgcgcccacggagcatactggcacaataatttgtcaagaaattcatccagctcctgctgcgtaaagcggcggataaagcggatgatctgatcggtgtctatctgataataagtcagccggacgttcagttccggcaggctttgctgtgcggcataaatggcaccgtacaccatgccctgtgcccagtggcaggggttcatatcctcagtgatctcttccggcggcacagcggtggtcttgatctcgtcaatgactaccgtgccagtctcatcggtaaaaatgccgtcagcccggccctcaagggtaaaagtgatgtcctctgcctgccgctctacggagagaaacacctcagcctgatagccgtctccggcagctttttgcaatttgcggtggatgtgggcaccttccagtgcacggtcaaaccccgtaaaccggctgtcaatgctgccggtccgcagcagaaattccaccagctgccggatgggcagatgaaccgtggccaaagtatttcacctccgcttttgggatacactgacgaaacggtaatttctcttcagacacgattcgggccattctatcgcccgccctattgcctcacggcaacagggtcccaccccagcggacggtctttaaagaaactcccggttcgtcgacgtaaactgattatttcaggccgaacatctccatgcattctgctgccgcttcatccactttgccaaaatccaccgctgcacggtaataggtctccaactcatcgtggcagctcttggcctgtgccatcagggcactggcctgttccagcagttcggcggcagcacgctcgttaaagcgcagccgtgcccggtacgctgccagattttccctgtcaaggaagcgggtgcaccgcacagcctgcacactgggcagatgcaccggatgccagcgattatccgtcaggaaggcaagcttcagctccgggatcaggatatggtcgatcttatcctccgggtgcatggcacatggacaggtaataatgtggtagccccgcgtcagggcttcggcgcgaatcagctccagcagcaggcgggacaccgcgccgtagtcatcccggaacacgatgaacttatccgccaatgcctgtgcagtgccctgataaaacatttcacccttgggggtgacggcggaaagcaggcgcagctcttcgctgccaatgccttccgtgcgcggcatcacccgggtgcacagccgtttgacataacggcgcaccttgtcgaaattggcgctgcaggcttcggcgcggcggctgtccagcaaaaggctgcctgccgatgcaatatatcgtgcagcgcggctgcgcagcagggcgttgcgggcaaacagcgccttgacctcatcggtgcactggtgcagcttttctgcatcgatggtgtggtacaaactcaccaccacttcgtccgcaccgggagcatccggctccaccacatggggcgcagtggcatccacgatggccctgtgctgcccgggcaggatcacgccgtccagactgtccgggtcgctggcacagtggatgcgctgcgtcagctcgccgcgctgttcggcagcacgggcaagccgcttcatcagggtggatttgccgcagcccggcccgcttttgatcaggtacatctgcataccgggttcgtggcgcagcggttcaaaatagcccttgaaaccggcaggcgttgtggcacccagaaagaaatcaatggaatcatgtcgtgcagtttccataatcgaacacctctctttttgttttagagtatgcaaaaggaaggtgtttggttcttgcagcgggaatgattcagtctttatgataggtatgtttgcacaccgtttcaatgttgtcccgcagggcagtaaaatcagcaaaggctgcaggcttgttctgcgggctgcgcagcagagcggcagggtggaaggtacccatgaacaggatgccgcccttttcgtacagctggccatgctccttggtcacggagaaatcctttcggatcatccgctgggcggcaatgcggccaaggcagaccacgatctttggcttcagcaggcggaactgctcccgcagccagggcatacaggcttcgctctcagcaggctgggggtcacggttctgcggcgggcggcacttgacgatgtttgcaatatagcagttcttcgtgcggtcaaggtcgatggcaaacagatatttgtccagcagctggccgctgcgccccacaaagggcagaccctgctcatcctcattctggccggggccttcgcccacaaacagaacttcggcatcttccacaccctgaccgaacaccacattggtgcgggtcttgcacagctcgcagcgggtgcaggcaagacagcttgatcttaatgtttcccaatccatggcggcttgatctcctcttgaaacggtatgatacttaattcacaaatcggaacagcttttctcctaaaataatagtacaaaatctaggatggtacgatgcattgcatgaaatgacgaatccacttaatgcctcttttagtatacgacttttcggcaacatcatcaatacagtggccgacaatctttttaatgacatgttcatccacaccggctttctttgccgtggtgacgaactgaaaacgaccatcatgaggacgatgccggggggcaaaggcctaaagcattcacgacgaatgcgttgccctttctgtgtgtgttttggctggcgacttaacgataccacaggacgatttgctcatcatgaatgtggagaaatcacacgataagacgttgctttattaaaagaataaacaaagagtatctccgcgcgttgattttaaatcaatctgcattgataattgaaaacgattacacatgcagatttcaaagcacttatacaaattgtatccgctttctctttgcagagcgcggctggatgtgttataattaaaatagttttctgcgatgcattttcaggcggtagtgccggacggcagcgcgggagaaaccggatagcgggagagtggaacttttggagttggaacaggcaaaaaagcgcgtggaagaattgcgcgctgtgatcgagaaaaacaatcggctttactatgaccaggatgccccggagcttgaagattttgagtatgatgctctgacccgggaactgaaagaattggaagcgcagtttccgcagctggtcacggcatcatcgcctacccagaaggtaggcggcacggccagcagcaagctgcccaaggtgacccatgcggtaaaaatggaaagcctgctggatgcattttcgtatgatgagctgcgggattttgaccgccgcgtgcgggaagccggcatagagccggagtatgtggtggagatcaagatcgatggcctttcctgcagtctggaatacgaaaacggtgagctggttcgtgcctctacccgcggcgatggcgtggtgggcgaggatgtgaccgccaatgtccgcgccattcgcagcattcccaaaaagttgaaggatgcacccgaatttctggaagtgcgcggtgaggtatatatgccgcatggcgcgttccagaagctgtgtgcagagcaggagctgcagggcgcggcaccctttaagaatccgcgcaatgcggctgccggttcgctgcgccagaaggatgcaaagatcacaggaagccggggcctttctatttttgttttcaatgtgcagcagatccgcggcaaaacgcttaccaagcatgctgaaagtctggattacctcaagagccttggtctgccggtctcgccgcgctatcatatcgtgcatgacattgagcaggccattgccgagatcgagcagatcggtcagaaccgtgccaaactggattttgatatggatggtgcagtgatcaaggtgaacgattttgcacagcgcgatttgatgggttccaccaacaaattcccacgctgggcaattgcgtttaagtatccgccagaggtaaaggagacaacgctgcgcagcattgaggtcgcagttggccgcaccggtgttcttaccccgacggcctgctttgaccctgtctttctggcgggtactaccgttgcccgcgcgaccctgcacaatgaggattttatccatcagttcggcctttgcatcggcgataccattcaggtgcgcaaggcgggtgatatcatcccggaagtgatcggtgttaccaatcacgcagaggatgcacagccctatgagatgcccacggtctgcccctcctgcggtgcgccagtcgttcatctggaggatgaagcagctctgcgctgtgttaaccccgagtgcccggcacaggcactgcgcaatatcatccattttgcttcccgcgatgcaatggatatcgagggccttggcacagcagttgccacccagctggtggagaaggacatggtgcactctgcagcggatatctacacgctgacgcgggaacagctgctgacgctggataagttcaaggaaaagagcgccgataacctactgaacgccatcgaggcttccaagcagaacaatctggataagctcctgttcggctttggcatccgcaacattggcgataaagctgcagccctgctggcagagcatttcggtacgctgcaggctgtccgggaagcaagtgcagagcagatcagcgagatcgatgggtttggcggcgtaatggcgcagagcgtcgtagaattctttgcaaaagagggaacgaccgaccttgtccatcgtctggccgatgccggattgaatatgcagtggaagggcgaaccgaagggtgataagctggcaggaaaaacgctggtggtcaccggcacgctggaaactctttcccgcaatgaggcggaagcactgatcgtgaaaaacggtggtaaggccagcggttctgtttcaaagaaaacggcctatgtcgtggcaggcacggcagcaggctccaaactgaccaaggcgcaggcgcttggcatcccggtactgaccgaggcagaatttctggcaatgatcagcgacgaaaacacctgataaaaccgctccaatggatatccccgcagttttgtgctgcggggatatttttatgtccgcaggttctatccggcagggacaggcatatactcatagcaggcaatgagcctgaaaaaggagaggacagtgtggatgagtattatcgggcgatacgcctgcttccctcatggctggccgggccattgggccagctgccagcacagacggtagcgcagatccatgaacttcggttccggacaggctgtggtgtttttgttacactgtcgggtcggcagctcccgctgcaggacctgccggagtgcccgctgcagctgagggagtgtgtattggatcagtttcagatcgaagagatctttcacaccctgtgcggcggcgcggtacatgcgcaccagacggagcttgcgcatggatttctgaccacaccctccggctgccgggtgggtgtggcaggacgctatgtggatcgcgacggccagacggttctgcagcaggtgcaggggttgaacctgcgcattgcaagggcggttccggtacagctgccggacgaacttctggtgcaactgaaaaagcattttattgggatgcttttggtcggcgagccggacagcggcaagacgacgctgctgcgtcagatcgcacgagaactggccgggatgcagcggcgagcctgcgtggtggacgagcgctgcgagatctttccgccgggtgattccgagaagatgccgccgctggatctgctgtccggcatccctaaggaacgggctgtgcagatggcactgcgcacgctttctccgcaggtcattttgctggacgagctgggcacgcttgccgaaactgcagcgctggagcagggcttttacagcggggtggactttgttgcaagcgttcatgccgcaagcgtggaagaagccgcccggcggccgcaggtgcaggcgctgcagcggcatggaatgctgcgtgtatttgtactgctgcacggctgcacagcgccgggaaaagtccggcaggtctgcacggtatgatgcggctttttcattgggcagcggctgcactgctcctgctgtgcgggtggctgaccggttcggcatttcaggtcagaacagagcagcatatcctgcagctgcagcgcaccgtggagctgttgcagcgcatccggcaggagattgcttaccgcaggctggatctggaacagctgcagcggtgtctcgtgcaggaaaagctgctggaaagcgatgcagcacaaaaactgcaggaaattccggcaccggaaagatttgatgatgcggaacgcctttgctttgagcagtgctttgccggccttggccaaagcgaagcggcacaggaatgcgaacgactggattattactctgcccgttttgaagcattcctgcaccagacgcagcagaaagcggcatccgggcaaggcttaccgtgcaggcttggccttgcagccggcgcggtggcagcactgattcttttgtagtggcaggaggacgaaaacttggagatcgaccttgtgttcaaaattgcagcgatcggtattatcgtggccgtcctgaaccagctgctgatccgttccggccgggaggatcaggccatgatgacgacccttgcgggtcttgtggtagtgctttccatccttgtcaagcagatcagcgcactgttcgttaccatcaagtcgctgtttgcactatgagtacatctttttccattctgggggcagtggtcgtctttgcagcggcgcagcttctgctgcggaaggatgcaccggcctatgcgtttctgctgtccgttggcgcagcattgtttgtgctgctgcagcttggagcggcggtgcaggagctgcttcggaatatattggctttcagccgccgggtggacgggcctgcatttgcctgcctgctgcgctgtgccggaattttgctgctgaccgattacgcgcggaccctgtgcgaagaagctggtgcggatactttggcatggtgcgccgggtttgcgggccgatgtttggttctggcggcagcatttcctctgctggaagagatctgccagaagatctgggggcttgccgcatgataaaaaaattcctgcaaaaagcggcagcgtttgtattatgcacagtatgctttctggcttttgcacctgatgccgctgcggcacagctgcagggcctgcccggacaggagctttggcagccttatctggaaaaagctccgcaaagcgcagagtcctttgccaaagatccgctcaaatctctgctcgcgctcctgccgggatcaccggcagagatgatccggcagatggcacactgctatgcggatgttctgctgtttttactgttgctgatcgtgctttcatttctggtgggaggagcagccgacagcgccttgttggaactggctgcggctgtgggctgcggcactcttttgtggggagatctgatcagccttgcacagctgatctgtgagcggatggaggggtggaaaaactaccttctgggctttcttccggtgtacagcggtgtgctcgctgccggtggagaggtgaatgccagcacagcggcaagcggtctgctgctgaccgggctgtgctttctggcacagggtacggtgcttgtggtcagtccgctgctgcagagctaccttgcggtaagcatggcgtgctgcatcagcacccagcaggggctttcggaaacgtgccgtgccatgggcgctttgctgcgcagggggcttgtctgggctgggcggatttttgcagtgctgttagggctgcaaagagcggtaacagttcagctggaccgttctgcactgcggttgggccagctgcttaccggcggcgtgccggtgatcgggcaggctctgagcgatacggcagaagtatttcttgccggaatgcagctgctcaaaagcagtctgggttttgcggcacttgccgtgatcggggccgaatttctgccactgtatctgcagcttctgctccatttgctattccttgcaggatgcaggcttctgtgcggccttgcggagaaccggcgctgtcaggcgctgtttgactgcatggccgaagcggtaaaatgcatggcagcagtaacggcactgttttttgaactgctgacggtaggcgtggggcttctgatgatgacgggaggcggataggaaatgcacgcatttcagacggcggcatcggcgttctgcattgcctgtatctgtgcggagatcacgacgctgctggcgggcgcaggctgggcgggcagatgcataaaagccgttgccgggctatatattctagtgatcctgttccggctggccccgcagatgaagctggaactgaaaagtgcagcggcggctgctccggcagcggtcagcatccagagtacggagacatcgctcttgcagggaacgcaggaacggctggaagcggatctttgcgcagagtgtgagcggcgctttggtacaaaggtgaaactggagatcacactgacccggacagaacagaccgttcgggcagaaaaggtgcttgtgatcctcccggcggcgtgcacatccgcagagcagagccggatcgcggcatatctgcagcaggagcttggcatggcaccgatactggaagtacaggagggcaccgaatgaaacaagcagggggcatttcgttcggagattccgtgaaagattttgcccggaaatgtaaagggaaacagggcagagcaaggcttgctgcggcagtaggcattctggcaatgctgttgatcctgctgtcggaactttttccgcagaacacggcagcgggcagcacaaaaaacacaaagtctgcccagagcagcacggaatatcaggcacagctggagaaccggctggaacatctgatctcacagatgagcggtgcgggcaaaacgaccgtgatggtcacgctggagactggggaagaagccatttatgcgctggatacacagtccggagaaatgcagtcccagcagacccatgtcctgctggaagatggttcagccctgaccgaaacggtatgtctgccgcaggtgtgcggtgtggccgtgctgtgcgagggcggcggagacatccgcgttgctgcccggatcaccgaactggtaagcgcactgctggatctgccatccaaccgcatttgtgtggaacagcgcaagggctgagaccctgcagcttttataaggaggaacgatttatgagagcactttccagaaatacccgcagggccacagctgttacattggctgccgcactggtgatcgccgtatacttgaactggcagtacgcccgcagcgatgtgcccacggaactgccggacaatgctgcaatggtcgcggcagaggctgaggatgtcccggtacaggcgcagacggttctggatgagctgcccacagaggccgaagcggtgtccagcgccaacaaaaactatggtgaagcgcagcttgtaagcgttgccagtgacagcggtgcaaagttttttgagcaggctcggcttaagcgacagaaggcccacgatgaggcgatggattccatcaagaaaacgatgaaatcctcgtcgctttccgcagaggaaaagaaggaatataccgcccagatgaccgcaaatctggaagatctgaatgcggagaatgagatcgaaacgctgatcaaagccaaaggttttgcagactgcctgtgctttttgcagtccggccgggcagaccttaccgtgatgacctccggtgaaccgctcacagcggcacaggtggcacagatccgggatgtggtgctgaacaaaagcactgtgactgcccagaacatcacggtggtggaggtcaaataagaaggtgcggcagagttttccgaaacaagtattgaaatcgcacccgctttgatggtataataactctatcaataaagaatgatgttgtcctgcgtatggcattgatcgtttcaggcaggaccatttcaaacaagaaaaagcaggctgtgcccgcttttgaatggaggacaacacaatggattttcagaatacagatcttcggggcggcagccttcagatctccaccgaagtcattggcaagatcgcacgctgcgcagcattggaaattgacggcgttgccgaggtttcctgcggcagacaaaataaaaagctcaaggatctgctggaagcatccagcatccagtctccggttgtggtggaaatgcgggatggtaccgcaaacatcactctgaacctgatgatgagctttggcgcacgcattcctgctgtggccgaaaaggtgcaggaaaacgtgaagaacgctgtgcagaacatgaccaatgtcactgtgagccgcgtcaatctggtgatcgccggccttgcagaaaccactgcagcagagaagtaaaataaaattcagaattggaagccgatcctctctgtgctctggccggagaggcttcgtgctgcgagaggaacattatggaaaatattttgccccgtagagaagcacgcgagaatgcatttttgctggcattttcgcagacctttggtgatatcccgctggcagaggccattaccagccatgaagaaaacgatgaagagcaccctgtggatggtttcagcaagcatctgctgaacgcatactacgatcattctgccgaggtggatgatgagatccgtgcacatctgcgcaactggaccatggagcgcctgcctcgtgtcagcctgaccatcctgcgtctggcagttgccgagatgctgtttggcggcgagaataagcccggtgttgccatcaacgaggcggtggaactgacgaaaaagtatggtgcggacgaagattaccagttcgtgaacggtctgcttggcgcagtggcccgggatcacggtctggacgcggagcaggccgaacagtgagccgttatacgcttggcattgatacaagcaactatgcaacctctctggcagtgtttgatacagctggagaggttgtttgcgcaaagaagcgctttttgccggtaaaagcgggccagctgggcctgcggcaaagcgatgcactgtttcatcatacggtcgcgctgccggagatgatgcaggaactggcgcaggaatttgatctgacgcagatcgatgctgtgggcgtatcgcaaaagccccgcccggtagaaggcagctatatgccttgctttcttgcaggtgtcaatgctgcaacggcctttgcacatgcaaaagggatcccacttgtgctgacgacccatcagcagggtcacgctgccgcagcgctgtttgcagctaagggggaacagctgtttgctgaaaaagttctgctgttccatatttccggcggcaccacggacctgctgctctgcgatcaggtgcgccggatcacaacgcttggcaccagcacagacctttatgccggacaggctgtggaccgtgtgggggtcaggcttggctttggcttcccggcgggtgccgaggtttcccgtctggctgcacagtgcactgaggagatcaagccaaaatccagcgtgaaggggatgcaatgcagcctttccgggctggaaaaccagtgcaatgccctgcttgccgcaggcaaaacgccggaatatgtgtgcaagtactgcctgctctgtgtggcggatacagtggtaaaaatgaccaaagctgcacagaaggaataccccggcctgccggtggtatgtgctggcggagtgatgagcagcgatatcatccgtgcatgggtgcagaaacgtctgccgcaggtctactttgtgccgggacagtattccagcgataatgccatcggtgtttcgatcctggcagcgcgggaggccggattatggctgaagtgattaccgtttcagcactcaaccgttatgtaaaaacgctgctggatgccaacgatgctttgtttgaccttgccctgcgcggcgagattgcaaattttgtacagaatgcgcgcagcgggcactgctatttttctctgcgggatgatgtctgcagcgtcaaagcggtaatgttccgcactgatgcacgccgccttgctttccgcccggaagagggaatgcgtgtagtcgtgcgctgccgcgctaccctttatgagcgcgacggcgcatttcagctgtacgtgaacgatatgttcccggatggcattggtgccgcacagctggcgttggaacagctcaaggcgaaactggagcaggagggcctgtttgcaccggagcacaaaaagccgctgccggaatttcctaaatgcatcggtgttgttaccagcaagacgggagctgccctgcaggacatccgcaatgtgctcacacggcgctggccatcggtacggctgctgctgtgtccggtgacagtgcaggggtttgaagccgcgcagcaggtggccgatgccatcaaaaagctggatcagcgcaaagaggtggacgagatcatcgttgcacgcggaggcggcagccgggaagacctgtgggtctttaacgcagagatgatcgcccgggctgcataccgctgcaaaaaaccactgatcagcgcaatcggccacgagatcgactataccattctggattttgtggcagactgccgtgcccccacaccttcggctgcagcagagctggccgtaccggatcgggcagagcaggaacggatattactggatttgcagcaaaatattcgcaaaaatatgcaaaaacgttttgatttatgctataatggtctagaacaatacaactttgtgttggagcagggccttgcacgccgaaactggcaaaaaagtcagggtcagctgcagcaggtgcaggatgccatccgtcagcagatgcagaaacgcttgcattctgcagaattgcagctgggtcatgcggcagcacttactggttcgctggatccatacaaggtgctggcgcgcggctacacgatggtcacagcagccaacggcactattttaaatgcagatgatctgcagccggaaaaaacaatctatgttcgcagcgcttcccgccgtgcaaagtgcagggtggaagcggtggaggagatcaatgagaacacccaaaagttttgaggaaggcatggaacggctgaatacgctccttgcacagatgcagagcgaggatacgacccttgcagattcggtcaaactgtatgcagaggccgcttctctgatggagtactgccatgctgcactggaaaaaacatcgctgcagatcgacgagatcgacgcaaagcttgcgggcacagtgcaggaggaaagctaatggactatcaggagcagtatcagaattatctggcgcaggcaatggccgcgctggaaaaggcttgcggccgttttctgccggaagaatccgaggtgtgccgtgcggcacgctacagcctgatgggcggcggcaaacggatccgtgcagttcttgttctcagcgtctgcgatatgctgggcggcagtatgcaggcggcacagcagtttgcagctgctgtagaaatgctgcactgctattcgctcattcacgatgacctgccctgcatggacaatgatgatctgcgccgcggccgtccttcctgccacaaggcgtttagcgaagcaactgccatgctggccggtgatgtgctgctgacagaagcatttgagacagtcgccaatgccccggcagatgcgtctgtctgtgtacaggcagcgcgggcactgggtgcaggcgctggcagccgcggcatggtctatgggcaggaactggatctgaaatacgaagcgttggccgcaacagaagaccagcttcggctgatccaccgcaataaaacgggtgcgctgatcaatgcagccatccagatgggtgcggctgcggccaaagcagatgaagcacagtgcagagcgctggaacagtatgcttatggtctgggtcttgtttttcagatcgtggacgatgtgctggatgttaccagcacaccggaacagctgggcaagcccattggcagcgacagcgaaaatggaaagactacctttgtgaccctttatggtgcggaaggtgccatgaagcttgcacatgacctgaatcaggagacctgcacggaactgcaccggaattttggcgaaaaagctgcgtttctggaacagcttgcgcagcagcttcttgtgcgtaaaaactaaaaataatccatacagaataaaggaaaaagattatgcagcttattcaaaacatcctgtctttcaatcagatccttacggtttcactgctcggctggcttgtggcgcaggtgcttaaaaccatcatcaattttatcctgctgggcaagttccagttggaacgcatgtggggtgatggcggtatgcccagtgcccacagcgcaacggtctgtgccatggtcattgcaaccggacgctgtgtgggtgttgactctgccatttttgcagtggcaagcgtggtggcaatcattaccatgcacgatgccatgggcgtgcggcatgagactggcgagcaggccaaggtcctgaaccagatgatcgatcagtggatcgaagtgagcgagaagaatgctcctttcctgcagaacatgcatctgaaggagatggtcggccatacgccgctgcaggtcgtggcaggcgtactggtcggtgcagccgtcggcttcctgtatccgctggcttgaggcattctttttcacgcaggaatgcactgcagcaacagaaaatcttcatttgaaggacgtgtgatttatgggagcattgctgctggacagcatcaatcagcccagagatttaaagcaactgaatgaacagcaggtgaaacagctgtgcgcggagatccgccagtttctgctggagaatatttccaagacgggcggccaccttgcctcaaaccttggcgtggtagagcttaccgttgcactgcaccgtgttctggatacaccacaggacaaaatcgtgtttgatgtcggtcaccagtgctacacacacaagatccttacgggtcggcgcggacagtttgataagctgcgccagctcgacgggatctccggtttcccggacccgaacgagagtgaacacgatgcattcattgccgggcacggaaacacggcgctttcgcttgcgatcggcatggcgtgggccaaaaagctgcatcatgaagcagggcttgtggtcgcggtgatcggcgatggtgcctttaccggcggcatggtctacgagggcatgaacaacattgaacagctggacaaccttcttgtgatcctgaacgacaacaagatgtccatttctaaaaatgtcggtgcacttgcccgctatctgactcatttgcgcacgaccacggcctattttgatgccaaggataatgtgcgcagttttttggatggagtaccgctggtgggcgctccactgaaaaaaaacatcaccgagtgcaagacgcttttgcgtcgggcaatgtaccactctaccatgttcgaggatatgggcttccagtacatcgggccggtggatggccacaacgtggaagagctggaacgcacactgcgcaccatccgcaaccggcaagggccacattttctgcacgtgatcacaaaaaagggcaagggctatcagccggccgaggtaaaccccggcaactatcacggcgtgtcggcatttgatccggatggaatgcccgacccggaggtggcaccaaaggaatcgttctcgacggtatttggcaatgctcttgtgacggaaggcaaccggaacccgaatatctgcgccatcactgcagcaatgaagtatggcaccggcctgcagttttttgcgcacagccacccggagcgtttttttgatgtcggtatggcagaacagcacgctgtgacctttgctgccgggcttgcaagtcagggcatgctgccggtggtatgcatttattccacctttctgcagcgttcctatgatcagatcatccacgacgtaaatctgctgcgggagaatgtagtttttgccatcgaccgcgccggttttgtcccagcggatggcgaaacgcatcagggcatttacgatcccgctttcctgagccagcttggaatgccgctgtatgcgccttccaattatcaggaactgaattactggctgcagaagctgttgagtgaccgcttccatggcccacgggcaattcgttatccccgcggtgggcaagatgcagctctggcggaatttggctgcaccggcgaagattatgatttcctgcgcaaggcggatgatgcaacaatcgttctggtgagttacgccgacgaactggccgaccttttgcaggcagaacgtgaattacagcaaaaaagcattgcgtgtgatgtgataaaggctgtaaagctgtatccctttacaggtaaaatgatcgctgatctgtcgaaatataaaacaatcctgtttgcggaagaatgcattgcaaacggaagcattggtgaacatctggaatatgctttgcagcaaaacggatggaatgggcgctttatccattgcgcggtgcggaacgcgtgtcttccgcatgccagtgtggcacagatcaaacaggcaaccggtctggatgcagcgcatcttgtacaggccgtgcagatggccgtgacgaaaggagaaaatttactgtgaagattcgattggaccaatatcttgttcagcatggtctgacacagagccgtgagcgcgcaaaggcgctgatcatgtccggcatcgtttttgtcaatgagcaaaaggtggacaaggccggagagatgattaaggaagatgccaaggtggaagtgcgcgggcacgacattggctatgtcagccgcggcggcctgaagctggaaaaagctatgaagtgtttcccgcttacacccaatggcaaggtctgcatggacattggagcatctaccggcggctttacggattgtatgctgcagaacggtgccgtcaaggtctatgcggtggatgtcggctatggacagcttgcatggagtctgcgcacagacgagcgcgtagtgaacatggagcgcacgaacatccgcaatgtcaaaccggaggatcttgccgaacagatcgagtttttcagtgtggatgtctcgtttatctcgctgcaccatattttcccggtggcacaggcaatcacaacgccggatgccatgggcgtttgtctggtcaagccgcagtttgaagctggacgcgaaaaggttggcaagaacggtgtggtgcgcgaccctgctacccaccgtgaagtgctgcacaatgccatgggctatgctgctgcaaacggttttgctgtacgcggattggatttcagcccggtaaagggacctgagggcaacattgaatacctgatgttcgtgcagaagagcggtgaaccttccgtgctggacgacagcgttgcagagcaggtggtggcggcaagccacagcacgctggaccgctgagcggctccgccatcagaccagaaaaaggagcttcccgcatgacgatctatatttcgccgaatcccggcaagacctctgccaacgagatcgcactgcgcgcggcgcagattctaatgaaccatggtgcagctgttctgatgtgtgaacagccacgcacaagctgcagcacggccggagtggtttatctgccgctggaggaatgccttgagcaggcagatgtgatcctgaccattggcggcgacggcaccattctgcatgaggcaaatctttcgcttcggtacgcaaagccgatcttgggcatcaatctgggacgctgtggttttctggctacctgcgaagtcagcgagatggaagccaagctctccgctgttgcacggggagagttcagcgtagacaaccggatgctgctgtatgtccgcgttcttggccacgatggctgggagggccacgccctgaatgacgtggtggtcacaaagggccgcctgcagcaggcgatcgatttcagcatttactgcgatgatattttagtagagcactaccgtggggacggtgtgatcgttgcaacgcccaccggctccacagcgtattcgctggcggcgggcgggccgatcctggattcccagacgaagggcgttgttgtaacgcctatctgcccgcacagtctggccagcccggccatggtgtttgcgcaggagcgcaagctgaatatctgtgtgggacaggtggccgatgatgaagtgtttatcagctgcgatggcagagctggctgtccgctcaaggccggcgcaacggctgaagtaaggctctccgatcaggtggtaaagctgatcaccttcggaaaagcagatcagttccaggccattgaccagaagcttcgcagcagacgataaaggggaggcgagtttacgatggcgcgcagccgtaaggaagatgtaaaaagcaagggagaacgtcagcaggtgattctccggcttgtgcaggaacacccgatcagccggcaggaagttctgctggatcacctttccaaagaggggttcgaggtaacacaagccaccgtttcccgcgatatccgggagctgtgtttggtaaaagctgccacggcagaggggtatcgctatgtctccagccggaacgaaagcttcaaccccaaaacgcagggaaggtttgaaacgatctttcatgaatccgtgctgggggtagattacgccggacatgttgtgctggtaaagtgctattctggcatggccaacgccgcatgcgaggtttttgacgcattgcagtggaaaaatgtggtcggcacgctttcgggcgacgacacgttcctgatcgttgcacggtcggagcgtgatgcaaaaacgatctgctcggaactgacgagacacattggataaaaataacgcgggagaaaagatatgctgagcagcctgcaaattgaaaatgttgctgtgatccagaaggctgaagtacatttcaagccgggcctgaatgttcttaccggtgagactggtgccggcaagtcgatcctgatcgattccatcaatgcgatcctgggaaaccgcacttcaaaggatcttgtgcgcacaggggcctccaaggcggtgatccgtgcagcctttgaagaggtgcccggtacggtgctggacagccttgagaaggcgggctacgagcgctcggatgcactgatgctcagccgcgagatcacagccgagggcaaaagcacctgccgcatcaacggaatgcctgcaacggctgcggttctgcgggagctgtgcggaggacttatcaatatcaacggtcagcacgactctgtgggccttctgaacccggcaagacatctgggcattctggatgattatgcgcagaacagcgcggagtttcaggactattatgtcctgtaccgggagcttgtgcgcatcaagcgggagctggatgccatgatcaccgacgaagctgaaaagcagcgcaggatcgatctgttgagctatcaggtgcaggagatcgaggatgccggactgaccgccggagaggaacagactctggaaagccgccgcaagatccttgccaatgcatctgccatccgggataagatcgcacagagctatgcattgctttcgggcgatgacgaggcctccggcgcagtcgatctgctgggcgaggcatccaatgcagtggatgctgccgcgcagctggatgatgcacttgccggtgcatccagtcagctgctggatctgtattacaatgcaaaggatgttgccgcagatctgatcggtcggctggattcctatgataccaacgatgcggagctggacgagattgagcagcgtctggatctgatctacaagctcaagcgcaaatatggtgatacggtagaagacgtgatcgcttttggacagaatgcaagggaagaactggagcgcatccagtcctcacaggagcggcatgaccacctgcaggcagaaaagctccgcctttattcgctggcccgtgaaaaggcagaagcactgacccagacgcgcctgcgcgcttttgaagagctgaacaagcgtatttccggcacgctggattttctgaacatgccgggcgtgcgcatgacactgcgccatacccgcggcccgctggcaagccatgggcaggacagcatcgagttctacatttccacaaaccccggtgaggcgcccaaaccccttgcaaaaattgcttccggcggcgagctgagccgcatcacgctggccatcaaaaatgcaatggccgataaggatgccgtgcctaccgtgatctatgatgagatcgacagcggtgtttctggcaaagccgccgggcgtattggtgaggtactgcgccagagcgcacagggccaccagatcttgtgcatcacccatacagcccagatcgctgcactggcggactgccatctgctgattcagaaaaatgtagccaatgaccgcacctataccgagatccatccgctggataaggagggcagggtggaagcactggcccggctgatctccggcgaccacgttaccgagctttcgcgtgccaatgcccgcgaaatgatgggtcttggcgcaaaataagccgctgcagataaggggttgacaagcccgaagcattgtgataaagtagtccttgttaatggcgatgaagggaacaagtaccttgaagtgttctgtccagagaaaccccggttggtgtaaggggccgcagagcagcaggggaaatacctcccggagctgcaggctgaatgccgttcaggttaataggctgtgccgcgtgcgagcgttacaaacgcaggagtgtctctctactctggggtgtgcactcgtgaggtcgtttctgtgaggaagcggcaaacagaggtggtaccgcgaattttctcgccctctgccaaattcatttttggcagggggtgttttatttttccctctgcccacaaacaggaggaaaaaatcatgactctgtacgaagaactcaaggcccgcggcctggtggcccagatcaccgatgaagagatcatcgacctgatcaacaatggcaaggcaaccttttacattggctttgactgcactgccgacagcctgaccgcaggccactttatggccctgaccctgatgaagcgcctgcagatggcaggcaacaagcctattgccctgatcggcggcggcactaccatgatcggcgacccctccggccgtaccgacatgcgcaagatgctgaccaaagaggatatcgcccacaatgccgcatgcttcaaaaagcagatggaaaagttcatcgacttctctgagggcaaggcactgatgctgaacaatgcagactggctgctgaacctgaactacgtggaactgctgcgtgatgtgggtgcctgcttctccgtgaacaacatgctgcgcgcaaagtgctacgagcagcgcatggagaagggcctgtccttcctcgagttcaactacatgatcatgcagagctacgacttctactacatgttccagcactacggctgcaatatgcagttcggcggcgacgaccagtggagcaacatgctgggcggcaccgagctgatccgccgcaagctgggcaaggacgcttatgctatgaccatcaccctgctgaccgactctcagggcaagaagatgggcaagaccgccggcaatgccgtctggctggatcccaacaagaccagtccattcgagttttaccagtactggcgcaatgtgggcgatgccgatgtgatgaagtgcatccgtatgctcaccttcctgccgctggagcagatcgacgagatgagcacatggaaggatcagcgcctgaacgaagctaaggaaattctggcttacgagctgaccagcatggtccatggcaaagaagaggccgaaaaggcccagaatgctgcccgcgcactgttcagcggcagcgcaatggataccgagcacatgccttctactcagctgaccgaggccgacctgaccgatggctccatcggcatcctgaccctgatggtcaaggctggtctggcagcatccaacggcgaggcacgccgtctggtcgtgcagggcggtgttctggtggatggcgagaaggtagccgctcccaccgttggcttcactgctgagcagctggcaaagggtattgtgatcaagaagggcaagaagatctaccacaaggtcactctgtaaaaatattgaacatgaaaatgccggtgtactctgttttggagtgcaccggcattttttcacttgatggaggattgctcgcttgcttgcagaatttacagctcgtaagccttcttcaatgcttcgtaagctgcatcctcattctctgcgtggaccagcagggaaatatccagatcgctggtggtgataagcagtacttcaatgccggccattgccagagaattcagtgcacgggcagctacgccgcagctggtgaccatttcttcaccaaacaggttcagcttggaataacccacgctgatcagcggggaagccttggcatccttgtccagatttgcaacggaaatagccttcatcaccagcggaagatcactgctggaagcggtaaagctgaaatcgatggtggtgccatggggtgcactctggctgatcatatctacgaccacaccgttatctgcaaagatctgcaggtaacgtgcgaggctgttgcccttgaactctacatcctgcacactgatcatcatgaggctcggctcaatattgatcttcgatactccgtacataaggatcctccgttctgcccgaaaggcgggcttcaacaatacaaaaatattcaggtaagctgcaaaaactccgggtcgatattttcccgggcaatggactgaatcatttccaggctgaaatccggatacgtctgccgtactccgtgggcctttgtaagggcttcggtataatcgcggaacaggtaggtacgcacattggatttgcctgcatcatagtgggtcaccgtcggcagaagtctgggagagagcacgctgcaacggacagtgccgtccggttcggtcgttttttcaagctgaaccgataaaattgcgccgaccagctgatcgggcttttcctgcgtgctgataaaatttcccagagaataggtggtgaatacctttctgccatctgctgcagtcagccattgagcgttctgcaatacatgtggatgcgtacctacgatcaggtcagcaccccaatccgcaaggctttgtgccaatgcacgct

SEQ ID NO: 1234 - DNA, 5275 bp, Unknown
  gut microbiota DNA sequence
gcatccacaacggtatgactgttttccacgccccagtgcacacccaccaccacaaaatctgcaagctgacgtgccgcttttacctgctgctcgatcacatcggtctggctggtatagatcacattggcctgcatggagctgttctgcgggatgccattggtatgctctgtgtaggaaagatatgcgatcgttacaccattgacagtctgcagcgggatatgaccgtagtcctctttgcccttccacaaaccggtggtcactacatcctccggcatactgccccagaagcgcagggtagcggcaatgccggaagcgcctttatcgtaggtgtggttattggacaggctgaacactcgcacacccgcccggtaaagcgcacgggcgcaatcgcccggcgtagaaaagcatgggtaggaggatggctccaattcatccgtgcagagcgtttcctgattgatccagttcacatcatgctgtgcataaaaaggcgcaatatgttcgtaacagtaatcgaaactgtaagcttcctctccggaagcgcggcgctgcgcctgcttataaatgggtgcgtggatcagattatctcctgttgcagaaaagcggacagtctgaaccagcggctgcggttccggctctggcgcaggctctgcttcttccggctgtgatacagtggcagaacctgcagaagagctttccgtgctcaccggttctgccgtcggtatgctttcctgcagaaagaactttggcagcaaaggcaggcagaacagaaatacgatcagcaccgctccggctgtccagaaagcctgccttctggcgcggcgttttgcagtcggtctgcgccggtgctgttgctgggattgtttgctcatccgcgtccacatccttccatcatgtttctgccaaaagcagagcaatcaggctttttaaagtgcagcgatcatatcacccatattgtacaggcccggctccttttttgcaaggtaaactgctgcatttaccgcgccgtttgcaaaaatattgcgggaataagcggtgtgcttgagggtaatcacctcgtccgggccgcagaacagcacttcgtgatcacccacgatgctgccgccgcgcacggaactgataccaatttccttcgggtcgcgcttctggcggacagaagaacgatcatacacatagtgatattcgccattattctgctcgttgatggcatcggccagcatcagagcggtgccgctgggtgcatccagcttgttgtggtggtgctgctccacgatctcaacatcgtagttcacacccagaatagccgaagcgcgcttgcacagctccgacagcacattgatgcccatagacatattagcgctcttgaacaccggcaccgtgcgggatagctgcaccaccttgagctgcagctcttccgaaaggccggtggtgcacaccacgatgggcagcttgtgagcttcacagtagggcagagccttttccacagcggccggagagctgaaatcgatgatcacatcgcccttgccgtccagcttttccaggctgtcatacacagggatgccgttctgttcgccgtccttcaggtcgatgcctgcaatcacgcggcagtcctcgcgctgtgcgatcatatcacacagcacatggcccatgcggccgccgatgccctgaatcacaatatccgtcataatttttatcctttcctgcccgtttttcatatcggcatatcgcaaaatgcccggacagagcgctccgccgggcattttgcagccaaaaacttattctgtaataagaccctctgcacgcagagccttttcaatatactccttgtgtgcctcgctcggctctaccagaggcagacggcactcgccagcttcccagcccagcacattcatggcgtacttcaccggaatggggttcacttcacagaacaaagcatctgccagcggcagcatttccaactgcagctgacgtgccttggcggtatcgccgtcaaagaatgccttgcagcagttgtgcaccagctccggcttgacattggacacgacgctaatcacgcccttgccgcccagagccagcaggggaaccacctgatcgtcgttgccggaataaatgttcagctcgtcgccgcacagctgtgcaatcttggctacctgagagatgttgccggaagcttccttgatgccgttgatcagaggatgcttgctcagttccagagcggtctccggggcaatgttcaggccggtgcgggaaggcacgttgtacatgatcaccgggatgcctccggcctcagccatggcggtaaagtgagcaaccagaccagcctgcgtggtcttgttgtaatagggagtcaccatcagcagagcgtctgcgccgcattcggcagactttgcggccagtgcgcagccgtggtcggtatcgttggagccagcgcctgcaatgacgggcacgcggtggttgacaacatccaccgtatacttgatggcggcaagctgctcctcatcggtcatagtagagcactcgccggtggtgccgcagatgatgatggcatcggtatggtgcgcgatctgatcctcaataatgcggcccagctcgtcaaagttgatgcttccgtcctcgtacatcggggtgataatggcaacacccgcgccggtaaagacaggattcttcatagcctaaaaactcctttgtatgcgcttttgcgcaaaatatacttagtcgaaatagccctttgcggccagcagctctgccagcagaacgccgccgcctgcagcaccgcgcagggtgttgtggctcatgcaggcaaacttgtaatcaaacagggtgtcctcgcgcaggcggccgatgcacacagccatgccgttctcggtgttgcggtccagcttgggctgcgggcgatccggctcggtgaagtaatgcaggaactgcttgggtgcgctgggcaggtcaagctcctgtgcggggccgcggaagtttgcccatgcctccaaaatctgctccttggtgggcttcttctcaaagcttacaaacacggcagcggtgtggccgtcggagacaggcacgcggaagcactgtgcagtgatcaccggcttttcggcgttcacgatatggtcgccctcaatatggccccacagcttgagcggctcgcgctcgctcttttcttcctcgccgccgatgtaggggatcacgttgtccacgatctcgggcatacggtcaaaggtcttacctgcaccggaaatggcctgataggtgcacaccagagccttgctgacaccaaaatccttcatcaacgggtgcagggcgggaacgtagctctgcaggctgcagttggacttaacggcaataaagccgcgcttggtgcccagacgcttgcgctgtgcggggatgatctcgatgtggtcggcgttgatctcgggcaccaccatgggcacatccggggtaaagcggtttgcactgttgttggacaccaccgggcactcagcctttgcataggcctcttccagagccttgatctcatccttgggcatgttgactgcacagaagataaaatccacctgagaagcaacctcttccaccttggatgcatccaaaactaccatcttcttgacactttccggcatgggggaggtcatggcccagcggggaccgacagcttcctcataggtcttgccagcgctgcggccggatgcggccagaacggtcagcttgaaccaggggtgattttccagcagcgtcacaaaacgctgaccgaccataccagtcgcacctacgatacccactttatactgtttttccatttccagcacctttcctttcgtgaaagcgaactcaataaatatttctattacatagattcacggcttgcaaaccggacagcgatgcaatataatagatactgtttatacagattttatgatatcattgatacggtgtccgtgtcaatcatcggaaaggcaaattgaacgctatgttaaaaaaagatttttggtatgatttacccaaagagctcattgcacaggagccggctgaccccagagactctgcacggctgatggtgctgagccagaaagacgacagcatccagcacaagatcttccacgatctgccggaatttttagagccgggcgacctgctggtggtaaacaattccaaggtcctgcccgcccgcatcgtgggcgtcaagcagcccaccggtgctgtgtgtgagctgcttttgctgcgtcaggtcaaaggcgaccagtgggagtgccttgcaaagcctggcaagcggatgcagcccggcacgaaggtgagctttagtgacggcagcctgaccgccgtggtggacgagaccatggaggacggcaacaagtacgttacattctattacgataccgagaccctttatgaaaagctggacgaatttggcaaaatgcctttgccgccctatatcaccaagcagctggaggatcagagccagtaccagaccgtctatgccaaggagcttggcagcgccgcagcgcccacggctggcctgcacttcaccccggaactgatggataccatccgcgccaagggcgtgaacattgctgaagtgaccctgcatgtgggtctgggcaccttccgccctgtacaggaggacgagatcgcggatcacaaaatgcacagcgaatggtactgcatcgacgaaaaaacggcgcagatgattcgtgacaccaaagctgccggtcatcgtgtgattgcagtgggcactaccagctgccgcacgctggaagccgttgccgcaaagtacggcgagattcgcgcctgcagcggcaacacttctatcttcctgtatccaggcgtgaagttcaactgcatcgacggcctgatcaccaacttccacctgccggaaagcacccttatcatgctggtgtcggccctgtatggctacgaaaagaccatggcggcctataaggtggctgtggaggaacgttatagattcttctcttttggcgatgcgatgctgattctttgattatttttcccgctattctgttgttgatgagcctgatcccgggctttttcatgaagattgcacggctgttttccgtgcacagaaaggaataaaaactatgccttctttgacgacctacaaactgctcaagcaggaacacgacgcccggcggggcgagttcaagaccgtgcacggcacggtgcagacgcccgcttttcagaacgtggctactgccggtgctatcaagggtggcctttcggcccatgaccttaaggagatcggtgcgcaggtgatgttgtgcaatac

SEQ ID NO: 1235 - DNA, 64249 bp, Unknown
  gut microbiota DNA sequence
tttacccgctggaacggccccattctgaccgacagtggtggatttcaggtattcagtctggcaaagctgcgcaagatcaccgaagagggcgtgacctttgcctcccatctggacggccaccgcatctttatgggaccggaagagagtatgcagatccaggcaaaccttggttctaccatcgccatggcttttgatgaatgtgtggagaaccccgcacagcacgattattccaaggccagctgcgaacgaacgacccgttggctgaagcgctgcaaggatgaaatggcccgcctgaagcacgagggcatttccgtgaatcccgatcagctgctgtttggcatcaatcagggctgtacctttgctgatctgcgtgtggagcacatgaagcagatcgcagacctcgatctggacggttacgccatcggcggtctggctgtgggcgagcccaccgaggtgatgtatgaaatgatcagtcaggtggagccccacatgcccaaggataagatccgctacctgatgggcgttggcacccccggcaatatcattgaggcagtttcccgcggtgtggatctgtttgactgcgtgatgcccagccgtaatgcacgccacggccacttgaacacctggggcggtatcatcaacatcaagaatgcaaagtatgagcgcgatgaacgccctattgatcctgcctgtggctgtccggtctgccgcagctattcccgcgcctatatccgccacctgttcaaagcggaggagattttgggaatgcgccttgccgtcatgcacaacctgtggttctataaccatctgatggagcgcatccgggatgagctggatgcaggcaccttcacggctttccacgataaatatgtaaagcttctggatacccgaatttgagaataagccttgcaacaggtcgtttaaaaaggtataataagcttatctgaattttgagaggagattttgccccatgcaatttctgactaccacttccgaaggctacatcagcctgttcttcacactggctctgatgctggttctgctgtacttcatgatctatcgtccccagaagaagcaggagaagaaggatgccgcaatgcgcagcagcctggagatcggcgatcaggtcaccaccattggcggtgtcattggccgtgttgttgcaatcaaggacgatacctttgttctggagaccggtgctgaccgtgtgaagatccgcttcaccaagactgcaatttccgctgttgaaaagctgaacatggacaaggctgacaagaagtaagctttttcttcaaacaattaagagcatatcaaacgcgtcttcctgcatagattactggcagggaggcgcgtttttatgtctgagaaaaaacttttcccggcggaactccgggttcttctgctggctgggacagtcggcgttatggtcacagcgggctggctggccgcaatggcagcgctgatgacagcacagggttattctggtgccgccgcaccgccgctggcaacagcagccgttggtgcagggagcctttgcagcggttggatcgctgcattttgcaaaaaggaacgcggcctgctgtgcgggcttgtacagggcctgttttatgcggtattgctcgtggtgctcagcgttccttccggtacgcttacggaagagccgccgctgctgcggtttgctgtgctgatcctgtgcggcagtattggcggattgctgggcatggtgacccgggagaaaaagcgccgcagctgaacaaataaaacaataaaacaaggaggttcgatcatgtgggtctatcagcaaacaggaacgccagcgcatttgccagaagccgcgcagccgcttcccacaggtgaaactgtgcttctgccgcagccgcagaaaacactgccgccagaacgatccgcaccggaagtgccttcaccgctgcagagacataacacggaaacccggcagaaaacctgctggctgctcgtctgtgcctttctgatcggctctggctcagctggcgtgcttctggctttctgcgaaaagcagcagccggactggctgcaatattacctgcaaagctggcgcggcctgtttgccgctgcagatgcacatactgcggccagccttttcggaatggaatatcttacgctggctgcggccgcgacccttctgttcctgatgggcttttccgcactggggccggttttgatctttttgtttacgatgttctatgggctgggaaacgggacgctgtttgtgcagctgctttccgacacggcactgaaaagagaaacgtggcttctgctgcttgcatttctgcctgcggcagctgcttctgcagggctgtgcacgctcggcacagattctctgcgggtgagcagccagatccgcgtctgttccttttttgcagcagggcctgaccgggagatcgtccggccacatggattcatccggcagtatctgctgacgctgacgttatttgtgccgctgtgcggcatttctgcagcgcttgcaagcattggaagcaggctttgagcaagggcttttcttgcgggtttgcttgttatatgctacaatagagaataataaaaccaagacaatgtaacaggagcttttttgatgaaggaaccaaaactgaaaactgtatatgtgtgttccaactgcggcgagacaagcccccgctggatgggccgctgcccaagctgcggcagctggaacacgatgaacgaggacgttgtagcggaagcccccaaagcaggtacggccgcagccaaacaggcggcagccgcccgcccggaaggggtgaccaccctgaccgcaaaacgcctttctgagatcagcatgaccgaagaaaaaagccgtattctgaccggcatttcggagctggaccgtgtacttggcggcggcattgtgctgggcggcgttgtgcttttgagcggtgagccgggtgtgggcaaatctactatgcttctgcagctgtgcggtgccatttccaaccagcacagcgttttgtatatcactggcgaggaatcggtgcggcaggtcaagctgcgcgctgcccggctgaaagtgccgcaggataacatctttctggcagcggagaatgatgtggacgagatctgcggcctgatcgaaaaagaaaagccggatctcgtggtcatcgactccatccagacgatgcgctgcatggatatctcgtcctccgccggtacggtaagtcaggtcaaggaaagtgcggcccgcctgctggccgtggccaaaaagcaggagattcccatgttcattgtgggccatgtgaacaaggacggtgccattgcaggccccaaagtcatggagcatatcgtggatacggtgctttactttgagggcgataaaatgctgccgtaccgcatcctgcgtgcggccaagaaccgttatggctccaccaatgagctgggcatgtttgatatgacggggcagggccttgctgagatcgaaaacccttcacagatgctgctggaaggccgtcctcttggcgtttccggcaactgtgtggcctgtaccatggagggcagccgtcctattttgagcgaaattcaggcccttgcaaccaaaaccaattttccagcaccgcgccgtgcctgcagcggctacgactacaaccgcatgaatctgctgatcgctgtgctggaaaagcgtgcagggtatttctttggaaacctggatgtatatattaacatcgtgggcggcattgcgctgcgtgatactgcctgtgatctttctgtctgcttgagtatggtctcctcgctgctggacaggcccgtcagcgataagctgatcgccattggcgaggtcggccttggcggtgaagtacgcagcgtacccaatctggaacagcgcctgcatgaggcagagcgtatcggctttgaacgtgcggtgatcccgaagcacagcctgaatcatctgagcccggcagattatcctggaatgcagctgatcggcgcggcttatatcaccgatgcgatcaatgccctgaaatctgaccgcttataagaggaaaaacaatgtcgatctatctggacgagaaaaatcccggcaagcacaagcccttcgatgatgctgcgccggacattgtagaatacgtccgctatctggaagtgatcgcgggcaaaagcgcaaacacggcgttcagctactactgtgatctgcgcggattcagccgttttatgaagcgccgccgtgggcttgtgcccgaagacagcgagatgaaggatatcgaccccaaagggctggacaccgcattctgggcctccgtaacaaaggaggatatctacgaatatttgtactttttaaaccgcgagtgcggcaacaaaaagtcctcaacggcccggcggctggcaagcctgcacggcttttatgattacctggtcaatcaggtcaaccggctgggtgcagatccgactgcggccatccacccacccaaacaggataaggtactgcccaaatatctgacggcggagcagtccatggagttattggaaagcacgcagacccaaagcgattttccggagcgggattattgcatggtgacgctgtttttgaactgtggaatgcgtctggcagagcttgtcggcatgaatctggacgacattgatttggaaaaccgccagatacgcctgtttggcaagggccacaaggagcgcatggtttatctgaatgatgcctgcatggaagcattgcggctgtatctgggcaaacgcaatacgatggagggacttctgccacaggaaaaggcggtctttattacccgacggcgcaaagagcgtatctcgaaccgcagggtagaacagctagtgaccggtgcaatgaaagcagccggattaaaaggcttttccacacataagctgcgccacactgccgcaactctgatgtatcagaccggcaatgtggacatccttacactcaagcagcttttgggccacagcaacgtgtctaccacacaaatttatacgcacctacaggaatttcaggtgcgcgcggctattgaagaaaacccgctgggcaaggtcaaaaagcccaaagcatcttctcacatcttggatacaacagaaaaggaaacaggggagacagcagaggattcagctttggatgaggaactttcgtctgtgcccatgaaagcctttgagggtgcggctcaggatggcatcgggctggatgcttccgtgcttgcaatgaagcctgatgcgaacgctggaaacggaaattcctgaaccacataagaatacccataaaatgaaacgataccgtctgtgacgcgtccaaagtgcggatatgtcatgggcggtatttttatagatatatttatataaataatggaatgataagctgtaatctggccagcgatttgaaatcgtacgagcaaatggtcgtgcgcagaaaaataaaaagatcagaatgaccacagaacttatagcaacataaaaagagaatctggaaaaataaaatgcaagcgcgcatggcagcggcagactgtgcagctttgtaatttgtaagtccataaaaagattgtagcaccaaaatactaatgagacacaaaaatataaaaaacgcaaaagttgaatcatacggtattacagatggctgcagatccgcaggtcgcagaaaaaggccagattcaggaaaatagagatttttcgcttccctatatttcgcataacgtgcattatacgaaaattatgcaatcaaaaaataagaccgtccttctcttctggttatgagttcagcggtcttaaaatactgatggctgtatggtgttgggttcagaatgttatcgcttcttctcccttggtgatgctatgctgatactttttaatttaaagtgaacccggcaagctgctcggcctgcggctgtgtgccaaagtatgcacagattgcttcgtaataaacgcgggctgtttttttacaaccttcttcgctgccgaactgtgcaacatctgcttcattcgttacaaagcattgctctgccagcactgccggacaatttacatcttctagcaacgtaaagcttcgctctgcacgcacctcggtgtgggtgctttccaccagttgcttctgatcgttttccagataataaatgtatcggactcccccgcgcccacgcagagatgctcctgcagcctgcattcctttggcaagcagctgcgcaaagtaaaagctttcctgatgccaagtccggcccggcactgtcggatagcactcaaagccggatgcagtggagccatttgcagctgagttgccgtggatggaaagcagcagctgcggtgcctgttcgtccgctctggcggcacgctgggcgggtgtagtggtttcatcaaagctgtcacgggtctgcagcggaataaaattagagtcctgctgcagcagccggatcagttccgaggcggttgctgcggtcatatctttttcttcgatcactccccttgcacccgggtctgctccaccgtgcccggcatcgatcaccacgcggtaaggcggatcaccgacctgcggacggaattcttcaccggcgatgctttccgctggctgagctgtctgcagagtcagcgctgcatgccagagtgagctgccaaaccagatgcccactgcgcaaaaaagcagaatgaccgtatttttgagcacatgagaagtctgttttcgtctttttgagtgcgcggctttggaatatcgttttgccattttggcttacatccttatattagcattctttatagaatacgatcctgctctgcaaattccttcaatgtaagaaaaagctacccgaaaaatccttcggatagctttttctttatttcagctctaccacggtcacgccgctttcaccctcgccataacggcccagacggaagcttttgaccatgcggttgccgcgcagatgtttgtggatagctgtgcgcagcgcaccggttccattgccgtggatcagataaaccactgtctgtccgttcaggatggcacggtcgataaaggaatccacctccggcagcgcttcgtccaccgtcaggcccagcagattgcattccatcttggcggaacgctgtaccctctctaccctgccgttcgggcggttggcatcgccggtcaggcgggaatagcgctgctgtgctttagtctgcggtttcttttccttgaccagcttttccggctgtttcaagcccttgagcggaactttggtcttgatgatgcctgcacgcaccagaacatcgccgtttttatccggcagggccaatacggtggccagctggttcagctctgcaatgcagacctcctgccctaccttgacctctttcagcggcacaaattccttgacggggttatgcaccgcctcagagccgataaacagcttttccgattcttttttggcgatctcgcgggcgcgctgagctttctgctgggtgctcatgcgctcgtccttctgcagctgacgcagttcatcggtcaaggcgtaagcctgactttccacctgttgtgccagcgcacgagccttagcacgggcagcttccagttcattttcgccctgacggatcagctcatcacgctttttctgcgcggcttccagctggtgggaagcttcatttttcagctcttccacctcgttctggctttccttcagctgcagcttcagatcatccagctgtcccagaacggcatccagacgcttatcctctgcggaaagatgctgctgtgccgcttcgatcacgcgctccgggatgcccaacttttcgctgatgaggaacgcattggatttgcccggcacgccgacgctcagcttataggtcgggcgcagcgtttccagatcaaactcacagctggcattgacaacgcccttggtttccagagcaaacaccttcagctcagcgtagtgagtggtggccatcagcagcacgccgcggcggcgcagctcttcaatgatggccacagccagcgcagcaccttcggcggggtcggtaccggcaccaagctcgtccagcagcaccagtgtgtgcggcatggcaagctccagaatgccggtgatctttttcatatgaccggagaaggtggaaaggctctgctcaatgctctgttcatcgccgatatccaccagaaattcgtcaaatacgcagatctcgctgcgctcgtcagccgggatcagaaagccgcactgcgccatggcgcacagcaggcccgctgttttcaaggtgacggttttgccaccggtgttcggtccggtgatgatcagagaatcgtaatccctgcccagagcaatatccacaggcacgcactttttaggatcgatcagcgggtggcgcgcacggatcagcgagaaggaatcgtcggtgcggacagcaggcttgaatgccttgagatccaaagccagccgtgcctttgccagcagaacatcgatctccagcatagccttgtagctgtactggaactgcggctcaatggcggccacctgtgcggtaaaggccaccagaatgcgctcaatctcctgcgcttcctgcgcacggtactgcaaaatgcgggcattggcttccacaacggcctgcggctccacaaagacggtggctccggtagacgaaacatcatgaataatgccgctcacctcaccgcggtattcgctcttgaccggcacaacataccggccattgcgcatggaaaccacgctttcctgtagatacttggaggtatccatattgcggaccatgctctccagacggtcacggatgctattctccgttgcgcggatctttttgcgcaggtcgttcagggtatgagaggccgtgtctgccatggcatccggtgccagaatggcgctggagatctgctgttccaggcccggctgcggtgccagcgcatagaacagatcgtctgtaggcagagcgtcgtgctccgaagcgccataccagcttgaaagattctgaaaattgcgcagtgcaccagccaccatcaacagctcgcccattgaaagtacgccgccttttacggcgcgggccgccagctgactgacattctccacgccgccaaagcgcggggagccgtttttgatcagcagggtgttgatggcatcggtctgttccagcgcatagcgcacctcgtccgggtcgcactgcggctgagtggcaagcagcatttcgcgcgcttccttgcacacgcagccctctgcggcacgagcgacgatcttatccagttccagagtttttaagtaacttgtttccataggttccctttatgctcagggcagcagggtctttaaaaagtcatagcttttcaaaggcttgtccatgtgggtcagtgcatagcgctctgccactgcggaaagcttttccagactgcccacagaaattttgaatgcaaatatttttttgtcgtccacaaggcagatgtgccgcagcgcatacagtgcgccctgatcaaggttgcaggtctttcctgcttttgcggcgcagtctgcacagagcagatgaccttcctgcacatccagatagaacgcagcaccatcataggcgctgcaatcgcggcagcacacgatctgcggcataaagccgcactcgctcatggtgcgcagttcaaacacggccttgatcacccgcagatccgttttgctctcgctgatcatatagaaacagttgagcagcagccgaagctcccgctgtgcctcctgcccggtgggcgaaagggtcattgccatttcagccatatacatggcaaggctcatgccctcaatgctggacgagatgccgtgaaagacatttttcacttctgcttcccgcacagtgtacatgttgcggcccggcaccagtgtgaactcggagtagcagaacagcccgcacgcgctgaacagcttgctcttcagccgcaggctgctctgcgctgctgccgagatcacgcccagttccggtgtcaggatcgtcagaatgcgatccgattccttatagcgggtctccttcagcaccagacccgtggttacaaaggcttccattttcttggtcctctgccggggtttcttccggccgctgttgtttataatcgagataacgaagaatgtttcccgtgcaggcaaacgcctgccagcttgcttgtgcatccatttgcagcacctcttccctgttacggatagtgtcaggtttattttaaccgttcatccaagggaattctgtcctgctttggcaagtgtcagcggttattggtgttctgcttgaagccaaagttgttcagcaggaactcgttatcgcgccaatcggattttacctttacccagcactgcagattgacgcggcagcccaaaaactcttcgcagtctgcacgggcagcactggcaatttttttcagcattgcaccgccttttccaatgaccatgcccttgtggctttcgcgctcgcagtagatatttacatcaatatcgatcaggtcggtgcccgggcgctctttgaagcgctccaccacaacagcaatgccatgggggatctcgtcgcgcatgaacagcagggccttttcacggatgacctccgccacaagctccttttccggcatatccgtgtaggcatcatcatcaaaataatgcgggccttccacagcatagcggctcaaagcatcgaacagcacttcgcagccgtcgttatcacggacgctgatggtgtagatatcgtcgaatacacccaatgccttcagctcttctttgcgggcttccagatcagcaggctccttgacaaggtcggtcttgttgatgactgcaattgccgggccgccgctgctgcgcagcatatccaccagcaccatttccgattcattcagtgcgccgtaaggctcaaacagcatcatggaaacatccacatctgcaatggaatcgctggcagtcttatccatccgtttacccagtttgttgcgtgccttgtgcacaccgggtgtatccagcagcacatactgcaacggcccgcgggtgatcacgccggtaatgcgggtacgggtggtctgcggcttggaagtgacgatggctaccttttcgccaaccagaaggttggtcagactggatttgccaacattgggacggccaatgacagccacaaaaacggaagaagtatcataatgcccctgaatgggtgtagcgttactcaaaatctagctcctgtctgtattgtgcggcaaccgcacggtgaatcaattactcggtatagcttacggtgcgcggcaggcccagctgcagcagaacagcttcctctttctcacgcatccgcatggcttccagaccaccattttcgtggtcgtagcccagcaggtgcagcatggagtgcaccgtcaggaacgccacctcacgctgcagcggatggccgtagaggtttgcctgctcctgtgcacgctccatactgatgacgatgtcacccagcattttgcagccgttgttctcgtcaacatcatatttgccgtctacacccagagggaagctcagcacgtcggtgggcatgggcttgtttcggtactggttgttcagctcagcaatggcggcgttatccacaaaggtcacgctgatctctgcaggagcttcaaaatgctcatactccagcacggcattacaggcacggcggatgagaatgcgcagaccggaaggaaccttgacggccttctgtgaattggtgatcaaaactttattggacataaatcagtccactcctttctgtttttgatggctttatatgaattctggtgattttatttttcagggtgtgcagccttttcgtaagccttgataatttcctgcactagacggtggcgcacaacatctttctcagtaaaatagcactgtgcaatcccatttacatttttaagcacgtgcagtgcatccacaagaccgctgcgggtgcgttccggcagatcgatctgggtcacatcaccggtaaccaccaccttggagccgacacccatacgtgtgaggaacattttcatctgctccggtgtggtgttctgtgcctcatccagaatgataaaggaatcatccagcgtgcgtccgcgcatataggcaagcggtgcaacctcaatgatctgcttttccacaaggcgctcgtaagtttcggcacccagcatatcaaacaggccgtcatacagcgggcgcagataagggtctaccttctgctgcagatcaccgggcagaaagcccagtttttcacctgcttccactgccgggcgggtgagcacgatgcgggaaacatccttggctttaaaagcctttaccgccatggcaacggccagataggtcttgccggtacccgccgggccaacgccaaaggtgatggcattggtgcggatggcattgagatattccttctggcccagtgttttgggccggatcggccgtcccttgaccgttacggtaacaaaatcttcggtcagttccttgacccgcttttctgctccgtcgtgcgccagactgatgcagtaacgcacggtctggtcttccagcggtgtatgattctcgatcagaagcagcattccctccacagcgcggctggccgcggcaacattggccggttcgcctgaaagccgcagctgcgtgccccggcagaccgccgtaacagaaaattcgttctccagcagacggatgttccggtcgcagttgccaaaaacagctgcggcgacctctacactatccagttcaatattcttttctgccatgtgctcctcctgaaaggatatattttaatgcttctattgtaccaccaaaatctcgagaagaaaactgtgaaaagtacacaaaatattttcatccgttccatcggttttttcatacgccaaggcagctgcccctgcaaagcgtcagcggcaaaaaagaaaatgcaggagcaggaatgcatcctgtacgaatgatcttgtcaagaccttttgtgccacaaccacagagaaaaacaaaacatatctttggccaaaaagacaatagcaaacttctcccctgcgtgctacaatagcaagcgttgtgcggcttgcatccggccggccgctccggaatgctgaaatcaaaggagaaggaaccatggaacaactttttctgatgcccggtgaagaacgttgcgaacgcttcaaggatggcaacggtattccgagagttcactactcctatcgctcgatgcacggtgcattcttcgactgcgagagccgcagtttggaggaagcccagcgcctgtgtgaggactggctggtaggtcaggaccgctgctaccgcaactgaaatgaaaaatagaaacctccgcttccctgtcggtactgccgccgggaagcggaggtttttgctttttacaggtttatttccacagttgagcgcagacaagttccagcacactgcccgcgatgcagcgggccttatccgaaatgagaaaacagttggaaagttcctctttgcgggggtctatatcggccaccttaaaaccgggcgttaccggataactgctgcgcagaagtccgcgcagaatgcccgtgatctgcgtggtcacagagatcatggcaccatctgccgtgcggatctgcgcaatggtctcacccgcttccacgatatctccaattttgcggagatccataaatataccggccgtgccggcatggatcacgcgctctttgccgtagccgccaatgattccgggaatgccggtatcagggatggcactgccttcccgaatgatgcgtcccagccggtggccgcgtttggtctccaccaccacatccacatcctgcccggccgtgaaaccggggccgagtgcaatggtcaggggtgccatatcccgcgttgtgccaagattctttttggcaaggatcgcatccacaaggacatccggctttgccggcgcaatgctttttccttgtgggtctaccagaacaggaacggcattctgtttccagacttcttttgcctgcgccagagtttcgatccgtaccgcacgcagaccttcaacggcggtctcaccttcataaacggcttcgcacagagaaacctgccgccggatcgccgccggatgctccgcttccagcaccagcacacgcaggcctgcgctccacagccggtgaatggtgccggtagcaaggtcgccaccgccgcgcacaaggatcagtgcatccttcttcatttgatctcctctccgggctggagtcgagtcaatacgatctccatagacccaccgcaggcagcaattgctgcatcatcatttttgccgtctgccgaaaaatgcagccgttgatacgccggagccgctcccgtcagcatttcctgtgcagccagaatggtgcggtgctccataataccgccgcccacgctgcccacaatagagccgtctgtgcgaaccagcatttttgcgccgatttcccgcggcgtagagccgtgccgcgccgcaatcacggcaagtaccgcctgctgcccggcggcatctgtctgagccatggcttccagaagggcagatgaaaagccctccgtctgcggacgcgcattcttgatcgatacgatctgtgccagaatggaaagtgcgatctcctctgccgtctgtgagccgatggaaagcccgatgggggcgtacaacgcctccactctttcggcatcgataccggcttccagaagttgacggcgcaccagtgcggcacgcccgcggctgcccatcatgccaacataggctgcaggcttttttaatatcaccttcaggcagtccacatcaaatgcatgtgcccgggtgacgaccacaaaataagtctctgcgccgtcaggtacctgcgcaagcgctttatcaaacggcaggcagagcactttatcggctccggccagccgcagctgctgtgcatattcctcgcggtcatccattgcaaggaccgtcaggcccagcagctttgcaagctgaacaacggctgcagccacatgtccaccgccgcagactaccagctgcggcaccgcgccaaagcgctccgcaaagatgtctgtgcctgcaacagagtggataccagctgctgtgcagccctgcagttctgtcaggtgctgcagcagtacggtactgtctcccctctgccacacaggcctgccctccagcaaaagcagctggctccccgcggcatcgccctctaactgggctaccatcgtccagccgcccgcagaacaggctttttgcagcattgtataaagcggcattttacccatgcgtcattctcctgttttatctttattactgttctactgctgcggcctgatcgtaacgtgccgggtccagccggttctgccactgctcaaattcttccggcagcatccgccaggcaaggccgcagcctgcggagatctcgcgcggcagtgggatgagcctgcccggaaccttctccgcaaggcactgcttttcccattccatggcatccagcgttgtgcggaatgaaagaacaatataagtttttttgatgcgcatatcagatctcctgtgcaagctcctgaacagcggctgctgtctgcagcacttcggcttccgtattgaaatgcgaaaagctgaaccgtaccacgccctgttccaccgtgcccagcgctttatgcatcagtggtgcacagtgcgcgccggcacgcacacagatgctgtagtcctcccacaggatatctgcaatgcgggctgaatcttcgtctccgatgttgagcgagataatgggagcgtgcagcgccatttccgggtcgccgtagatcttcacgttcggcaggtctcgaatgtttttataaaagagcgccgccagtgcagtttcttttgcacacagcgtttccacgccctgagccagaatccattccacaccggcacacaggcccgccagacccggaacattgagcgtcccggcttccagagcggtgggcatctgtgcaggatgctgttcatcaaagctgtgtacgccgctgcctcccactaccaatggctggatggaaagccccgggcgcacatacaagccgcctgtcccctgcgggccaagcagcgccttatgcccggtgaagcatagcacatcaatgctcagtgcctgtacgtcaatgggctgtgaacccgccgtctgggccgcatccacgatcagcagcaggccgtgccggtgcgcaaaacccgctgcttttgcaagatctgttccgttgccggtcacattggaagcacctgttacgaccagcgcttttgtattgggctgaaccagcttatcccagtcatcatattgcagccgtccgcgctcatccacgcccgcaaaactgaactgcaagccctgttcccgcagccggtagagcggccgcagaacagagttatgctcacataccgttgtgatgatatgatcgcccggtgcaaaaagaccacccaatgcaatgttcaaggcctccgttgcatttgccgcaaaggcaatacaggacgggtctggtgcgtggaggagctttgccattgcgcaccgcgcagcataaacaagacggcttgcgtgcagcgtgggctcatgggcaccccgtcccggattgcctgccgtgcgcattgcgtccagcacagcctgctctacctgcggcggcttgcgcagggtcgtggcagcgttatccagatagatcacggtttcaccacgttgcctgcctgcgtcagcttttccacgatggtgtacatgttggtcacactgccaacagcaagcttttcggtcaggccatagaaattcaggcaggtgccgcaggtcatgatctccacgccctgtgcttccagtgccttcaggtcatccagcatgggcgaaccctcacaggtcagggacgcgccgccgttatagaacagcactgttttgggcagctgatcctgctgggtaagtgcgaacacaaaggccttgagcagggacttgccaaggtcatctgcgccaatgcccattttatcagagctgatggcaaccaccgtgtccgtgcgggtgtccggtgcacaggccgatgcttcttcagtgggtgtttcggacgcttcgccgaccgtgaacagcacgcggtattcccgctcggccagcttttcggcgctgtactgataacctttctgctgggccattttggtaaggttctgcacggcgatctcattatccaccagcacttccacctcaccggcacccttcagttcagagatcgcctttttggcttttacaacgggcagcgggcatgcgtcaccacgggcatccactttcagcatcataattgtaggcctccatcagtattttacagtaatttcctgttcggttttgggtatgatctcacccacgatctttgcgggcaggccagcggcctgcagctctgcttccagcgcatttgcttcttctggcaacacggccagcaatagtccgccggaagtctgtgggtcaaacagcacctcttccattgcaaacggcacattttcaaaagtgacatatgggccggtatggttgcggttgcgctgtccggcagcggtatacaaaaaatcatctgccgctttttcggctcccggtagaaccggcaccatccgtgcatcaatgatacaggaaagctttccgcccatcatctcgtgcagatggcccagaaagctgaaaccggtcacatcggttgccgcgtggaccgtatactttcgactgatctcggcagcgtttttgttcagcgttgtcatggacgcaatggcaccggccatatcttccggtgccgcttcgcccacacggtttgccgtgcagatcaggcccacgcccagagcttttgttaagatcagcttgtcgccgggcttgccggaatcattcgtatacatttttttcgggtccacaaggccagtcaccgaaagtccgtatttcacaccggtatcggcaatggaatgcccgcccgcaaggcttccacccgcttcggccaccttcttggctccgccgcgcagaatctcgcccagaatgttcagatccatgctctcaggaaagcagaccaggttcagtgcagtcttcacctcgccacccatggcatagacatcactcagggcgttggccgctgcgatctggccgaaggtataggggtcgtccaccattggcggaaaaaagtccaccgtctgcaccagcgcaatatcatctgttatgcggtacacggcggcatcatcccggctgtcgtagcccaccagcaggttcgggtctttttccccgcgcggcagtttttccagaatgcggctcagcacacctgctcccagctttgcggtacatccgccgccggtgcagaacacgatcttgccctctttgctcatgcacgttctcctttctcgaaatgagacgtagcgcaggaaatccgataaatttttttcagaatatcagccacctgccgggccagagcagcctgctcttttgtatcgacctgattgagtacaacataaaagctgcgatcccctacagccttccttccaccggcttcacttgcaagcagatttgccagaagttccggtgtcaactgcgcatcctgcggaacacaaagcagctctgcggcaagctctgcccggaaacagacctcccggagcggatgcctcaacgcagaaagccctgctacggccagaaccgtatcgcactgcggtaaaagcaccggctcgtgcgcagcgggtgccttgcagggcatccgttttgcgccgtccgcttcaatgagcacgatatctgcaagggtcatccagcgctccagctgtgcctgcggcggggccgtcaatttgccgccgtgtgcagcggttccggccacggcataactgccgcacttccacaggcggaaaagctctgcatccgtctgtgcccagaccccgccgggcggctgcataatatgggtggtggtagcggccaatacccgccaacccttgcgggcgcagtgcgcagccagattgtacatcagtgtggtctttccgccgccgcccaccagagaaataacatgtcccttctccgcaagaaacggaaaaaatttttcgtcgatcatttctgcttttctgcaactgccatggcgattttttccggtgtgatgggcagctcatagaaccgggtgccgatagcgttatagatcgcatcggaaatggcaggcagcggtgtgttgatgaccacctcaccaatggactttgcgccaaagggtccgttgggttcatagctgctctcgaattcaaccttgatcttgcccacatcggtgcgggccggaattttgtactggaacagagagttctcttccgggtagccatttttatcgtaggtgatgttttcggtcagagtcatgccgatgccctgcagcagaccgccctcagcctgcacacgggtcaggttcgggttgatgggcgtgccgcagtccacacaggcatcaaactccagcagctttacctcgccggtctcagtatccacttccacctcagcagcaccaaccatgaacggcggcggcgacaaaggcgaagtatgcgtttcggtggcttccagcggaaccatatggccgaactgagaagcatacgcgatctcgctcagagactttttctgtgtgggatctttgctcttgaaaacatcttttccatcaaattccacctcgtcctcggtgcattccagcagctctgcgcccagcttgcagatctggccgcgcagcttcatggcacacttttcggtggcctttccggtaacgtaagtggtactggacgcataggagccggagtcatagggcgaggtatccgtatcagctccgaagaccgtgatattgtccagcgggcagtccagcacttcggcggcgatctgcgccagtgtagtgtcacagccggtgcccatgtcggccgcaccgatcatcagggtgtagaaaccgtcgtcattcagtttcagggtggcactgcccacatccatgccggaaatgccggagccctgcatcgccatgcccataccgacagcgcgcaccttgctgttgcccatatcacgggcagggtatttgtgctcccagtcgatcatatcccgcaccttgacaaggcagcggtccagcgcgcagctggtgttgacagccccatagtaggcgggcatcacatcgccctcctgtacggcgtttttcagccgcagctcaaaggggtccatattcagcttatgagccagttcattgacagcagattctacggcaaacagtccctgcgttgcgccgtaaccgcggtaagcaccggcagacatgtggttcgtatacaccacatcactgataaagcggaaggcttctgccttgccgtacagcgggatggacttgtgaccggaaaggcccacggtcgtagggccatgctcaccgtaagcaccggtattggaaagggtgtacagatcaatgcccttcacaacgccgtccttcgtggcacccagccgcacatggatctccatttcgtgacgcggcgaggatgcgatctggctttccacacgactgaaaatgatcttggagggctttttggtcttccaagtcacaaaagccggatacacctcactgaccgccgtctgcttggcaccaaatccgccgccgatgcggggctttgccacgcgcaccatggatttgggaatatgcagtgcgttcgcaatattgcgccgtgcatggaacacgatctgcgtggagctgagcacattcagccgcccataggtatcaatggagcagtaggtgcggaaggtctccatcatggcctgctggcaggccttggtgtggtaaatgtggtcaatgactacatcgctggctgcaagcactgcatcgatatcaccggcttcgcattcatcatgggcgcagaggttgcgtttgttgtcggctcccaccgggcacagactggcccagttgtcctccggatgcaccagaatggggttgtccttggcagtgtgatagtccagcactgcttccaaaacctcatattccaccttgatgagcttgagagccttatccacgcacttttcgtccttaccggccacaatggccaccacatcgcccacaaagcgcacatggcggtcaatgagcaggcggtcacgcggactggcttccggataggtctggccagcctgcgtgtagcgcggcgcatcctgcggcacatcctcccatgtaaagattgcctcgatgccgggcaccttttttgctacagccgtattgatagttttgacgatggcatttgcgtgcggagaacgcagcagctttacaatcaggcagtcctgcgggatcacatcgtccatatagacgggctggccggtgaccagctgcatggcatcctttttacggaaaggcttgttgatggtactcattctgcggcctccttctgctttttccatgccagaaagttcatgatgccgcgcagctggccctcatagccagagcagcggcagaggttgccggagagatattccttcacttcttcctcactggggtacggattctcgcggaagagggccagcgcgttcatgataaagcccggattgcagaagccacactgctctgcaccctgatctgcgataaagccgccgaactccgcggcttcttcctgcaggccttccagtgtggtaatgctgtggccgctggcacgcgctgccagtaccgaacaggacagcaccggtttctcgtccagaaacaccgtgcacagaccacagttggaagtctcacagccgcgcttgacgctcttgcagccgtgggcacgtacaaaatcgatcagcagcatatctgcagccacatcctctgtgaccttgatgccgttcaatgtaagagtgatctgcatttaattttcctcctgtgccgtgcgtgcttccagttccagaacagcacgctttgtcagaacgcctgccagatggcggcggtactcggcattgccgcgcatattggagccagtgacaattttttgctttacttcatcggcaaagttctgcgccagttcctgcgcagaaacacccgcctttgccggcagctcaaacagcacagccttgagcggccgcgcaccgatcgcaatgcgatagctgccgttttccagacgggcggcagcgcaggtaagcaccgggatatcagtctggctgttgcgcacggactgatagaaaaattctgcttcttcctttttaacgatcagccgcacaaggatgtcccggtcatagggacgctcggcgtactcccgcagagacacgatgccgcccttgtacagctctaccgaacagtccatggccataaacagcgtgagcacatcggaaaagccgaaccggctgtagatgctgccacccacagttgccagattgcgcagctgcacgcccacgatatgccgcagcgcttcctttactgcgccatgggtatacgcagcaagaccggcgtgctcttccagctggcgcagtgtaaccatggcaccaatggaaaagctgccctcggtctcctctatggtgtccagtcccagaccggacaggtcgatggctgtaccgacattgatgttctccattttgagccagatcatgccgcccagcacacggttggcctttttctggttcagctgccacgcttcttccagactttcggcctgcttatattctcggatcgtcatcatagatgcaggttcctctctctttttttctctgttcttttattttaacacagatttcgatataatactattgtgaattcgtttcagaaagagtggtactatatgaaagaacttcttccggtgggctgtgtcatcatggcatccggtctgagccagcgcttcggctccaacaaactccttgcgccgttctgcggggaaccgatgctatgccgcgcatttgcagcgaccgatactccaaagctttcggcccgcatcgtggtgacacgttcggacgaagttgcgcagctttgccgctcccgcaatgttccggtgctgctgcatgatctgcctggtcgaaacgatacggtgcggctgggtctttctgcgctgctggaacaggttccggagctttttggctgcatgttcctgccgggagaccagccgcttttgtgccgcgagacagtggaagccatggcaggcatctccgggtgggatcaaagaactcggctggaacgacaaaaagaaacagaacgggagatcttccgtctgggattccgggcccgtaacgacccgtctccccttactggaagtcccgttctgtttgaaaaaggactttttcaggaactgctcaccttgccgcagggcatgggcggaagtgttctgcttcggaaatatcccgcgcatgttcacaccgtttacattgcggatcggaatgaattggccgatgccgacacgcccgaagcacttgcgcaattggaagcgctggcccggcaaaagctttgagctttatactgccttgtcatccttcggcagcagcacattcagcaggatcgccacgaacgcagccggaacgatgccggactcgccgcagatcagctggaaagcgtgcggagcctgtgccagaataccgctgttggcacccatgccgtagccaacacccagagccaccgagacgatggtaagctgacgcggggtcatcttttccttggtgatgagctggatgccgctgaccacgatggaagagaacatcataacggcagcaccgcccagaacggcctgcggcataatggagatcagtgcgccgagcttggggatcaggccgcacaggatcaggaagatggcaccggaggccagagccatgcggttgaccactttggtcatggccaccagacccacgttctggctgaaggaagtgttgggcagtacaccgaacagagccgcaaaggaggagccgagaccgtcacagatcacaccgccggacagctctttatcggtaggctcacgattcatgccgccctccatgacaccggagatatcacccacggtctcaacagcggtaacaacgaacatgatcatcaccggcataatagcgcgcatatcaaacacgatcttgaccggcatcagcttgggaatggcaaaccaagaggcctgtgccaccttattccagttgagcacccatgccttggtaaactctacaccatcggcagtgacaccggtggtgggcagcaccagacccatgacaaaggccgcaacgtaaccggccagaatgccgatcaggatcgcagaagagctgaggaagcccgtggtccagtgcttgaagatcagaatgaccaccaatacgaacagggcaagcagaagattttccatggagccaaagtcttttgcgctgttgccgccgccaaaggaattgatgcccaccgagatcagcgaaagaccgatggaaagtacaaccgtaccggtgacgaccggcgggaaaaacttgcgcagaggcttgaggaagaagcccagcacgctttcaaagatgccgccgatgatggatgcacccataatggcaccataggccagcacaccgccgcccatgctgccgacaacactgttgaacacgccgataaaaccggaactggtgcccatgataatgggcacactaccgcccacggggccgatggtgaacagctgtaccagcgtgactacgccggccacaaacatggcactctgcagcagtgtgacctgcagatctgcgaactcaccacccgcaatgccgcaggcactggtgatgatcagcagcggggtcaggttgcccacaaacatggcgcagacatgctgcagacccagcgggatcgcctgtttcagggacatttttgcgtcgaactgatacgccgactcttcgagcttgacttccttcaaatgttccactctcctcaaatcttgacaaaaatcattcttttcgactgctttaccaaaaaagcggatttattatagcaaaactgcgtatccttgtaaattaagtatgactttttcgtgaacggctgtttcccgctgagaaacacaaaaagcagggcgctttgtgcgttttttccgctttggtcggaagaatttcgcgcagaactcctgcttttttgttttgttttatttgatttttgtgcgatatggaaattttacagcgttctcagcccgtaatcttttaaacagcgctggatgccctgctgagtggtgtcgaaccggatgccgaagcgttccagttttgtggtgtccatcacaaggttccgaccccagctttcttcctcgatctgcacagcgattcccagcgtttcggcaaactgccgggcggtgcataccatgttttcagcattgccgctgccaaaattgtatacgccgccgggcagcgccatggcaggctccagattttcgatcacctgccgcacataggtcacgccgcggtggtcgttccgggagaagcgcagagcctctcccttcagcgcggcacgcagaagattcagcggcagattgccccggatgggcagcccatagccgggcaggtcatacatccaactggcacgcagatggaccgagtccgggcagagctccagcacacgctgctctgcttccagcttgtattggccgtaaatgtttgcgggatgcagggccagtgtttccggcagcggcccctgctgctgcacaccggcatagacctgatccgagctgaatgccaccagctttgccttcgtctgctgcgcagcccgtgccagccagactggcagctccacattggcacggtaagcttctgccggatgctgcgcacagtaactggtatcggaaagagcggcggtgtgcaggatcacatccggatgcaaagcttccacctgtgcacgagtgagagcttcatcggctgtacagaaaaagccttttggaagggcgcaaagctcgtactttccctgccactgctgcaaaatgcgggagccgacaaagccgcctgcaccggtgataagaatttttttcatgataatttcctcctgcagggcaatgcaaaagtgcccagcagcatgacagcctgccgggcacaaaaattttaaaggaacagttccagcacgaacacgacggcacagcaggccacagatacctgaaacaggcttgcgccgaaccaagcagctgcaatgcctaccaccagcgccatggcaccggcagccgggctctgggtcgcgttgacaatagccgggaaggtcatgaccgccagcgtcacataaggcacataatacagaaacgactgaatgaagcgatttttgatgggcttgcggatcagtgtgagcggaaggatgcggatggcataggataccagcgccatcactgcaatgtaaatgtaatgattatgcgtcatgctctgcctcctgctcttctggatttaccggaaaaagagctgctgcagcgctggaaatgagcactgtgagcaaaatggtgcgcgtgccctccgaaagagcggagatacccggcaggtaattgcacacaaagctcagtgcaaagctgatggcaacaagtgcagctaccaccctgctcttacgcgccggaggaatgatgatggcaaggaacatgccgtaaagggcaacgctcagcgcactgacagcccgcagcggcagcagattgcccgcaatgatgcccaacgccgtaccgatggcccaagccggtgccgccagcagaatggcaccgtaggtataatatgggttcaggctgccgggccgtgcaatggtgatgccaaaaagctcgtctgtcacatcataaccgatgagcagcctgtgccagaagggtgtgcccggcgcaaagcgctgggccagtgcgcagctcatgagcagatagcgcgcattggcgatcagtgtgatgatggccacttccagataggtcgcattggccatgatgatggcaaatgcagcgtattcgcctgccgaagcgttgttcagtaggctgaccagaaagccctgaaacggggtaaagcctgcccggcgggccgcaatgcccagcgagaaggaaacagcaaaatagcccagcgcaatgggaacgccatcccgcatgccctcacagaaaatctttttgctgaaagcccaaaccggcctttctgcattgacaagctccggggcaaggagcttacttttggaattcatctttgttttttactcctttcctatttcaaacaccgctttttattatactctcccgcacacagagaagaaagggctttttcactttcttttcggcacaaaaggaaaacgccgcctgaaaaggcagcgttcttcgtcgatttatgcgcccggcaccagaaaatgcattgcctgcggcaggacctgcgtaccggcttccagcccatttgccgtcaggatctgtgccggtgacacatggaaccgtctggcaatgccgaacaactcctcccctgcctgtgcatagtagatgcgcagtgcgatctccgggtccggagtcgtcagcggttcgcccagctcaatgctgccgatgcccgaatgtgtgctccggcagaggatggctccttcggcacgggcggtgaccgtcacttccaatgtgccgccagtgcagctgcactggatgttctcggtgctcagccagcattccgggctgaactgtgcacccggcggggcttctactgcaagcggaaagacaagttccagtgttttttcgtagctttccagttcagcaagactgttctcggcaaaggcggtagcaacggcacgcaccgtaaaggcccagccgtcgcggtaaggtgttacctgcgccggtccataagacacaaagcaggcgcgcagctgagcatccgcatctggcagcggcccggagaccgtggaagatgctgtctcgttcagcatacaggcaagatcttctgctgccaattcctgcggcgtgacggcggtttcaaactgcgtagaaaaggcatccgctacgtattgcagctggcagggccgccatgcgtgcaaatgcatcatcacgctggctgtcagttggccgctggcttcctgttcgccctccgcaagggcaaagcccaccggctccagcacgcacatgcatctgcagtcctctgctacgccttccagatccaccacctgattgaacggcagggatgccgcctgactttgcaggctgctttcaccttccgcgcgccaggcgcattgggcacgtacctcgcccttgaccactgccttgcccgccagcagctttacctcccgcacggcggcgctgccggtaatatccagaatggctgcgggcggctttgcaaacacaagctccccttccacagtgaccagcttttccagcaccgcggtgctgcgcacgccgttcagcgtctgcaatttctgttcaatgccgccatcggccagcgctgtgattagttcctgtttatcctgtgtatggatagtaaccacaagaccataggctccgcgcacctcgatgcggtgcgggtttaccgcccggcagttgaggtattcagtctgcccttctaccatggccatccagctggtgaaggaaaattccggcacctccagctgctttgtaaacggcagcttctgctcggtctggcaaagcccggccccatcctcgccctgataaaacacagtgcagcgcagatagccttccaatgtaagccgcccgggctgcagctgcttttgcagcaccaccggttttgcaaagcatttgaccagcttgaacaccggcggaagataatctgaaatcaggatctcggtttccagcggaagttctgccttgacggtgcagctcgtgcctgcctgcggcagcgtatcccgaaagatcttcagttccatgcagtgtgctcctttccctgtccgtctctactggaaaggtatgcacatgctttgcaggatatgcgcgcaaaaaaggcaccgtgcaaaacgcacgatgcctttgggccttttgaaacaatcagatcgttttgcgcaggacagccgcctgcattacatggtatttctgcatcagccggacggcagccgatgtgatcttctcgccgctgaccacaatggggatcgcaggcgggcaggaaaccgtcggcatagcgcagatacgccccaccgcctgctctgtgggcacctgctcctgcggggcaaacacggcctgccggatgctgcagcaggtgtgcaattcgtgttccagctccaaaagctcacgatcgtttttttccggaagcgggaacggtcctgtaaggttttccacaatgtggagaacggcagaagtcagccgttcaaagtcctgcggcggatttgccggggtgaacatcagcacaacatagcgcgggtcggcatattcgcactcgacctttgcgctgcgcagcgcttctgcaagctctgtgccggtcatgcccagtgtagcagcatccagcgtgaccttgagaggttcgctttccagtgccagcggccccgggcagtgttttgccgcagcggcttcgttcagctcccggcgcatgcgggtcaaatatccgcagcactgcaaaagccgcagcggataaccctccgacagaacctgattgcatttgtccagcgactgcaagatcaggtaagacggactggtggaaccaaacaatgccagtgcattgcgcacagcggcttcgtcctgaatgggggcatttttgcccagatgcaggtatgcgccgccagtgacaacgggcagcgttttatggccggagtcgcagcacatggccgcgcccagtgcaataggatgctgaccgccctgcggcagaaaacgcaggtaagcaccgtgggcattatccaccagaagcggaacgccaaaatccttgcacacttcggccagcgctgcaatatcctgcacaccgcccagataatccggactggtgatgtagacaccaaagggccttttgccctgctgtgccaaaccctgcagagcacctgtcagctttgcagctgacaccgggcagctgcaaagtgcaccggcatcctgcggcgcaggccagagccactggatatcaaaatccagcagcgccgccgcatacaacagcgctttgtgagcgttgcgcgctgccagcaggaccgggcgctgtccggctgcgggcgcagcctgcagtgcaaggcacagcattgcacggatgcactgggacgagccctctgtgctgtaataggtatgcaccgtgccgaacagccgggtagcgttggcttcgctctgggcaatgatgccgtcagccccatacagttcatccgcaccctttatttcggtaatgtcccacggctcaaagcccaaaaggctctggcccttgtggccgggcatatgcagccgcgaggtgccggactgtgcgtaacggcgcacaaaatccacaataggcgtggtcgtgctcattcgcaggcttcgccatcagcacaggcgttacaggtagaacccagctcaataggcacctcgatgcccttggcggcaagttcctgattctcagcgaccttgatcatgatagcgcattccattcgctttttgaacagctcgcagccgtactcatacacaccggtaatgttgccggtagcgtggtaggagtttgctgcacagccgccggagcagtacagctttgcccagcagttctggcactccttgcgggcataggcgttgcagtgcttgaactcatcgcgcacggcagtgttcgtaacgcccttccagatatcgcccatcaggtacttggggtcgcccacaaactggtggcaggggtacagatcgccccaaggagtaacagccatgtactccgtgccggagccacagccggaaatgcgcttgtagatgcaggggccgccggtgaggtcgatcatgtagtggtagaaggtaaagccgcggccctcgcggttgcgcttgatcatttccttggcaaggatctcgtactgttccttcaggatgggcagatcttcctcggtcagggcactggggtcgccaggcttagacaccacaggctccatgctcagctcagtaaagccaaggtcggccatgtggaagatatcgttggtgaagtcggtgttgtagtgggtgtaggtgccgcgcatgtagtagttcttgtcgccgcgcttcttcacgaactcctgaaacttgggcacgatggtatcgtagctgccatggcctgcatagtccttgcggaagcggtcgttgacctctttgcggccatccagactcagcaccacattgtggcactccttgttgcagaaatcgatcacatcgtcatcgatcagcataccgttggtggtcatggtaaagcggaagttcttattgtggatcttctcctgctcacggcagtaggcaaccagctttttgaccatgtcaaagttcatcagcggttcgccgccaaagaagtccacctcaaggttgcggcgggtgccggagttttcgatcaggaagtccatggcacgcttgcctacttcaaagctcatcagcgcacggtcgccctgatagcggccctgcgaagcaaagcagtaggagcagttcaggttgcaggtgtgtgcaacatgcaggcacaaggccttgaccacggtgttgcggtttttaaagtcgaaagccatattctcataggtatccggggtccacagcttgcctgcttccttcaggctggtcacatcatcgatgcactgacgcagatcttcctccgtgacatcctcgcggtctccatactttgccatcatagccgaaacgatctcgtcagcagtatgctccgggtacatggcaatgatatcgtatgcaacatcgtccaccacatgcaccgagccgctgcaggtgtccagcacgatgttatagccgttcaattgatactggtgtaccattttactctccattccaattatacaaaaaaatgccgcccggcaaaggcggcagggggttgcaaaaattacttgttgctgttctcgcactgctggttagccacgccgcaggaggtcttgcaagcggactggcaggaagtctggcactcgccgcagccgccggtcttaacgctcttggtcaggtcacgagtagcaatggtcttaatacgttccataatagaaaacctctctaactctcaaaatttcatcgcgccggacaaagcccagtacgcatttatctttgcttatgataacacgcaaggggctttctgtcaagatttttatgctgccaacctgttcaaacctgtccagcaggctgatacttcgtcaggacggtgtgcagccccagctcccgcgccctggccagtaagtaccggtagcggcacaaaagcgcctgccgctcgtaaatgcgctgctcgatcaggtctgtatctacctccagatcaaacatcatctcattgcgccgcaggcagaacagacattccttcagctcttcttccagttctgggtgatagcgttcgtgctcggtatcccgcgggatgcggctcgaaagcaaagtttgggtgttctgggcatgggttcgttccagcataggccgtcctcctcttctttgtgtatcttgaaggtttgtacattttagtatatgaagagaccggtgcagaatatgccagtttatggtaaagcagaaacttctccgctggtgcgcgcattttaaaaaagtttgcaattttttcaaaatcacgcttgacaagtatcacttttccgcgtataatagcacacgttgagcggctcacactgcgaaacacaatcgaatattggggatttgcatagtggtagtgcggtagactctgactctacttgtgggagttcgattctctcatccccaaccaaaaagccatctggtttacaccggatggcttttttcgttctatattgttatacaaaaacagcgtaccgtctttgcgacggtacgcccatttttatgcagttattacagaatgctgatgcggcctgcgccgtagggattctcgtaatccagcagatagcccgggtaatcggccagcgggctgtttgcggtggtcaaatgcggcagaccctctgcatctacaccgccaaaggtcatggcataggtagacatcacaaggtaatcctcagacacatagtccttgatcagctctgcgccatcaaacatggcaaagccatcgcccagattgcgcagagtgtagttcatgccagccagagcgtaggtcttgctctcgtccagcggttcataagtaccggaagccttgttgtagatcttcacgttctgcacgcgcggagtgccggtggcactgccaatccagacattcttctcgtcggtctgcacggtgttagggatatcggcgtggatctcgtaggaagcgcctgccacatgcaggaagccgccgttctccttttccgttccggcaaagcgggctgcaaactccagtgcatcctggatctgcttgccggtgacagacatcagacaggccacattgccaaacgggctgacctgcttgcaggtcttgaaggtccagtagccggctttctcatcggcgcggatgccgccgccgttcatgatagcgatgtcacaatgcagctgttccacctcattgaagtaggagtaaatgccgtcggccacgaagtcgccgagattcgtctctgccatgcggatgcggcgcttgccagtctcggggtcggagatgtagaagttcgtatcggcaacagcgatcttctcacccagcatgtcgtccacagaagcgacccatgcgttctggatatcggcaacggcactgtcggagccttcgtaagaggaaatcagacgggtggcaatggagccgtcagccttgatggtcatttcgccaacatttgcaaaataagagccggtctgggtcagggcgacagccttgccggacagatccttcacccactcacactccatcttggtgtgagaatggccgtcgatgaatgcatcgaagccggaggtgtgctcgatgacttccttgctggtccagggcgaagaggaaggatcaacgcccagatggcccagaccgatcacgtagtcagccagaaccttggccttatcaatggacttctgcacagccttgtacagcttctggccgtcgtcaccgcccagaatatcatagatatagcggctctggctcttatccatgaagtaagccggagtagacttggtgaaggtctcgggcgtggtgatgcccacaaatgcgatcacgcggccgccgatggtgaagtatttgacatccggcagaacgcggttgcccagcggcagattgacccagttgctggagaggtacgggaaatctgcctcagccattacctcttttgcacgggccatgccgtagtcgaattcatggttgccgggagttgcaacatcgtagccagcggcattcatcagctggatgatagaggcaccttcgtccatggaaccatatgcggtaccctgaatatggtcgcccgcatctaccagcaggacatttttgcctgcatcctgatagctctttttcaaagctgcgatggcagcataggtcagttccggcgattttttgtcgatgtaagtatgaacatcgttggtgtacaggatcgtaatgtccttaaagctgccggggtaacatgcagacgcagcgggtgcgcccagacttacggcagcaacggccgttgtgacacctgcggccttcaggaagctgcggcgggagataagctgtttcatggaaaaacgacctcctcttaaaactctcttttgtttttatcgggcgcacagaaccagcccgacgcttgttatattaagcataacacacaaaacacccaagaacaacccggaatcgcacaatttgttcataattcacggtactaagtcgcactttttgtgcagcattattccttttcagggcaaaaaacagcccgcatctgcagccagtcgttgactgcaaaagcgggctgttttcaaaggggattcaaaaatggatcagagcaacgagctcaaatcgcattgtattccttgaggaatttctcaaggtcggtaccctcgatctttttcaaagcttccttcatggcaaggcgcgggatgagcggcagatccatgtcggtgatcttcttgccgtcgcgcaacttgaccgttgcatcgatcagggcacgtacatcataggtgctgccccagacctcgggcacaccgcggtcgatgtccagcagggtgtacacagcttccataccggtgcgcatggagtattctgtggtgaagatggtgtcacggccggtctcggcgaactgacccaggaaggcaaagttgacagcaccctccggcacgatatcaggacggtcgcccatcgcacgcggcataaagaatgcatcgatatacggcatcatgaccgggatggtgttggcactgtgctcggccagctcttcgatctgatcctcgggcacaccgatatggtacagccactccatgcacagttccttgccggtgcagtcgcgcatggcctttttgacgtagttgccgggcttatcactgaacaggccgtagacccagacgcacagctggttcttgggctggtctcggaactgctgctgacggttcagcgtccagctgagcagccagttggagtccttaacggtgacgatgccgccggtgacggtgtggccactgaacgggtcacgcttgcagatcttctggatatactgtgggattttgtcgtccagcgtagtgatggtggcgctttcccagttggaatgttcggggtcggagcagaacttttcaggattgccgaatgcagggtcctgtgcagcgatcttcttccacagatcccagccgttgcccggcttgatggtgggatcaaagcctgctgccttgtcctgtgcgcccatcgtgcagctttccacgcagccgccgttggtgatgaacagcagatcattttcggtcaggtcaatggtgctgatctcacctgcgtgctccacaaccacgctgcttgcctgcttgcgcttgccattgatctcaaatttcacgtccacgaccttggtctcatagtggaactgcacgccgtggtccttcaggtaagtgaccatgggcaggatgatagattcatactggttgtagcgggtaaagcgcagggcagtgaagtccggcagaccgccgatgtggtggatataacgcttgaggtagagcttcatttccagagcactgtgccagttctcaaaagcaaacatggtgcgccagtacagccagaagttggagttcagcacttcatcatcaaagaaatcggtgatcttcttatcctgcagctgctcgttgggggtgaagaagagcttcatgatctccatagcacccttatcagacaggccaaacttgccatcggtgtgggcatcctcgccgcggttgacggtagcacggcacagtgaatagttggggtcttccttgttcagccagtagtactcatccagcacactggcaccctcggtctccagagacggaatggagcgcagcagatcccacatgacctcgaagtggttatccatctcgcggccaccgcgcatcacgtaaccgatatcgtatttgtagccgtcgcaggcaccgccggggatggggtctttctcaaacacatgcacatgctcgcccttcatctggccgtcacgcaccagataacatgcagctgtcagtgcggccagaccggaaccaatgatatatgcagatttatgatcgacaccctccggctttttaggagttgcaaatgcttcatagttgccactggaatagtacatagaaaagcctccctgctttttattgcttttttcggcatccttgcgccgtccttatggcaacagtataccccgcgccgccgcagcagacaacaaacaaactttagcgggtgtataaattttatacaatcattctgttttgctggaaatacgtacaaattgtgacaaaagccgccctaatagcgaatcgttctgtgatatagagtgctttataaaccagtttcagcaaaaagaaaagcacctagattttaacgaatctaggtgatttttgttggtggaggcgatgggagtcgaacccatgtccgaaaagagttcagtgtaggtatctccgggtgcaggcgatctacaacattcccgccgcgccacgccgatcgtcaggctagcgcattggtagcttcatgaattcctgccggtccgcaaagcttaagtccgttcaggtgctgtgtctaaaggacgccccggccccacacgacacaagagtgggcggaacgcgcagcactcaggctgcgagcaactgagaattgttattgtcagttaatttttttggaggagttatagagcagttcccccactgctacccgctgcccagacctcgctctccccgtcgaaacctttacgcccccttataaagcacaccttgcggtgtgcagaaagctttgaaaaagttccgcttcaggaagcggtctgaaaagatcaatagtatttgccgttggacttcatggcacggtcaatggaacgctttgcgtcacgctgtgcggcatcggcacgcttatcgtagagctttttgcctttgcaaaggcccacttccattttcacgcggccatgtttgaaatagagcgaaagcggcacaagggtatatccctgcagcttgcactgctgatgcagccgccggatctcacttttgtgtgccagcaggcgccggacgcgcatcggatcctgattgaacatgtttccgtggtcgtagggactgatatgcattccctttaccagcagttcaccatcctcaatatcgacccagctgtccttcaggttgacccctccggcacgcaggctcttgacctccgtacctttcagttcaacgccggtttccagcgcttccagaacgaagtattcatggcgcgcttcacggtttgtggcaatggtttttgttgccggacgctccttagtgggtgccattccgcgcgcctcctttctccattgtggtttgttgtatcagtataccatttttttatggttttgcaagggctgtttttgaagaaattgtaaatttttcccaattcacagctcaccgcggccggaaagtgcacggtacaaggtggtctcgtctgtgtactccagacttgcacccaccggcaggccataggccagacgtgtggtcttgatgcccagaggcttgataagctttgccagatacatggcggtggcttcaccctccaccgtggggttcatggccatgatgacctctttcaccttgccgtcgcccaagcgggccagaagttccttgacgcacagctgttcggcagtaattccgtccatcgggctgagcagaccgtgcagcacatggtacaagccgtgatactcccttgtgcgttcaaacgcctgcacatcgcggggcgtttccaccacgcagatcacagaaggatcgcgttttgcactcgcacagatggggcagatatccgcttctgtataattctggcagatacggcagcgatggagcttggtgtgggcaccctgaatggctcccgccagtgcggcggcatcttcgtccgacatgctcagcacctgatacgccatgcgggtagcgcccttgcgcccgatccccggaaacttgctgaattcttcgatcagcttttccagcggggcagcagtatagcccatgttcttccctcctgccggatcagagaccagggatgttcatgccgccggtcagcttgcccatttcagcttcggcagtttcgtccacctgcttgacggttgcgttgatggcagcagccaccatatcttccagcatttcaacatcgtccgggtccacagcctcgggcttgatggtgatggacagcacttcgtgcttgccgttcatcttaacagtgaccatctcaccggcagcgctgccggtgtactcggcagcttccagctcggcctgtttggctttcatatcttcctgcatcttctgtgcctgacgcatgagggcgttcatatcggggcggccaaagcctgcgggcattcttgctttcataatcgtttctccttattgatgcaatgtatttttatgatctcgttttccttgcggaatcctcaatggacacatccaaccccagcttttccagtgcacgaagcgactgctctgcgttggagaccgttttgccagcgctctttggttcatagggaccaatgggcaccgccgtaccggacacatccttgatcagctttttgatcagacgctggctgtccttgttggcgcggataaaatcgcggaaggtcttgccgccgtcgatcagcacgcgggtgccatcaaagtaagccttggacttgcgcagataggtgtagagcatgggatctttttcctgcagctgctgtaccacctgcggccagtacggatacagcgcagtcccttcctgcccggcatcctgtggcttttccggcacaggctttgcagcgggcgtgggtgcaggtttgggcggttctggctgcggaacaggttccaactctgccggcacgggtgcagctggctgtgcggcctgcgcggcaggctcgtcccaaggcagcattccggcctgctgcgcgggcggttcctccggcagcggcggcagctcttcggtctggacgggtgaagtctgctctacagatatttccgacggcacggaaggttctgcctttacaggtttcggttccgctgcaggctgcaccacaggaacggacggtattggcggctggggagtcggagcgcttgcaaagggctgcacagcagttgccgaggcaaacggctgcggcgctgcgggttgagctgcagcacggacaggcgcggcctgcacaggaactgcctgcggctgctggggcggttcggataagccaaatagtgcaagttccagctcgatccgctggtcgcttccgcgggtcatatgttccagcgcactgcccagcgcacggatggcacgaatggcctcccgctggcccagctgcgggcctttttccagatacaaagcctcctcctccggcgaaacgccggacagaaggctctgcccgcccggcaatgctgccagcatcaaagcacgataatgcgcgatcaattcctctgtcagacgcttgacatccacagactgctggcgaagctgtgccagctgggccagtgctgtggcaccgtcctgcgcttccagtgcgtccgaaatgcggaacagataactgcggtcggtcacacctgccatgcggcgcaccacatcggcatcgattttcgccgtaacgcctgcgcaggtatccagaatggacaacgcatcgcgcagtgcaccgtcggccagacgggcgatcagttccgcaccgtccggcgaaagctccagcttttcctcacctgcaatatattccacccggcgggcgatatcctccggcccgatgcgggtaaaatcgtaccgctggcagcgggaaagaatggtggcgggcaccttctggatctcagtggttgccagaataaagatgacgtgggcaggcggttcttccagcgttttgagcagcgcattgaatgccgccgtggacagcatgtgcacctcatcgatgatgtataccttatatttacaggcgctgggagtgtaagctgtttcgtcgcgcaggtcgcggatatcgtccacaccgttgttggaagccgcatccatctccaccacgtccagaatgctgccgttatcgatgcctttgcagatctcacactcgccgcaggggtctccattgaccggatgcaggcagttgactgcctttgcaaagatcttggcgcaggtggttttgccggtgccgcgcacgccggtaaacaggtaggcatggcccacacggtttgccgtgatctggtttttcagcgcagtaacaatggcccgctggcctaccacatcctcaaaacgctgcggtctccatttgcggtacaaggcacggtacatggttctctcccctttcctgcaaaataaaaaggacagcgctgacggggttttgtccccgccttgcgtaactcggcatacggatgcaggcttactgaaacgcacgaacgcactgcttaaggctgcttggttccccacctgacctggttcacagcgaatccatcgtacaggacccgcatccgtatgccgaaccacgcagcaggcgctgtccgacacatccttctgaatgccagaatattgtaccataaacgcaggcagattgcaaggggtgggaggtatcatttcacggcccacgcatgaaacgatcaaataggatatcccaacgtcagaaaatgtgatgttctctaaaatccaaaaagcgcagtacattctctgcgctttcgcgttttgtactgcgctttgcttttatcctgttattttaacggcattgattttgcagcagccttttttcttacaatgccacatccagcgccatcatcagcgcaaatcccagcacgatgcttacaacaccggcaggctcgtcgccctccacggcctgcgggatcatctcctgtgcggtcacgcacaccatgcagcccgccgctgcgctgagcagccacggaagcgcagtactgacccattcggccagagcaaaggcaagcaatgcccccaacggctctaccagcccggaagccgctcccgcaaaaaacgcctgactgcgggtgcggccgttatgggccagcggcaggctgactgctgcaccttccgggatattctgcaggccgatgccaaggctcagcgccagtgcaccgctgatggcatccggctccccggtcaatgccagtgcagcggcaaggcccgccaccataccctcgggcaggttgtgcaatgttacagccagcaccatacgtccgccgtgcccggccccgcctgccagcagctgcccggcaaactgttccacctgcaaaaggcccactgcgccaagcacaagccccactgccgatgggatccatgccggaagcggcaaagtctgtccgcgctggatagcaggcagcagcaggctccacacactggccgccagcatgatgcccgctgccatgccgcacaggatgcgctgcgtgcagggccgcgactgccgccgcagcaaaaacacgcctgctgcccccagtgtagtgcacgccgccggaaacagcagtacccacgcagtgaaaacgatctggttcacgatacattccccctttgcccggtgtatgtgcgccgaagcaaaaaggtgcagaaaagcccgtcacacaaaatacagtgtgatgggcttttctgtcagaatgcgatggcatcttcttcgctgccaaagggcagacccgtagccggatcgaccggcggcaggccagtctgccccatatccgccgcctttacgctgcataccaccgcattggcaagcacatacttcacctttgcggtggcagcagcgccgatcttatcatagatgcggcctccgctgtaacagtcgcccagcacggtgtgagtgctgttggccacataacccaccttgcccagacccggcagttctgcgcggatggcttcgcggtcaaagccattctccggctccttgaccagctttaccttctggcctactgtaaacggctgagtgccgaagcggtagttgagtccggtcaatgtaacatagtacttcatctttatttcctccaaaacacatgttttattttcagggaacccgttcatcccctgctgtgtctgtattatccactttttatgtccaataaaaatcactttcaaataacacttgtcattttttgatatttttgttcaggttcgctgcacaaagtttaccatcttttctttctccgcaggtcaactgtcatatgacaaatggttcttttccgtttccggagccgcatcatcctcacttttgcatttctttatttctctttcgggaacatgcattcccgtcttgattcaagtgaacaaacaatgaaagaaattacaaagtgattacaacgcggtaaaaaattctttcctgagtctccctgtgcttcgatcagtttaacaaaaactctttgacttttagcgataaattataacaaaatcgtagattatcattgaaatctcacttcttagccaaaaaagctcttgattttttcgcaaaaaagactagaatatccacttgcagaaaggcacttcctgtagggccttctgcaaaatacatttgcgtatggcaaggagattttagatatgaaactcaagaatgtttgtgttgctgttgttgctctggctctggctgttggcatgaccgcttgcggcggttctgcttcctccactgctgcatcctcttccgaggctgcttctaccagcacttctgttgctgctgaggccgaggagagcgcttcttccgctgttgcagaggagaacggttcttcttctgaggctgcttccagcgaggccgcttcttctgaggccgcttccagtgaggctgcttccagcgaagctgcttcttccgttgcagcttgatcgcacagcgcctaaattccaataaaagctgaagccgggcacagggagccatgagttttcctgtgcccggcttttttgcagcaaaatgcgccggaaaggtttattgggaacctcccggcgcgttattttttatgctccccagaacaggatccccagtcctgcagagagcaggatcatcccaatgggcgatggtgctttgccctttttccggcggcaaagggcatgcagcccccacagcagcaggaacaccacaatggaacggagatccggtgcaatgcctgccttgtccgctgcaaacccggccagcgtagaaagcgccatgttgactgcagttgccaggatcatcgccaccacacagggacgaacgccgccaagaactgcgttgacaccggcatatttcatcaaattctgcagcaccgatgcaacgagcaggataatgacaaaagacggcagcaccacacccagcgtggcgcacagcgcgccccagaagccgccctgtgaagaaccaatgaaggtggccatattgatggccagcgggccgggtgtggactctgacaccgcaataaagctgaggaattcgccttccgtcagccagccgtgccccagcaccgtttcgcgcaccagcgagatcatgccgtagccgccgccaaaggacagcgcgccgatcatgaggaaattccagaaaagttctacatagatcacggcttcttctcccccttccgcagctgctgtactgcatacaccagcagcccggccgcaccgctgaacaggatgtaaaaaatggaagagaaggacactgctgcaatggaacagcccaccatcgctgccgcaaccgtggtcaggatgacaatattgaagacgctgtgttccagctgcttcagcatcttcagtccggcggaaaggatcagatagatcacacacacctgaatgccgtggaacgcacttgccaccaccgacaggcggaggaactggtcaaagaacagcgagatcagataaatgaccgcgaaggacgggagacacaccgccaccgtggacgccgccgcgcctgccgcaccctcgatcttgtaaccgatataggtggcactgttcaccgccaccgggccgggcgtagactctgcaattgccaccatgtccagaaattcttcttttgtcacccactttttctcttccacaaactcattctgcagcaaagccaccatggcatagccgccgccaaacgtgaacgctccaattttgaaaaacgtccagaaaagctcctttgttttcgacatatttgttttcgacatagctttctcctttcttgcaccttattatatcattttttgttttcatatgatatactttaatggaatatgctgctttctttggaaaaagcagaaaaaggagtttaggatatgaaaacaaaatttggtatcgtaggctgcggatttctgggcaacattgtggccgatgcatggaagagcggtctgctaccggactatgagctggtgggcgtgaccagccgcacccgtgcttcggcagaaaagactgccgaaacagtgggctgtgccgtgtgtgacgatgtggatgccctgctggcgctggagccggagtacatcgtggagaccgcttcggtggaggctgtgcgcgccatggctgtgcctgtactgaaaaagggcgtgaacctggtcatcatctccattggcgcgtttgcggaccttgatttttacgagcaggtcaaggccgctgccgcagagggtgatgccaaggtgcatctggcaagcggtgccattggcggctttgatgtgctgcagaccgtcaccctgatggccgaggcgcagaagctggccgagacggcaggcattgagacgcacaccggagccaagggcttccgcaacacgccggtatgggccgaccacctgctgaccgataccgaaaagaccaccgtgttcaccggcaatgccaagcaggccattgccaccttcccccgccgcgtgaatgtggctgttgccacctcgctggccaccaccggcccggagatcaccggcgtgaccatgcactcggtacccggctgggtgggcgacgaccactgcatcaccgccgagatcgagggcgtgaaggccgtggtggatatctgctcttccaccagcgccattgccggttggagcgtagttgccctgctgcgcaacctctcctcccctgtatgcttctattaaaggagggctttgcagatgttcaacaaactggtggccattgagccggtcagtctgatcccctccgctgagcaggaactgcatcagtatgcagaagaggtgaccctgtaccgcgatatcccggccagcgatgaccagatcgtgcagcgcatcggagatgccgatgctgtacttctgagctacacctcccgcatgggcaaaaatgtgatcgagcgctgcccgaatatccgttacatcggcatgtgctgcagcctgtattctgaggaaagcgccaatgtggatatcgcctacgcccgcacccgcggcatcaaagtgctgggcatccgggactacggcgaccgcggcgttgtggagtacgtcctgcatgagctcaccggcatcctgcacggttttgggatgcccatgctgcgggacgagccggtggagatcaccgggctgaaggcaggaatcatcgggctgggtgtgtccggcaaaatgatcgccgacgcgctgcagttcatgggtgccgacattgcctattacagccgcacccgcaagccggatgccgaagctgtgggcatggcctataagccgctggcacagctgctgaccgagagcgaggtggtgttcacctgcctgaacaagaacgtactgctgttgggcaaggacgaatttgcgcagctgggcgcaggcaaggtgctgttcaacacctccatcggcccgggatttgactctgctgctctggaacagtggcttgctctgccgggcacccacttcttctgtgacacccgtgccgctgccggcccggtgggtgaagacttctttgcccgtgagaatgtgcattgcgcgaatgtttctgccggacgcaccaagcaggcttttgtgctgctgagccagaaggtgctggcaaatatccgcactgcactgggagaatgatataaaaaggaaacgcttcccggccggggaagcgtttccttttaggctttattcaaaattgttgtgatctcttccagattcgccgcaaattggatgccctgctggcgctgcggcgtggaaaggcccttctcgatcattttgtccagcagtgctttcaggctgtcgtagtagccgttcagatcatacaggatgcagggcgcgtccaactggcccagcgagaccttggacattacctctgcgatctcttccagcgtgccggtgccgccggggaatgcgatgaaggcatcgcccagctcgatcatcttcgtcttgcgctcggtcatgtccttggtgacgatcagctcggtcaggccatcgtgctgcagctcctgctgcacaaagaactgcggttccacaccggtcaccgtgccgcctgcgtccagcgcgctctgggcaagctgacccatcagaccgctgcgggagccgccgtacacaaggcggtgcccgtttgcaccgatccagctgcccagttcccggacagcttccgccagcgcaggatcattgcctgcatttgctccaagatagaccgtgatgttcatggtatttccccctttgttttttccattttaccacgcagcgggccgattgaaaagggccatccccttgcaaatgcagcggcactgtggtattcttgaacgcagaaaaaagggagcctgcaaaagcaggctgagagtgggctgtttgcccagacctgtgacctgatttggacaatgccaacgtagggagatactgctgcttcaaagtgcggagatgcctccttgcgggcatttccgcattttttgcaaaggaagttgtaaccatgaaaactgcattgacgattgccggcagcgattccagcggcggtgctggcatccaggccgatatcaaaaccatgactgcaaacggcgtgtacgccatgagcgctattaccgcactgactgcccagaacaccacaggtgtgaccggcatttttgaagccacgcccgaatttctggcacaggagatcgacgccatttttaccgacatctacccggatgccgtcaagatcggcatggtatcctcggcagagctgatcggtgtgatcgccgaaaagctgcacacctacggcgcaaagcatatcgtggtggacccggtgatggttgccacctccggctccaagctgctgcgggacgatgccgtgcaggcactgaccgaaaagctgctgcccatggcagaggtggtcacccccaacattccggaggctgagatcctttccggcatgaagatcaccgatgcggccggaatggaggccgctgcaaagctgatcagcgagaaataccactgtgccgtgctgtgcaagggcggccaccagatcaatgatgccgacgaccttctgtggcgggacggctgcggcaaatggttccgcggcaagcgcattgcaaaccccaatacccacggcaccggctgcaccctgtccagcgccattgcgtccaatctggcaaagggctatgatctggatgcatctgtggagcgcgcaaaggcctacatttccggctgtctttctgccatgctggatctgggccacggctccggcccgatggaccatatgtttgcactgaagggagagtttgtgggtgagtgagcagacctttgtgcagcagctggtgcaggaaagtctgcctgtgtgggagaaatgtctgcactcagaatttctgacccaccttgcggatggcacactggatgaagcctgcttcaagggctacatcgtggaggacagtctttacctgcgggaatatgccaaggtgtttgcctggggcatgaccaaggcaaaggatatgcagaccatccgcacctactattccctgctttccttcgtgaatgagagcgaggatgcagcccgcctgcactatctcaagcactttggactgaccgatgaaggcatccagagcctgccgctgcggccggagaaccgtgcctatgtggactctatgatcgaagccgccaaaaacggcgagggcgcagccgagtgcatgatggcctgcctgccctgtatgctgagctatggctggatcttccagaaactgctggaagaaaagccttccgtgcaggataccctttatggtgcactggtggtggactatgctgacaagggctatgaggcggcctgccgcgactgggccgcgtttgcagaaaaagtctgcgaaggcctgagcgacgagcgccttgcccgctgccgcgagatcttccatgcctgctcggagcacgagctgaacttctgggccatggcagcttccccgcgcagtgacctgtaatttttcctaaaatataaaatgcacccggcctgtgggcagaaccgcagcaaccgggtgcatttgttttgttcaggttttcgtggccgcaaccacaggcatgagccttagtgccggaaacaagggagccctaaaacaaaaactcccccggctcttctgccgagggagtggaaaagaaaaacgcccctaacagaagaattctcttctgtcaaggacgaataaaatttggccttttatccgcggtgccaccctgacttcatgggcatgaccccatgcacttggcgggatgccaacacatccccggcaactgacgtatgccctacgttgcagaatactgtgcggcgaaagttctccgcagttccctgcaccctcagcggtccatttcgggaaaatataacgcaaagtcacactttccttgacgaactgtttccggtctgcttctcagctgcgcaggctctctgtataggcatggttcgccgttatctccgcttcaacggtttagtgtattgaatttggctatattaaaccacggatttttcgtttgtcaatacctgtttgcaaatttttcaaaatcagcctatgtccacagtgggttcagcgcttccggcggctgttcgtgctggaaaacttcaccgcttttgccggcctgcggcggctgtgcaacgcactgtagtagccaaaggcagtgccgcataagccgcccacaatgtgcatgaagtttgctacattgtcgtgcacaaaaatgatatcgtacacctgctgaccaaagtacagcgctgcaaccagcagcatggtgaccgggatgccgccggagaagcccgccagcgacgaaagcatgataagcatgaacacgatgccggacgcgcccagcagccctgaacgtgggaacagcacgcattgcagcacgccggtgaccagagcggtgaacaccatgccgcacaaaagcggcttgctgccgtacttttcttccattggcgggccaacaacgagcagcagcagcatgttattcagaaagtggtcccagctggcatggcccagcacatggccgaacagccggatgtagaacagcgggtccttcagcgaggagcggtagacacagaacagatgcatcgtcgtccacccgtccgtccactggtcgaggaacagcaccagaagtgacagcaggaaaaatgtgaggatcaccggggagttgtactgcagttccagtttgagttttacttttttcatcctcttgtctccacccagtattcgcccatgctctggccgggctggttcgtcacttcatccttgaggtaatcgccaaggccgcagctttccggctgccatgcaagggctgcttccaccgtggggtactccacctcggcataccagaactcggtgggctggccttcgtccacatggttcacttccagcacagaaccgtccggcagggtgtagctgcggcgcagcttcgggatgagaggtttagcgataatcttgtattccagatcatcaaacagttctttgtcgatgctgcgctcgatctcctcacgggcaaggccgcccccggatttgaagcagaggatgtagtccgttctgccgccggtgagggcttcttcccggatgcgcacagtgggccgcacgctgatatagccctgccgcatggcaaattcctccctgaggggcagcccctccggccagcccttcaccatccatttgcgttcgatttccataatgcatccctctttcatgcggttttttggcatttcttatttataataacatgattttgtgctattataaagggtagatttttactccttctgtctgcgaacgcgggacgaagggagttcgtccatgataaggagaaccatatgaaagaacgcgcttaccctgtgtataccgtcaacaaacacgccgagggcctgctggtgggcgggcacccctgggtgtatgagaacgacatcctccattccccggaaaatgagctggaaaacggcacgctggccgatgtggtcagcaccaaaggttcctaccttggcaccggcttcgtttcgctcaagagcaagatccgcgtgcggctgatctcccgcaatgccaacgacacctttgatgctgcgttctggcgccgccgggtggaatatgcatggaactaccgcaaaaccgtgttggagcccgccgacctttccgcctgccgcgtcatttttggcgaagccgaccagttccccggcctgactgtggaccggttcagcaacatcctcgtcacgcagaccctgagcgtgggcatggaaaagctcaagcccgtcctcttccccattctggcagaagtcctgcgcgccgacggccagaccatcgacggcatctacgagcgcaacgatgaggctctgcgcgcaaaggaaggtcttgagcagaacaaaggttggtttgagctgcccggtgagactcaccctgcaagcacccagaccgagatctgcgagaacggagtttactatcatgtagatttcgagaacggccagaagaccggcttcttccttgatcagaagtacaaccgccgggcggtggcacgccttgctgcaggtcacaccgtgctggactgctttacccacaccggcagctttgcactgaacgccgctgcgggcggcgctgtccgtgtgaccgccgccgacatcagcgccgaggccattgccatggcgcagcgcaatgcccagcgcaacggtctgaccaatatggactttttgtgcgaggacacctttgagctgctgccccgcttggaaagagagggacacccctacgattttatcattctggacccgccggcctttaccaaggcgcgccgcactgtggagaacgccatgcgcggttacaaggagatcaactaccgtgccatgaagctgctgccccgcggcggctatctggcaactgccagctgctcccactttgccaccgaggagctgttcatcaagatgctgcgcgccgctgcaaaggatgctcaccgccagctgcggcagatcgaggtgaaacagcaggcaccggatcatccgatcctgtggggcgtgccggagacgaattatctgaagttcttcctctttcaggtaatttgacgatttgaacaccctccgtttcactctgggtatcttcagcggaagttttatttttaatatttgagcttccggaaaatctgcggattttccggaagctcttttttcacaaagcggggccgtaacgggcaatggcaccgtatattaaaaacacattttcaccagaagggaccccatcgggtaaatgcatctttttgctgcgctgcctgaaccctctcagtcaaagcctgacggctttgccagctcccccgaggggggagctttatgagcagggacggaaaacaacgatcttttccgatgatgaataaacttacccggcagctggataaaagctcgcccttcgggagagctggcattgcgcaagcaatgactgagagggtttttcccatcgggcggagagggttcgttctcttaaaaagtcataccaagtgcggatgctccaaaaatgcaggaagctgtttgtacagaatcgttagatttgtcaattgcctttttgcccggcagcggctataatcaaaccatagacagcaacggcgctgtgggtcacctcctgactcgcagcgccgtttttgttaagatgctttcgtacttctgggtgcggcattgcggcagaccagaatgcagacgaaagggtaagaaaaataagatcaagtaaggagtaggatttatggcagcgaatgttatggaaatctacggcagcaaggtctttaacgaacatgtgatgaaggagcgcctgccgagcgcaacctataagagcctgaagaacaccctgcacaagggtgctccgctggacattgaggtggcaaacgtcgtggccagcgtgatgaagcgctgggccatggagctgggtgccacccactacacccactggttccagccgctgaccggcatcaccagtgagaagcacgatggctttgtttcccctgtgggcgacggcaccgccatcatggagttctccggcaaggagctggtgcgcggcgagcccgatgcatcttccttcccctccggcggtctgcgcgccacctgcgaggcccgcggctacactgcatgggaccccaccagctacgcattcgtgaaggatgacgtgctgtgcatccccaccgcattcgtcagctacaccggcgaggctctggataagaagaccccgttgctgcgttccatgaacgcactgtccaatcaggcggttcgcatcctgaagctgttcggcaaggatgtggattacgtctccaccaccgtcggccccgagcaggagtacttcctgatcaagaaggaagattacgaagctcgtcaggatctgatcctcaccggccgcaccctgttcggtgccccctctgccaagggtcaggagctggaagagcactacttcggtgtcattcgtcccgaggtctccgagtttatgaaggagttggacgaagagctgtggaagctgggcattcccgccaagaccaagcacaacgaagttgctccctgtcagcatgagctggctcccatcttcgacaccaccaacgttgccatcgaccacaacctgctgacgatggagatgatgaagaagattgctcccaagtacggtctggtctgcctgcagcatgagaagccttttgagggcgtcaacggcagcggcaagcataacaactggtccatgtccaccacccacgagaatctgctcgacccgggcgacacccccatggagaacctgcagttcctggtgttcctggccgccgtcatcaaggctgttgacgagtacgccgatctgctgcgcacctccgttgccactcccggcaacgatcaccgtctgggtgccaacgaggcacctccggctatcatttccatctttgtgggcgaagagctggaagctgtcatcgatgctatcgcatccgattccccctatgccggccccgtcaagatgaagatggatctgggcgttgatgtcctgcccaagttcagcaaggataccaccgaccgcaaccgtacctctccctttgccttcaccggcaacaagttcgagttccgtatgcccggttccgctgagaacctgagtgatgccaacaccatcctgaacaccgccgtcgcaaaggaactgaagggctacgccgacgagctggagagcgctgaggactttaccagcgccgtgattgctctggtcaagcgcaccatccgcgaccaccgccgcgtcatcttcaacggcaacggctacactgccgagtgggaagaggaagccgcaaagcgcggtctgcccaacaagaagaacacccccgctgctctgcctgccctgatcgagcccaagaacattgccctgatggaagagttcggcgtgctgaccaaggtggagatggagagccgctacgaggtggagatggagcactactccaagatcatcaacatcgaggctctgaccatgctggaaatggcccgcaagcagctgctgcctgccgtcaactcctacatgagcgagcttgccaataccgcagcatccaaactggctgtgagcgagaacatcagcgtgcgcagtgagaccaagaccctgggccgtctgtccgccgacgccgacgccatgagcgacgccatcgacaccctgcaggatgccgtggatgccgccaaggctctgccctccgagagcgagaaggccgttgccttccacgacaacgtgctgcccgccatggacaccctgcgtgccgccgccgacgacgccgagaccatctgcggtgaggattattggcctctgcccagctacagcaagatgctctactacgtctgatctttcatcagcgtaacagcagaatagcatccgtaggctgcggaatttaaaattgccattctccttttcctatttcttacaccagcctaaagacctgctcccattctgagggcaggcctttaggcgttttatttgaaagggaaaccattatgagctattcgacccaacaggacatccttgattttgtggaggacaacaacgtcaaatttgtgcgctttgccttctgcgatatctttggcactcagaagaacattgctgtgctggcaaacgatctgcccaaagctctggaagacggtgtctgcttcgacggcagctccattgccggcttcatgaaggtggaggaaagcgaccttgtgctgcggccggatctgtccaccgtgactatcctcccctggcgccctaccgagggccgggtgatgcagttcttctgtgatgtggaaaagccggacggccagccctttggcggcaactgccgcggctttctgcgcagcgtgaaccgaaaattcaaaaagctgggcatcacctgcaatgtgggcgcagagtgtgagttctacctgttcgagaatgatgaccggggccgccccacccgtatccccatcgactttggcggctactttgacgtggccccgctggacgcaggcgagaacctccgccgggacatctgcctgaccatggagcagatgggcatgagccctcagcacagccatcacgaaagcggcaacggccagaacgagatcgactgccaccacgcaggccccctcaagaccgccgacaacgtgatgatgttcaagcagatcgtgcgcgccattgccacccgcagcggcatccatgcaagcttcctgcccaagcccctgccggatcaggcaggcagcggcctgcacatcaacctgtccctttacatggatggccgcaacctgtttgagggcgacattgccccggacagcattgcaggcagctttatggccggcgtgctggcccacagccgggagctgaccgtgttcaccaaccctctgcccaacagctatcagcgctttggctgcgatgaagcgccccgctatgtgagctggagccgccagaaccgcagccagctggtgcgcatcccgcaggtaaagggcgacaactgccgcatggagctgcgcagcccggaccctgcctgcaacccctatctggccattggtctggttctggctgccggattggacggcatcgagaaccgcatggtgctctctgcccctgtgaacaagaatctgttcgacccctctatggctgagggcctcagccttgagactctgcccgccagtctggaagaggccgtgcaggctgcggaggagagcgaatttttgcgcagagtgctgcccgagcagcttgccagccgctactttacggaagaactgaagcgctgcgaagcactgaaacacgcgtccgaccctgttgagtacgagcgtacccattacttcaacgccatctgacccctgcaaaagagagtgtgtaggagaaaggagcgaaggaaatgggacgtgcactgatcgtaagtgccggtgcaagctccaacgagtatattgctgcacggctgaccgaaatgggctacagccgcccggtgatcattcccagcggggccgaagcccgacggcgcatgacggaatcggattttgagctgatcgtggtcaactctcccctgcccgatgaattcgggcatgaggtgtgcatcaatgctgtggaaaaaacagatgccggtgtcgtgtttctggtcaaggccgcacaggctgagcagctgctgggccctttgagcgagcagggggtattgctgctgtcaaagcccttcagcacttccctttttgtgcaggccatgcacatggcagcggccggcaatcaccggctgctgcgtgcccggcaggagaacgcccgcttacaggaaaagatcgcgcaggtgcggctggtcagccgggcaaaatgctgccttgtggagcacgagcacatgaccgaagccgaggcacaccgctacatagaaaaacaggccatggatacccgtcgtgaccgcacagaaattgcacaggaagtccttgaaaattatgaggacatgggtgtataatattggattgggaaaagtatccttgctttcaccggctcattttgggagaggctgagagcaaggccgttcacctgaaagaattcacaaaggtttataagggaaagaattcagaaaaacaaaaatagaggaggaaattctatggcagagaaacaaaccaaattcatctttgtcaccggcggtgtcgtctccggccttggcaagggcatcacagccgcatcgctgggccgtctgctcaagtgccgcggtctgaaggtggccagccagaagctggacccctatgtgaatgtggatcccggcaccatgagcccgctgcagcacggtgaggtgttcgtgaccgacgatggcactgagaccgatctggatctgggccactacgagcgctttatcgacgagaatctgaacaaatactccaacctgaccaccggcaaggtgtactggaacgtactgaacaaggaacgtcagggtgcatatctgggccagaccgtgcagatcattccccacatcaccaacgagatcaagagctacatctacaatctggcctcttccaccgaggctgacgtggtcattaccgagatcggcggcacgaccggtgatattgaaagccagcccttcctcgaggccatccgtcaggtgggtctggagcagggccgcgacaactgctgctacatccatgtggtgctggtgccttacatttccggctcggacgagtacaaatccaagcctgcacagcactctgtgaaagagctgcagggcatgggcgtgaacccggacatcatcatcctgcgcgcagatggcagtgtgggcggcgacatccgccgcaagatcagcactttctgcaatgtgaagccggagtgcgtgatcgagaacctgaccatgcccagcctgtaccagtgcccgctgatgctgcacaccggtggtctggacgaggtagtggtgcagaagctcaagctggatgtgcccgctgccgacctgaccgagtggaagcaggtggtcagccgcattgctacccgcagcaagacctgcagcattgcactggtgggcaagtacgtcaagctccacgacgcctatctctctgtgatggagagcctgtaccacgcaggcttcgagaatgacagccaggtggagatcaagtgggtggaaagcgaggacctgaccgaccaggccgcctgcaaggaagcctttgcagatgtggacggcatcatcgtacccggcggctttggcgaccgcggcattgagggcatgatccaggctgcacagtatgcccgcgagaaccatgttccctactttggcatctgccttggcatgcagatcatggtgatggagtttgcccggggcgttttgggctacaaggatgcaaattccagcgaattcaccccggatggcaagcataatgtgatcgccctgatggccgaccagcagggcaacattcccaagggcggcaccatgcgtctgggtaaatacccctgcaaggtgatgcccggcaccaagatggccgagtgctacggcgaggccgagatctgggagcgccaccgccaccgctacgagttcaacaacgagttccgtcaggagatgcaggacgccggtcttgttatttccggcaccagccccgacggtcgtctggtagagactgtagagctgcccggccgtgacttccatttgggcgcacagttccacccggagttcaagagccgtccgaaccgtgctcacccgctgttcaaggcattcatcgctgcggcactcaagttccgcgccagcgagcagcgcagcctgctgcacatgtaaaccataaaaataaggtgctgtctgtgcggacagcaccttattttttacccatataatccctgatcctgcaaggcattattcatagtggtcattttccagatcacacaccacaaaccggtccacgatgtgggccatcccgtggaacatctgttccgtaagtttcttgcggcgctgtagctccatccgttccgcttccgctttttgcagagaactcccggcggctttgttctatccttgatttccgatcagcaccacggccacatcgttgacattcgtgccggtcgcgccggtgatgatgagcccatccaccgccttgagggcatggtaggcatcgttgttctgcagcacatcgtacaccttcagctggttctgcgccagtgccgcggccgtgctgccgtccacatagccgcccgcagcatcggttgggccgtcggtgccatcgctgcccaccgaaaagaccgctgcatccagcccggcgatcaccggtgctgcagcaagggccagctcctgattgcgcccgcccagacctgttccggtcaggtggacgaccgtctcaccgcctgcaagaaaggccagctttttgccctgccccgcgtgggtgcgggctatggagccaaggaagctgccagcctcccgcgcttcacagcaaagcctgtcggtcaagatcaccggctcatagcccagttcccggcaggcgttggctgctgcgctgcacagctcccgcacgctgccggtgatctgcgtggcaacacggtccagcacctttggagtctcctgtgccagcagagccttggcctgtgccgaaagctgcaggtgatatttttccgcaatggcaagggcctgtgcacaggtggaggtatccggcaccgcagggccgctggcgatcatatccagcgggttccccagaatatcactgagcacgatgctgaacacctgcgcaggcgcacagctctgtgcaaaccgcccgcccttgaccccggacaggcgcttgcgaatggtgttcatttccacgatatcggccccgctggcaagcagctggcccgtgatctgctgcagctctgcgccggggatcagcggcttctcaaacagtgcactgccgccgccggacagcagaaacagcaccgtatcctctgccgttaagccctgcaccagttccagcgctttccgggtggcggcaaagccattctcatccggcacggggtgcccggcttcgcagcagtccacgccggggatcgtgcccttcacgtggccgtatttggtcacgaccacgccgccatccacccggccaagaaatttcaccgccgcatgggccatctgccatgctgccttaccggcagccaccagcagcaccctgccgccctgcggccggaaatttttcagcgcgcggcgcaccgcttcgtccggcagaacagcgttcaggctggcacggatgatgacatctgcatctctgcgcagtgtttcgtttttcagcatgtcgttctccccttttccatcgcttcttgtccgcggacaaaaaacacctgtacagtctcttcccatgcaggaaaacgcagtacaggtgttctgatcttttttgcttactttgtgcttgccggagcaacctcaaagtcgatcttgcccaggttcacatccgcacgcacaatggtgatcatcatggtgtcgcccaggctccagttcttgccggagacggggtcggacaggcggatgccctcggtgagcatggtaccggagggggtcaggctggaagccggcacaaagccctccacgccgttctccaactcgatgaacaggccgcgctgggtcacgccggaaatgcggccctcgtagcactcgcccagatggcggcgggcatactcggccttgtagcagtcctcagccttgcgctcgatctgcattgcaatgatctcgcgctcactggactgcttgcttgccttctcggcaaagtcgctgtagcgcagcaccatggtatccttatccatgcccttgagctgggcggtcatgatgcgatggatggccagatccgggtagcggcggatggggctggtgaagtgagcgtagtccttcagcaccaggccgtagtggcccttgggcttttcctcatacacagccttggacatgcagcgcagcataccggtattgatgatctgctcatacgggccgccgcgcacaccttccagaatggcgctcagctccttgggggtgggcacatccttggcaaagtgatcgttgatgccgcaggcctgcagcagagtgtgcagacgctccagcttttcagcattgggttcctcgtgcacacggtacacgaaggggatctgcttcacgcgggcaaagtgggcagcgcactggttggccagcagcatgaactcttcgatcatagcttcgctctcgccggaggtgcgctttttcacgtcgatgcagtggccgtcctcgtcgaggatcagcttcacctcgccgctctcgatatccatgcagccgcgctccttgcgcaggcgggcgcggtggccgtacagctccttcatggcgggcagctggctgagcacttcatggtacttgcccttcagctcgtcgtcagcactgccggccagcaaggcattgatctcggagtaaacgcccttgacgcggctgcggatgaccgacttgacaaagcggtaatcgatcaggttgccatccttatccagatgcatcaggcaggagaaggccagacgcagcacgccctcattcaggctgcagatgccgttggaaagctgcttgggcagcatgggcaccacctgatcggcatagtagacgctggttgcgcggttaaacgcttcgttgtccagttcgctgccgggcttgacatagttggaaacatctgcaatgtggacacccagctcaaagccgccctccggggtcttggtcagactgatggcatcatcgatgtccttagtctcagcactgtcaatggtgaaaatgggcagggcgcgcagatccatgcggccctcggtgtccttttcagagacctcagcgttctccagcttcttggcttcctcacgaaccttatccgggaagcggctgcggatatcctgcgcatagagcagggcctttgcgcagcgctttgcttcgtccgagctgccaaaccgcatggcaacgcccacgcggtgatcttcctgccgattgccgcgctgcaagatctccacggccaccttgtcgccgtcctttgcaccgccctcgcagtcacgcatcaactgcatggagatggccgggcagtcgtccggcacgaacttcaggcggccctcaatgcggcgggcagtgcccaccagatcgttcttttcttccagaatggccaggatctcgccttcatcactgccctccacacgggggtgctcaaacttttccacaagcaccatgtcgccgggcatggcaccgcgggtaaaacggcccgggataaagatatcgctggtgccgtcctccagcatgacaaaggcaaaattcttgcccagttttaccaccttgcacaacagagccttgtctgcacggccggagcgcaccgtaaagaacacgccctgacgctggcagatgaccgcctcgtgcaccagctgatccacagcctccatcaccttgcggtccgagccgcggtccccgccgaatttggatttgaggtctttgacggtgcacggctgattctggatcgcgtgctcaattttatcgcgcattgccataatattttttctccttgctcttccatggccgcagcctccaacgtgccgcagcgctgccaatcgtgggccagctgccccaccctgcccagcggtcagactgccgccgacatcctatcataacacagaaaaacagccccgtcctttacacggggctgcacgaaccttgtcaacctgccagacggcctgcaaacagacatgccagaatggcaaccacaaagaaaacaatgcctgcaatgcgggtggtcttggccagcatctgatcagccggggtcaaacgggcattgtttgcgccgcccatactgccgttgatggcaccggaaaggccctgaccgtgggtgtgctgcatgagagtgaggaaaacgatgacgagcgaagcgatcagcaggatcacaccgccaacaatttcgataacagacatggattgaaacgctcctttattttaattcaacaaaaactacgcagaaatacaaatatatagtagcataacaagcgcaaaaaagcaagcagaaaccgtgcatttttatgccagaaggtccagcattgcgcacagccgggcaaagatggcggcgctggaatgttccgtgctcacctgcccgtcctgcagcaccacaatggtgtagcgcggctgctgcgccgggtaaaaccctgcgaaccacaagtttttgcgttccgtgccatccggtgtgaactgcccggtctgcgcggtaccggtcttgccgccagccccttcttccagcccggcagcatcctgtgcggtgccctcttccaccacctgctgcagcattttacgcaggagcgctacatttttcgcactcatcacccgccttgactgcggatgtgcaagcgtttccagcggcgtaccgtcagtttcatccaccgagccacacacaaagaaaggcgtgcggtacatcccgccggaagcaatggtgttcatcatggcggcgatctgtaccggtgatgccagcagaccgccctgcccaaagctgaaatttgccagctggccgctctgggcaagctccccggcagacggcagctttccggcatcggcgtgcagtgcacctgccaccggcacctcctgcccgaagccaagctgccgagacatctgcaaaagcgtctctgcccccagctgctgccccagccggataaaatagccgttgcagcttttttccagagccgcagtcatgtccaccgttccgtgcggaacaccgcctgcgcagcggaagatctgtccatccaccaccacagcaccggtgcattcgcactccggcaggatgccctgctccagcgctgccgcggccagcaccggcttgaacactgaacccacagcatagctttccagtgcgcggttcagaaacggactgtccggtgcatccagacttgcggcaaggtcatccgggtcatagcccggtacgctgacgctggcgcgaaccgcagcagtggccgtgtccagaaccagaatgcagccgctggtcatggtgtctgcggccaccgcttcggcggcacgctgcaccgaacgggagatcgtcagctgcacgcccaccgcactgctgtcctgccgggtgagctgcggtgtttccccggcccgcagccgtccttgtgctgtgaccgcgcacaccagcgtgtcctgctcctttgtcccggccagctgtctgtccagcgccttttccagcccggcaatgccgcggccttctgcatccagatagccgatcagatgctggcacagcggaacttctgcgcagcgccgtgccgttgcaaagcagcgtatgccgcgcccggaaaggtcgcggtccacttccagcagaaacggtgcggagcggttgcggttccggtacaaaagtgcctgcccggcactgtccgtaaatgcatacaggcgtgtgtagttgttttcgcccgggaagcagagggcaagataccgcgtttccagcccggtgagaagcaggccgctgtgatcgtaaaagctgccccgccgggcaggcagcgagagccggaccgtgctctgcgcttcggcccgggcagcataggtatggttctctgccagaaaatacaggcggcacaaaactaccgcaaaccccagcagaacagctgcatacaacgccaatacccgtttgccggacatctgctcacccctttttgatagagtgggctgcatctgtggtttctatacaaaaagagacggggtctccgaagagatcccgtctccataaggtacttattgagtaagcaattccgcttcatacgtcgaaaatcacaggttaccggcgatctgttcaaaggctctttcaaccgattcaaaactgctgtgcgtgtagacatccagcgtcacactggcattggagtgccccatcaggtattgcaggctttttacatccagcccggcctgctgaacattggtgcagaaggtgtgtcgcagcacatgaggtgtaatgcgcggaacaggtttgccgtac

SEQ ID NO: 1236 - DNA, 94288 bp, Unknown
  gut microbiota DNA sequence
gcaccccaaaacagcagcaggccgcaggaaaaactacgccgcagctgcttcggtgcagcttggcacaaatgccctttctctttgcttatataatgtattataaagctttcgccgtataatattttgcgatattacatctcggaaacaggtgtgcgttgtcaagaggtcttggctcagattttatcctgaaaattatccatgaattttggctaaaactccaaaacgcaaaatgtagtggtattttccttgacttgccactagatagtgatagaatagagctacattcagtttgttggatatcgtgtgcgcaaaacgggtatctcttattgtaagagatacccgttcacactgtgctttatttgttaaggaggagagccgatgaagatcatcaaacgcaacggtgcagaggtcccctttgatatcaccaagatcatcaccgctgttactaaggccagcgattctgtgagcggtcagagccgtctgacaaaggaccagatcacccagatcgccgctgctgttaccgaccagtgtcaggcgctgaaccgcgccgtcagcgtggaagaagtgcaggatatggtggagaaccagctcatggacatcaaggcacatgatgtggcccggcactacatcacctaccgctatgtgcagagcctgaagcgccagaccaacaccaccgatgagcgcatcctgagcctgatcgagtgccagaacgaagaggtcaagcaggagaacgccaacaagaaccccaccgtgaacagcgtacagcgcgactatatggccggtgagatctccaaagatctgaccgcccgtctgctgctggacccggagatcgtcaaggcacatcaggagggtctgatccacttccacgattccgactactttgcccagcacatgcacaactgcgatctggtgaatctggaggacatgctgcagaacggcaccgtcatttccggcacctatattgaaaagcctcacagcttctccaccgcctgcaacatcgccacccagatcattgcacaggtggcatccaaccagtacggcggtcagagcatcagcctgacccacctcgccccctttgtggatgtctcccgcaagaagatcgccgctgaggtagaagtggaaatggccggtctggacgtttctgctgagcgcaagaaggagatcgtggagcgccgcctgcgcagcgagatcaaccgcggtgtgcagaccatccagtatcaggtggtcacgctgatgaccaccaatggtcaggccccctttatcaccgtgttcatgtatctgggcgaggcgcgcaatccgcaggagaaggcagaccttgccatcatcattgaggagaccatccgccagcgctatcagggcgtgaagaacgaggccggtgtgtggatcacccccgctttccccaagctgatctatgtgctggaagaggacaacatccgccccggcactccctactattatctgaccgagctggccgccaagtgcaccgcaaaacgcatggtgcccgactatatctccgagaagaaaatgctggagctcaaggtggacaaaaacggcgaaggccactgctacacctgcatgggctgccgcagcttcctgaccccctatgtggaccccgagaccggcaagcccaaatactacggtcggttcaatcagggcgttgtcaccatcaatctggtggatgtggcactctcctccaagggcaactttgagaagttctggaagatcttcgacgagcgtctggccctgtgccaccgcgcactgcaggcacggcacaagcggctgctgggcactcccagcgatgccgctcccattctgtggcagtatggtgcactggctcgcctgaaaaagggagaaaagatcgacaagctgctgttcggcggctactccaccatcagtctgggctatgccggtctgtatgagtgcgtgaagtatatgaccggcaagagccacaccgatgccggtgcaaagccctttgctctgagcgtgatgcagcacatgaacgacaagtgcaacgcctggaaaaaggccgagaacatcgactactccctctacggcaccccgctggaatccaccacctacaagttcgccaagtgcctgcagaagcggtttggcatcgtgcccggcattaccgacaagaactatatcaccaacagctaccatgtgcatgtgtcggagcagattgatgccttcaccaagctgaagtttgaatccgacttccagcgcctgtccccgggcggtgccatcagctatgtggaagtgcccaacatgcaggacaatttggaagccgtcataagtgtgctgcagttcatctatgacaacatcatgtatgcggagttgaacaccaaatccgattactgtcaggtctgcggttatgacggcgagatcaagatcgtggaggatgacggcaagctggtgtgggagtgccccaagtgcggcaaccgcgaccagaacaagctgaacgttgcccgccgcacctgtggctatatcggcacccagttctggaatcagggccgcacgcaggagatcaaggaccgcgtgctgcatctgtaattacgattcaaatgccctccacttcgttctgggcataacagcggaaaattttttctatttcacgtttggagcggcctgcgggccgctccaaacgtattttcaccggaagggccgcaacggcaggcttccatttctttgtaaagtacaggaatcatattatgaactacgcaaccatcaaatactatgacattgccaacggcccgggggtgcgcaccagcgtgttcgtgtccggctgccgccaccactgccccggctgcttcaacgccgtggcgtgggactttgactatggccagcccttcgataaacccacccgcaacgaagtgtttgcttcctgccagccggactatatcgcgggcctatcgctgctgggcggcgaacccatggagccggaaaatcagcgggagctgctgccattcgtgcgcaacttcaaggccttgtaccccaacaaaacggtgtggtgctattccggctacacctgggaacagctgaccggcaaagagccaagccttgcccggtgtgaagccaccgacgagctgctgagcctgctggatgtgctggtggacggcgagttcgtgcaggcaaagcacgatatctccctgcggttccgcggcagcagcaaccagcgtctgctggatgtgaaaaagacccttgccgccggggagcccgtgtggtgggaggacgaaaaggtgttcgccacccataccatggaaaaataaacataacagaaaagagcgtccggttttccacttcctgaacggaacgtgtggaaaactggacgctttcttttttgttttactctctgctgcccacggcatcctcgatgatgcgcaggaatgcattgccgtagcgggcggctttcttctcgcccacaccgctgatattcagcagttcgtcggtgctcagcggctttttctccaccatctcccgcagggtggcatcgctgaacaccataaaggccgggatattctgctttccggccagccgcttgcgctgagcatagagggcattcagcagcttttcgtcaaactcgctcagctcgcctgccaccgcctttgtgcggcgcggcttctcggccaggcggcgggcattatccgccgcgcgccgccgggaatactccacctgcagctgcgcttcctgctctgcggccagacagcaggagcagttgccgcatttctttggtgcagcttcgccgaagtaatgcagcagaaatccccgcagacagtcctgcgtggtggaataaaatgtcatgtacttgagccgctcctcggccttgcgggcagcttcggctttcacatcggcgggcaggccgttgtctgcctccatctccttctcgatgaagaaccggatggtgcgcacatcggtgccggaatagagcagcgtgcaccgggcgggctgaccatcgcggcctgcacggcctgcttcctgataataactttccagatccttgggcatattgtagtggatcacgaaccgcacgttgggcttgtcgatgcccatgccgaaggcattggtggctaccatgacctgcacccggtcgtagaggaaatcgtcctgattcttccgccgggtatccgcgtccagcttggcatggtaggccgcagcccggataccgcggctctgcagcaggcgggcagtctcatccacctgctttgtggtgctgccgtagacgatgcccgcgttgtcgccctctttcagcacaagatccagcagctccttcggcttctggctgggcagggcgcgccgggtctcaaaatagaggttgggccggtcaaagctggtggtcacctcgtagggcttgtgcaaggccagctgttcccggatgtcgtcccgcacatgggcagtagccgtggccgtgaatgcgcccaccaccggacggctgggcaggctgtccacaaaggctttgatacgcaggtagctgggccggaagtcctgtccccactggctgatgcagtgggcctcgtccaccgtcaccatgctgatctcccgctcctgtgcaaaccgctggaagcccggcatctccagccgttccggtgccacatagatgatcttgtaccagccttcccgggcgcggcgcagcatcagggccttctggttatcgttcaggctgttgttcagaaacgccgccgccacaccggcctgcaccagtgcccccacctgatccttcatcaggctgaccagcggcgacaccacgatggtgatgcccggcaaaagcagcgccggcacctgatagcagatggatttgcccgcaccggtgggcatcaccgccagtacatcctgcccggcaagcaggcggctgacgatctcctcctgcccggggcggaaactgtcgtagccgaataccttttttaagatcgagtgcgggttttccatgggtccctccgtatcatagaataggtttttttctgcgcaatgtcttcaaaaccatatcagtataccacaaaagccgggcttttgcgcaggtacagagccgttttttcggcaaaaagcacgaaatgtcaaaggtaatttttttgcaaatgatagcttttcaggcgcgaaaatgatataataggagcacataactccatgtccggcgtttttttgtgcgccgactgttgatagaaaaaggagcaatcatcttatgcagcagaaactcatcacctttgccgttccgtgctacaactcggcggcatatatgcgccattgcatcgagaccctgctttctgccggagagcaggccgagatcatccttgtagacgacggttccgtgaaggacgatacccccgccatctgcgacgagtacgccgccaaatatcccaccatcgtcaaggccatccatcaggaaaacggcggccacggtgagggtgtgaatcagggcatccgcaacgccaccggtctgtactacaaggtagtggacagcgacgactggctggacaccgacgccctgaaaaaggttctggcccgcctgaccactctggtggcccgcggcaccgcgccggacatgatgatctgcaactatgtgtacgagcatgtggaggacaacaccaccctgaccgtgcgctacaccaacgtgttcccgcagaaccgcctgttcaactggacccatgtgggccacttccgcccggaccagaacatcctgatgcactcggtgatgtaccgcaccgaggtgctgcgcaagtgcggcatggtgctgcccaagcacaccttctatgtggacaacatttttgtctaccagcccctgccctatgtcaagagcatgtactacatggatctggatctgtaccgctacttcattggccgtgccgaccaaagcgtgaacgagagcatcatggtaaagcgggtggatcagcagctgcgggtcaccaggcacatgatcgactgtcaggatctggatgagctgaaggatcagaaacgtctgcacgcttacatggtgcactatctgtccgtgatgatggccgtgagcgacatcttcctgctgctggacggcagcgacgaggcaaaggccaagcgcaccgggctgtggcagtacctcaaggaccacgtaagcaccggtgtttaccgcgccgtgcgctacaatctgggcggtctgaccgacctgaagttccccggcggcgacaagctcactctgggcgtctaccgccagctgcgcaaggtcttcaagttcaactgattctttggaatttactccttccgtcacgtcttacgccgtgccagctccctcaaagagggagcctttggcagaatggaacacctctccttctcgccagagcctccctccgtgagaaagactcccccggccgggggaggtggcacgaaagtgccagaaggggaatgggtggcatcgcgcagcgatgacggaaggagtttcttttgtatgcccgacaggagctctttgccggggctccatattccggttgctttttgtctgggcggatagtatactggacgtatatgcgttttttctggctgcgctgcgttctcccttttcgttcttccctttcgctgatcgcgcggcccgctgcagtgatgatatccagaagtacctcggcatcaccctgctgccgcaggccggtgtggcactgggcatggctgccacagccgcccagctctcggacggccacatggtgcgcagcgtggtgctgttctcggtgctggtgtatgagctggcaggccccacgctgaccaagatcgcactgactgccgctggagagatccgtcccgagggacgcaccagcgcccgtgtggagaacaagccggaagaagttgcataaaaggttgttttttgtcgaaatgtcacgcaatcattgacgaaccctgttattttttgtatactgagcatagcgccactggaacaattttcctattgtgtcacagactggctatcacaggaaaaggataaaggagaatggtatactatgaaaagtaccggcatcgtccgcggcatcgacgcgctgggccgcatcgttctgcccaaggagctgcgcaccagtatgcatctggacactgacaccaaactggagatctttgtggatggcgactccatcgtgctcaaaaagcatcggcccgccggcagctgcgatttctgcggcgaggtggacgagtcttcggtgcagtttgcgggctactgcatctgcccggcctgccgccgcaagatcggtgcactgtaaaacacacaaaaaggaggctctgctatgagccagatgatcgatttcaccgtcccgtccactgtgccggggcggactttgcatgccttccgctgtgtgccggagggtgaagtaaaggcggttctgcagttgtcccacggcatggtggaatttattgaccgctacaagccgctggcggaatatctggccgggcggggcattcttgttaccggccacgaccatttgggccacggcggctccatccgcaccaaagcggactacggctactttgccgagccggacggcaaccgcgccgttctggccgacctgcacgccatgaccgtgcgcaccaaagagctgtacccgggggtaccctatttcctgctgggccacagcatgggttcgttctatgcccggcagtatttgtgcgaatacggccatgagctggacggagccatcatcatgggcaccggcttccagcccaaggcactggtgcagtttgccaagaccctctgccgggtgctggcggtctttcatggctggcagtaccgcagcaagttcgtggccaacatgtcctttatgggctacaacaaagggctggagggccgtaccacccacgactggctcaaccgcgatcaggccgaggtggacaaatatctggccgacgaacgctgcacctttacctttacgctgaacgcctactacagcatgttcagcggcatcctgcgcctgcacgacccggcgttccttgcaaagatgcccaaaggcctgccgctgctgttcttggctggcgatgccgacccggtgggcgaacagggcaagggcgtgcagcgcgccatccagagcctgaaagatgccggtgtgcagaacattgagtgcaagctgtaccccggtgcccggcatgaactgctggtggaaacgaaccatcaggaagtgtttgaagatatcggcagctggctggaaaagcacctggcctgatctgccgcatccgttttaccgtcattctgaggaatggcggtactttttgccctaatggctggcggcgcttttgccagcctgaccggcaaaaatgcccggcactgaaagttttcccgattgctgaaaaagtccccggaaccagcgttctggggactttctgcgtttattttcagttatgctgttatgctttcttgggtgcgatccagccgtcgatcacatttaccagcgccttgccgcggcggcccagaagcttgggcagcaggacacgggccatggcccacacaccggcaaagttgtacaggatgatcagcgccgtgatgatgccggtccacaggccgtagagcggcgtttcggccagcagcacaaaggcttcgatcaccagcgcggcggcgttcaccagcacgcggcccggatgtacctgcatcccgatcatgcggtgggcatcgatggcacgcagggtgaacaccagcgcaaggccaaggaaggacgcataggtagcgcccacaggcccccaccacttgatgaagaagtagttcatgatgcagttgctcacagcacccgccatcatggtgatcatgctgcgggcggactttttattcaccacatacacgctgttcatgaactggttgaagcagctgcaggtggaagccagcacaaggaacggcacaaagtgccatgcgtagtagtagttggacttcataatgtgcatcaccggacggcacagccagatgatgccggcggcacagcagaacagcacactggaataggtgcggaaaattttggtaaagaactttgcgcggccctcttcctcggtcacagcggaaagctgccatgcatcgtagaagatcaagcccagcgtagtaaggatggtgggcaggaaatagccggtggaaagcaggccgctccatgcattgccgtcgcggccgtccagaccgttacacatctcacgcacaaagaacagatcggatgcgttgatgatccagaagctgatctgtgccgggatcatgggcagcgagaagcgcagcatctgcttccacagatccttgttgatgcccttcagctccacatagttccacagcttgccggtgaacatcaggaacagcacactggaaaggtcgccgctgatgatggccagcaggtagccgttggcaccccacttgaagcccaccagatacagcacgtagaaagccatggtggccacggtgcacagcacgccgtccacggccaccagcttgttccactggcggctgcgcacgaactgggtgcacagggtgcgcaggcagctcatgagcacatagatgtaaatgagcaggccgtactgtgccatatcgggcaggaactgcgcaatgggccagcacagcaccagaatgccaaagccgcccagaatggtcagcaggccgttggtgaacacctgtttttcgctgttgcccttgtccagaccaaaacggatgatggcgttggacatgcccatggacacgaacgggatgagcaggttcgcgtactggctcaggatcttggaaaggcccagatcggagatctccgccattgcataggtcaggaacggctggacgatcagggtgagcagctttgacgaaaagctggaaattgcaaagatcaatgtgttgccggccagctttgaatatttatcgccggactttttttcgttttccaagggaacttccctcctgttttacaattcggatgcgggccggtctgtgaccgcccgcatccgctttcccactatttagtcactttaaaagcgcccgccgggctttccagtccggcagcagctttgccacctcggcccagaacgccgggctgtggttgggctgcaaaaagtggcagtactcatgcactaccacatagatctgcgccgccgggggcatatgatacagctgcagcgcaaaggtgatctgccgctttgccataaagcacacgccccaccggctggtcatgctgcgcactttgataacaggcttgtgcccgcccagcactccggcaaaggccgggtagaccttatcgctcatggccgtaaaataggccagcgctgtttccttatccggcagaggccgcgcttcctgcgctgcgcgccgcatggcacgttcccgggcctgctgcacccagtcggcgcgtgcggccacaaaacggtctgccgcttctgcacttgtccgcagggggatgctcaccgccacggtgccatcctcccgcacacggatgttcaggttcttgacccgtttgcgggtcagctcgtattggatgccgcctgccgtgcgcagctgtgtctcctgctttctgcccgccatgaggtcaggtagtcttttttgcccggtgcagcatttccagcggcagctgagccagcaccacggcagcaaagatcagcacgcagccaaagacttcccgggcagaaaggttctggtgcagcagcatccagccgcccagcgcactgaacacgctttccagacacatgatcaggctggcaatggcagggttcagatcccgctggcccagaatttgcagggtgtaggccacgccgctggacatgatgccgcagtagaggatcggcagcgcattctccgcgaactgcgctgcggaaggtgtctcgaacagcagagccgcagcggtgctttccaccgacaccaccagaaactcggcaaggctcagccgcacgccgtccacctgcggggaaaagtggtccaccgcaatgatctggaagctgaacagcaccgcacaactcagcaggagccagtcgctggactcgatgctgccaaagccgtttttcatgcacagcagatacaggcccagcacggccaccaccatgctcacccacagctgcgcactgcccttccggcccagaaacaggccgaacaccggcaccagcaccacgtacatggcggtcaggaagccagcctttgccgtggacggattgatggtaatgccgatctgctgtgcagcggaagcagcaaacagaagggtgccgcacacaaagcctgccgccagcagctttttcttctcggcagcagttttgggctttgcatcggtgccgcttttgcggcggatggcatcaaacaccatcaccgtggggatcagcaccagtacagccagccagctgcgcccggccagaaagctgtaggctcccatgccggaaccggcgctctgggccacaaaggccgtgccccaaataagggagcacagcagcaaaagcagagagttcttggtttgtgtgttcatcagccaatgccctccaccttcagcaggccgtacaggtagtacttgctggagtcataggagatagtcacacggtactgcgccgccggatccagcccggagatggtgcaacggtagtcggtgccgtcggtatggatataataggtgctgtcggtcacatattctgcgccgccgtccacctttttccacacggccaccttgaaccgctgggtgccctcagccgtgccgcagcccataatgctcagcgtgccggagggcacggtaaagtagctggtctggcggctccagatgccgttgaacactgcatacaggcagccatccgccgtggccgtggcaaacttggccgaggagtctgcaatgccctgaatgatcagcggatcactggtctggtcggcccagcgggtagtgtcctcttcctgcacttcgtccgaagtgcccgatgccttgtgcacgatgctcttcagggtgtccttgcagccgatcaggcccacagcaagcaccagtgccatcagcagcacaacgatcctttttttcatcttcatacgtttcctcacgaagcaatgcgcttctctttgtttttcatccctccgccctgttcttgtacagagcagatacagatatagtataccgcattttccggcgctgtacaagatatttgtcctgtgccgtactgcaagaaaagccccgccggggcttttctttttgtgcggtttgccgcccgattttacgtttctttgccagtgaccgcccgcagggcagcacactcggcagcggcctgctccggcgcacctgcaccaaacagactgccataccggtacagcgcccagccgcccgcgttctgactgcgcaggtcctgcacctgccgggccagcacatcgccggtgctccagccgctcacgctgtccgggttcgcgccgccgtcaccggtgcccacgcggtacgcgcccagcccgaagtacagggccacgccctccgcgcgcgggtatgccagccacgcgggcacgatgttctcaaaggcaaagcgggtgctgccgctctgcagcgtgtagccatagccccagtagatctgcgggcagagataatccaccacctgttcttccccgcccgcagccagccacgccgtcacatcgctgtactggctgttgaggtcgttgtcgggattcccctgcggactgatgccaaagcgcagcgtcgggtctgcagtcttcaccgtgtcgtgcaccttcttgaccagagcggtcacgttctgccgccgccatgctgcaaggtctgccgcaccgctggccgcaaactgcgccgcatcgatgctttcttcggtcgcagggtaaaaataatcgtcaaagtggatgccatccaccgcatagttctgcaaaagctcggccacgccctgcaccacatagtccgccgccgcaggctcggccgggttcagatacagcccgtcgcccactgcacacacccattccgggtgggtgttggcaaggttgttctctgccagattcggcggcatggctgcagaggaccgcagccggtatggattcagccacgcctccaccgaaaggcctcgcccgtgggcctcctgcaaaaggatgtccagcgggtcaaaaccggggtcctgcccctgcacgccggtgcacaggtggctccacgggaacagctggcttttgtaaagtgcatccccgaagggccgcacctgcgcaagcaccgtattcagcccaaggcccgtgcagttttccagcatttgcacgcacccggcacggaagctatccgccgaggaaaaatccattgctgcccattccagatagctcacccatacggcccgccactcgcctgcaggcagggcagggttctcaacaggctgtttttccacttttgttttgtcccgtttggaaaacttttttctgcgcagccacagtcccgcacccacacaggcagcagcaccggcccccgccagaaaggtgcgccggttcacacggcgcggttccgcttccgtttttttggacttgcgccgctgggtcacagggtctcctcctgggtcttatacagcacaagcgctgcccagccccgggcgcaggccagcagcacgaacatgatgttcgtccagaaggcaagggcgctcatgcccgcatacttcgtcagcagccagaacaaaaggcgcagcgcttccgagatgcacaccagctgcagcgggcgctggatgggcctgccgtggccgtactcgatggcaagcaggcccggccacaccagtgccgagcacaggtcgcccgcccagccgcctgcagccagcttgctgagcatcagcagcacgaacaccagcgtgtagctgcgcttatccttggcgggagcacccttctgtgcggccaaaaacagcactgcaatgccggtgatgcagaacacgatcagttccagccccgaaaaatccatgccgcccagcacggcaaagccgcccagcatggacattgccgctgccgccagcaggaaaaagtaccaggtcttgcgtgtaaatttgagcttcattgtgttcctcccgcctgcagcagtgcgcaggctcctgacaaaattttcaaagaattaaaaatattatagcacaaaagtatgcgggttgtgttacaataagaaaaactcttcaggaggattttcatgaacgccgcagtttccattgtcctgcttgccgccgtacttggcgtgatcgtttttcttttgtcccggcgcgagaatacccgccgcagccagtacggccccgccggcctttcggagttccgcaccgacctgccgctggacgagtgcttcgaccggctggacgagcacagggacgccgacgagttcgtgtacgagtgccgccgggaaaaggacggcggctttctgctgcatctcaccctgcaccagcccacccagcagccgctggacaccctgtatacccttcggctggaccccggtcgtcagaccgtagtgaccctgatcttcatccgcgaagcctttggctacaaggagccgctgttcccgcaggaaatgcttgatcgttttatgcagcagaagctggatgcccaccgcaccaaataaagttttgtgtaaatgcttttcattttgcgctgtttttggtatacttgtaagtgccgcagcgcagaatatgcgggctagtagctcagttggtcagagctggcggctcataaccgcttggtcccgggttcaagtcctggctggcccaccaaaaaagcacgagattttgctctcgtgcttttctttttgcatgaataggcgctttacttgtacaattctttgctcatctgtttccgaatctcatcacgtcgtctgtcgtagacctgcgtgtagattgcaagagtcgtgctgggctgagcgcgtccggcttctgcggccaccgttgccacaccgatattgggattagacaacagaatgctgacgaaggcgtgccggaacatatgcggatggattttttcgattaggggtacatatcacagagcacatgatacgctggccgtttttgtttgcccccattgcggcagatcctgctttctgccgcaaattgcatcagatcccgccgtttgctcaatgagtatttcccgccgtcccgttatactgggagggaaatggaattaaacgatggaggaacagatcatgaaatacggtgtcatcgatgtgggtggcggcctgcggggcatttacggcgctggcgtgctggaccgctgcctggaggaggacctccgcttcgatctctgcatcggcgtttcggcgggcagcgccaatatgacgtcctatctggcaggccagcatgggcggaacaagcccttttacgatgaatactccttccgcagggagtacatgagcgtgcacaacctcatccgcaagcactcctatctcgatctgggctatgtctacggcaccctcagcaatgcaggcggcgagaatccgctggattacgcggcgcttgcccgcagcccggcagagctctgcgtggtggccgctaatgcacagaacggcgaggcgcagtatttcaccaaggcagacctccacccggacgactaccgcgtcctcatggcgtcctgctgcatcccggtcatcgaccagccctgcgtcatcgacggcgtgccttattttgatggcggcctggccgaccccgtcccgctggaatgggcctttgcccacggctgcgaccgggtggctctcatcctgaccaagcccatcgggctggtgagtagtgatgcccgggacaagcatctggcacacctgctgcagtcgcattaccccgctgcagccgaggggctgcgccgccgggcatggcggtacaacacggctgtccagcgggcgcgggagctggagcgacagggccttgtctgcatcatcgccccggacagcaccgagggaatgtccaccctgaccaagaaccgcgcctgccttgaaaaaatgtacgccaaaggcaaacaggacgccgaagcgctggtgcggtggatgcaaaacaccaaacaagatgaatcggtgggcacctagagatgaaacccgttcacttcccttgacaatatccgccccggacattatacatatgatatgtacatacagacaaaggagtctggagcggtatcgctctgggctttttgcattttgttgttctgctgcggacagatagagggggtccgcagcagaggagtagaaaacctccttcccgatttctgcaaaagaaaaagctcaccttcaattttagaaagtgagccatgtaaatccaaaatagtaacagtaagtgtcgagtttcgtacccaaaaattcttgggtacggttctgggtacaaagagccgttttagagacaaaaagccaccaaaagttacatcaaagtacacaaaggcactttcatggaattatcagacagtcacaagatttcacaagaaaaacgggatttcaaaattagcgacgttctcataaccgcttggtcccttgttcaagtcctggctggcccataacaaaaaagagcacccatcggggtgctcttttttgttgccagtcaggacttgaacaaggcggcgacgcgaagcgacgcaagtaaagccccggtggggctttacttagcctgcgggtcccagcgcataggaatgtcaaatggtgtcggatgcagttctgagggccgccaagacttgaacccaaaacttataaagttctcattgcggaatccctgctcccatgatatgattaaaccagcttggaggaggatatcatgcagaatacaaataacgaactcgtgtccgtcattgttccggtatataaagtagaaccctatctggaccgatgtgtcgccagcattctggcccagacatatccgaaccttgaggtgatcctggtcgatgatggttctcccgataactgccctgcactctgtgatgcatgggcacagcgggacgcacgcatcagggtcatccataagaaaaacggtggcctatccgatgcccggaatgtgggactggatgcggcatccggtgcgtacatctcctttgttgacagcgatgattacattgcagaaaatttcatcgagaccctttatgatctgctccatgagtaccacactgatatttctgccgtccattggaaactcgtctatgctgacgcgccggaggtccctgctccgctttcttcccgaaacgttacgctctttcaaggtgctgatgccatccgggagctttttacggaggatacctacgcatgttatgcatggaataaattatgcaaacgggaactgtttgacaccatccggtttccggtcggtcgcgttatggaagatcttggcattgcatacaagatcctgttcgacgcagggcagatcgtgtactcggacgaacccctgtattactattatcagcgcgatggcagcactctccatacagactgtataaagttctttcaggacaggcttgcgatggtcacagagcgttatctgtttcttgaaaagcggtaccccgacatgctggaaaacgatgcctattttgtggatatggccctgaatgattacccgatcctctatcgttctgccttagaccctgaatcggatcagctcatccgccatgcctaccaaaagagccgttccattttgtccttctacaataaaatgcgctttgcctttttcagccggagcaaagccctgtactactttatcgaacgccgcaaccgcaaccttgcccgctacgataactgctgaatctcctgcattccattcctttctgcgtaattataataaaacaaagaaggagcgtttccacgcgggaacgctccttctttgtttactatcatttacaccattttgcaaactcttcgtcggtgcacttgacatagtggctgccgctcacatggtgatcggtgcccttgttgtaatcgatgccggaagtggcgtagtcgtaggtctcagccacgcggcgcttctccacaacggggttcggcagcgggatggccgacagcaggctgcgggtgtaggggtggatgggattctcgaagatctcttcggtcgtacccgtctccagcaggtggcccagatgcagcacgccgatgcggtccgagatgtacttgaccatggaaaggtcatgcgcaatgaacaggtaggccgtgccggtctcctgttggatatccttcatcaggttgaccacctgtgcctgaatggacacgtccagcgccgagatgcactcatctgcgatgatgagcttggggttcatgatgagggcgcgggcaatgcccacgcgctggcgctggccgccagagaactggtggggatagcgctcggcatgttcgggcgcaaggcccaccttggccagaattttctccaccttttcgcggcgctcttcgcgggtcttgtacatgtggtggatgtccagaccctcgccgatgatatcctccaccttcttgcgggggttcaaggacgccatggggtcctgaaagatcatctgcatctgggtgcgcagcgtatcgttctgcacgcggctcagcctgccgctgatatcatgcccatcaaaggtgatcttgccggcagtggggtcatacaggcggatgacgctgcggccgatggtggacttgccggaaccggactcgcccaccagaccataggtctcgccggggtagatctcgaagctcacattgtccacagccttgacggtatagctcttgctcacgcggaaatactgcttcaggccctcgaccttcagcagcggagcagcattctgtcctgccatttattccgcctccttgatcttttctgcctcggcacgcatgcgggcaatgcgctgagcaagctcaggcggcatgtccaccttgggtgcgcgggggtccagcagccatgtagctgcatagtgggtgtcgctgatcttgaacatgggcgggtccacttcgtcgtcgatgttcagggcaaaatggttgcgcggcgcaaaggcatcgccctgcttttcatgcagcaggttcggcggcgaacccggaatggtgtacagacggtcgtctgcggtgtccagatcgggcatggcggaaagcaggccccatgtgtaggggtggcgcggctcgtagaagatctcatcgatggtgccggtctctacgatcttgcccgcgtacatcacgtccacataatcggccacctttgccacaacgcccagatcatgggtgatgtaaatgaccgagatgccgcgctcacgctggatgctgcggatcagctccagaattttggcctgaatggtcacatccagtgccgtggtgggctcgtcacagatcagcaggtcggggtcgcaggccagtgcaatggcaatgaccacgcgctggcgcataccgccagacagctggtgcgggtagctcttcatgcgcttttcggcatcggtgatgcccacctcttccagcagctgcacagcctttttgtaggcggcatccttgggcatcttgtagtgccacagcatgccctccatgatctgcttgccgatgggcatggtggggtcaaggctggtcatggggtcctggaacaccatggcgatgcgcttgccgttgatgtggcggcggatccactttttgtccttctgcagcagatccaccgtctcggggctgccgtcggcgtgatggtagctgaactggatggagccgctgttcacaatggcgttctgtgccagaatgcccatggcagccttcatggtaacggacttgccggaaccggattcgcccaccagcgccaccgtttcgcccttgtacaggtcgatgttcacgccgcggatggcgtgcaccgggcctgcggtggtcttaaaggtgatatcaaggtctcgcaccgacaagacctgttcttttttgttttcaggcatggggtgttcctccttacatactcttcatcttggggtccagcgcctcgcgcaggccgtcggccacgaggttgaagctcatcatcagcaggctcatgaccaccatcggcgggatgatctgataaggatgggtggtgaagctgttgtacagctcgctgatcagagaacccagcgagcactgcggcaccgggatgcccagacccacaaaggacaggaatgcctcggtgaaaattgcggtggggatgctgaacatgacctgcgtgatgatgggtccgatgatgttgggcagcacttctttgaagatgatgaagaagctgcctgcgcccagcgtgcgggaagccagcacgaactcctgatccttcagcttgagcatctcagcgcgggcaatgcggctcatgcccacccactcggtgagcatcagggcaaagataatggtgatcatgccgggcttgagcaccagcagaagcagcgtgacgatcaccagacgggggatgccgttggcaacttccagaaaacgctgcatcatcatatccaccttgccgccaaagtagccggagatcaggccgtagctcatgccgatgaccatatcgatgatggcggcggcaaccgcgatgatcagggacacgcgggcaccctcccaggtgcgggtccagatatcgcggccataggtgtcgctgccgaaccagtagtagacatcctccttgcccttttccacataggcattcactgtcttggaaccggtggtggtgctcattttctcgtcaccgttgaagatgccgaagttctccagcacctgcacgcggggcgcaaagtttttctggctcagctcctgaccggagtaggtatactcgttcataccggggccaaatgccgccagcagcacgataaagacaacgaggatcaggccgagcaccgcgctctttttgcggaagaagcgcacccgcacatccttccagaagctctgtgcggcaaagttcgagtccattgcgatctctgcgtcgttatgcttgagcacaaagtccttctcgttgaaggtgtgctcggaatacatggtatccactgcgctgacgatggcatcagccgtggcttcgccgcccaggtgaatcgctttttctgccatatcagtcgtccccctttgccaagcggatgcgcgggtcaatgatgccgtacagcaggtcaacgaccagcatgatgccaatgtacatggcgctgtagatgaagctcaggctgatgaccacattgtagtcgttggactggatggccgtcaccagcaggctgcccacgccgggaatggcgaagatcttctccaccaccagcgagccggtcatcaggtccacgatcagcggggccagcacggtgataatggggatcagcgcgttgcgcagcgcgtggcggaagatcagcgccgggccggaaatgcccttgctctcggccagcagcatataatcggagtccagaacctcgatcatttcactgcgggtaaagcgggcaatggaagccatggtgaacatggacagcgagatgctgggcagcacactggagccgaacacgtcctttgcggagaacagcatggggaaccacttgagcttgaagccaaaggtatagctcagggccagtgcgatcacgtaagacggcaccgacacgccgatgaccgagatgatggtggccagagtgtcgaagatggtgtcccgcttgagggctgcaatgatgccgagcacaaggcccacgatggcacccagtgtaacagccatgccgcccacacggatggaaatgggcagacgggactggatcagctgggagatgggcgtgttcttggagatattgtagctgacaccgaagtcaccgcgcagcatgttggtcacatagcggaagaactgtacatagatgggctgatccagaccgtactttgcgtacagggatgcgcgcatttccggtgtcagcttttcatcgttgaagggcgaaccgggcatcagctgcatgaggatgaacaacaccagcaggatggccagcagcgtaaacaacgaagtgatgatacgcttgagcgtgtattttttcacgttgggtagacccccttaaagtttcttcttctccctgctcaagacagggcggctttttctgccgcggtcatccgtgcgccggacgcggacagtgcaaaagccaaaaagtcgcacagcggcaatcacgctgccactgtgcggcatttcagttctcgatcaggatcagacgctcttctttgcgtccttgaagacgcggttcagagcaaccgggtggaagtccacgccggtcacggcagaagagatcatctcggcgttgcactgaccatacagcgggaagatggcggcctgctccagcacgatggactcagcgtcatacatggcttcccagcgaccctcgggatcggtgcacagatcgccggtggtgcactctgcgatgacggcatcgtagtcagcatcgctccacagaccgtagttgttggagttgccggtgacccacatgcccagataggtcatgggatcggcgtagtcggggccccagcgggtcaggccgatctcaaagttgccgtcctgcatatcctgcacgcgctgcttcttgggctccaccttcagctccagagtaaagccgggcagagtggtctgcagctgctcctgaacgacctgagcaaccttctggggagcatcgtcggcatcgacgaccatggtgaaggagaaggagtccttgcccagctcagccttggcctgctcgtagtactctgcagccttgtcgggatcgtatgcgcagaactctgcaaacttggtctggtcggcgctgaaatcgctgccatccgggccggtggcgaactgtgcgggcactgcggtgtaggcgggagaagagccgtccttcagcacgtcattggtgatggaatcacgatccagtgcaaaggtgatggcacggcgcaggttcaggtttgccagctccggcacagcgtccatgttggggctgatgtaccacaggtagccggcacccacgctggtgaactcggggtcgtccttgacctgctccacctgctcgccgttcagcagggtgatatccagatcgccgttctgatagctcatcagagcctgctggctgtccttgatgacctgatagttcaggccgtccagagcaatgcggtcggcatcgtagtaatcggcgttcttcaccagctcaaaagcggtggcggccggctcatagctggtcagcacgaatgcaccgttggacagcacggtgtctgcgctggtgccgtaggtatcgccgcagctctcaaagaacttctggttcatggggtagaaggtggggaagtacatcaggctcaggaagtagctgaccggaacgttcagctccaccttcagggtcttgtcgtccactgcggtgatgcccagatcggtgacgggcttgttgcctgcaatgatgtcggcggcgttgaccacctgaccgatatcgctcagcatgtaggcgtactcggatgcgtttgcggggtcaacagcacgctgccagccaaacacgaagtctgctgcggtaacggcatcgccgttggaccactttgcatccttcaggtggaaggtgtaggtcttgccgtcctcgctcagctcatagctctctgccagagcctccacggctgcaccgttcgcatccatctgcatcaggccgtcggtgtagttggcgatgacctcaaaggaggtgccgtcggtagccagctgggggtccagagactggacttcggtctccagcatgacgttcagcacaccgccctcagcagaggcggctgcaccagaagcagcggtggagccggaagcagcggtgctggaagagccgccgcaggcagtcagagccagtgcagcagccgatacgcctgcagcagccaggaagctgcggcgagaaatacgacgatcgaatttcatattttttccctctctcttacctcaatgctttattgaggtaaagcattgaatggtgaaaaatgcacaaaggttttttgctcctcctctggagcactgcacacctttgtgcgatatccgcattatacgctgttccgcctgaaaaggaaaggcttccggctgtttttctgtgctttgaccaatggtcagcaaaaattttgtttttgtttttgtgcagttttgaagatatactgtagttgctcaaaatacagtttcacgaaaacatgagttttttgtatttttcaggggaacagatgaagagatttcacctgcgtattttcgttttttgtgcataagtcgtactttcagcctgtttttgtgcatataccagacacaaaaaatccctgctgaaaacgcaccgttctcagcagggaaacaccgttttttcggtttttaggcaaacatagccactacgtaagtctcgccgccgtattcaatgaacaccgcgcccatctgtgtgcagcctgccgcatagctgcgcagtgcgctgcccgcctcgctcagcggcggagcatataagtagccggtaaagccccattcgttgttcattgcaaggccgatcaccacgcctctgggcaggaacagaaagctggtggaatgatcgataaaatcgtacacattcgtatccagcatggcaccggagccggtggtcatgggcaccttgcgtgtcagcaggccggactgggtggtcagctgggtggagtcctccaccagccagtctgccaaacggctggctgcatcttccagatcggtattataggtcaggctggggtctacctctttcatcagggccttggcctgttctgtatccttctgcaccgtgccgcccatcagtgcactgcatccggccagcaccgccagtgccagtgcacccgccagcaggcaagccagccattttcttgcatgtttcatatagtggttctcccctttcggtctgtttttctccatgataccttttttgccgccggattacaagcagaaaaaagctgctgtgcatctgcacggcagctttttggacaaaactttattttgcgtactccacagcgcggctctcgcggatcacattgaccttgatctggccggggtaatccagcgtgtcctcgatcttcttggcaatagagcgtgccagcaggatcacctgatcatcgctgatgacatcgggcttgaccatgatgcgcacttcgcggcctgcctgcacggcaaaggcctgctccacgccctcgaagctggaagagatctcctccagattttccagacgcttgacgtagctttccacattctcgcggcgggcacccgggcgtgcagcgctgatggcgtcggcagcctgaatgatgaaggccagcggggtcttaggctccacgtcgccgtggtgagcctcgatggcatggatgatctgggtattttccttatacttgcggcagatgtccacaccgatctgcacatggctgccctcgatctcatgatccagtgccttgccgatatcatgcagcagaccggcacggcgtgccatggtcacattcacacccatctcgcctgccagcagaccggccacccatgccacctccatgctgtgggtcagggcgttctggccaaagctggtgcggtacttcagtcggccgatcagcttgatcaggtccgggtgcaggccatggatgcccagctccatcacggcgcgctcgccctcgcgcttcatctgcagctccagctcgtggcggcacttttccaccgtctcctcgatgcgggcggggtggatgcggccatcgccgatcaggcgttccagcgtcatgcgggccacctcgcggcgggtctggtcaaaggaggacagggtgatggcctccggggtatcgtcgatgatcaggtccacgccggtcgcggtctccagagcgcggatgttgcggccctcgcggccgatgatgcggcccttcatttcgtcgctgggcagcggcaccacgctgacggtggtctcgctgcagtggtcggcagcgcagcggctgacggcctgaccgatcaggttgcgtgcgatgttgtcgcagttttccttcaggtcggtctcgtaggcggcaacgcgcacggccttttcgtgggtcagctcctcgtccaccttgtgcagcagcacctcgcgggcgtcctcctgactcagaccggccagcgtttccagacgctccatctccttggcgcgcagggcctcgatctcggccagacgctcctcggcctcagcggcgcgctttttcagctcctcttccttcttttccagtacctcggtcttgcggtcgagggcggtttccttctggtcgatgcggttctcctgacggctgatctccgcacggcgctgcttgatctccttatcggcttctgccttctgggcatccacctcggccttcagcttgaaggcctcgtcctttgcttccagaaccgcttccttgcgtttctgttctgcggtcttgatcgcttcgttcaccagacgggtggcctcggcttctgcgctgccgatctgggcttcggcggtctttttacggttgttgtaaccaataaaatagcctgcaccgatgcccgcagcaagcgcgacgatcaagatcacgatccagatgatcgtggacatcgcatttcactctcctttgttaaaattcaaaattctgaatcataagcaggagacgctgtagggcaggtgtaggctgcaaacattttttataagtgagctttcaatgcaaaaagtggcaacaagaccacacgcacggcaaatgccgcacgaacaggctgcaagcttttctatctacagttctatcttatataaaaacaggcaggctctgcctgtaagggacacgggtcacgggaacgacctgcacacagcgtcttttattccatactactaattatagtacgaaacaattgcccgcttgtcaagaggaaaaccctgccccgcagaacattttgtgcagaaaacagggacagtatccacaccggatgccgtccccgttcccgtttattccagatacatcctgcgcagccgcatcaggcgcgcaggggtcaggccgtattcggcttccagatagttctcggcgctgccgtattttgcgcggatggtgcgcagcacaaagggtgcggttgccgggtccacgcccgccttgcggtaatagcgcatccggcaggccgggtttgccgcgatctcttcggcgtgctccgccagcactgcgtcgatctcagccttgcggcagaggttcgtgcgctcatagtccgcacagatcgtctcatccgaagcgcccagtgccagcagaatgagcatggccgccacgccggtgcggtccttgccggccgagcagtggaacaggatgggggtctcgcctgcttccagcgcacggaacagctccttgaacgccttgttgccaaacagcatccgctcgtacatagcctgcacgaaggtgctgccgtcggcgctttcttcatggtccttcatcagggcggcgatatcatccggcgcaaaggagatctcatggccgtcctcggcgcacaagccgcagatctgcaccagacgtgcaccgtccggtacgtagtccggttctttctgcacttccccgctgctgcgcagatcaaggatcaggcgcaggcccagcgcgtccagcttcgcgcggtcggcctcaccggtgagcttgcaggtagggatgccgcgccagatctggccccacttgatatgcttgccctcgtcggcttcgtaaccgcccagctcccggaagttggtgccgccggcaaaatccagctgggtgccgggcaccgggtgggccggtgcagcctttgccgcagcactggacagcaccgggaaattgtagaacggctttgcgggccgtccgcggcggggcggcaggctggccgaaccgcccagcacctccatcaggtagctgcgcagcaggtcgatgtaggcagaggaatgatcccgccgctgcaccagtgagacgcacagcgggggcagatcttccagcagcacatcccgcacacggtccagttcccgtctggcccccggttcatagcgggtcagacaggtgcaaagctgctcctgcacaagataataggcctgataaaagctggggccgatctccgcattcggcgcaaagcccaaccgggcgcaggccgaccacagcgggctgaacagatcctgccgcaagctgggcagcagcacccgctgaccgcgcagctctgccagcgggatgctctccttatcccagaacgcgtgcccccgaggcaccagcaggcaggcagggtctgcccgcagggtggtgcgggccagtaccggcgcagcgcagcccagatcgatgaccagacccgcgtccagctccccctgctccacatcgtccgccaccgcatcgttgtccatcatgcggaagcgcatctccacatggggatactgctggcggaacttgtctagctgggtctccaatccgggcaggtagtccggcaccagcgacacgctgatgccgatgcgcaccggctgcgccgactggatctcggcccgcagggatgcctgcatctgctggaactgctccactaccggcgcggcatggcgctgcaggctcatgccgcggtcggtaagggtgagcttgtggtgggcgctgaggaacagcggcccgcacagctcggcttccagtgcagagatgctctgccgcagtgcctgccgtgacaaaaacagccgctgtgccgcgcggctgtaattcatttcatcgcacaataccagaaagtagtgcagctggcggatatccatggtttcctccctgagaaaagtatcgtataaagaataccgcctttttacgcgattgtaaagccgttggcagcaaaaaactgccgcacggcattgcaccgtgcggcagtcagagcgtggaacgatcagatcaggctcagagcttcctcgtcgcccaccagcgtgaagtccggatgcatctgcaggatgcttgcgggcacctccggagtgacgggaccaaagaatgccttcttgatgatctcggccttgcctgcgccgtttgccaccatgagcaccttgcgtgcctgcatgatggtcttgatgcccatggtataagcctgcttgggcaccagatccacattgccgtcaaagaagcgcttgtttgcctcaatggtctcgggggtcaggttcacgcagtgggtctccagctcaaaggcttcgcccggctcattgaagccgatgtggccgtcgtggccgatgcccagcagctgcaggtcgatgccgcccacagcgtggatgatctggttgtactttgcgcaggcatcctctgcatcggggttggtgccgtccggcaggttgatctttgcagggtcgatgttcaccttgtcgaacaggttgcggtgcatgaagctccagtagctttccgggtgctccttgggcaggccgcggtactcgtccagattgacggtggtcacctcagaaaaatcgatgtcgcccttgttgtaccagtccaccagctgtgcatacgcgcccacgggggtgccgccggtcgccagacccagcacgcagttgggcttcataatgacctgtgccgaaatgatattggctgccttgcgggacatatccgcataatcttttgcacgaatgatcttcattacaaacgacctcacttatcatctttttttgccgctctgcacggactgcgcagagcacttctacgtttagtttatcacatttcgcagacaagcgccagtcatcccggccatcttttcggtgtgtttgcacaaaaagatgcaaagccccgccgtttgggccggcatttccggtcacgaacgcgcaaaaacgccgccgggcgttttcacaccggcggcgctgcatgttgaaagatcagttcccgctgcacaggccgcaggcggcacaggcggcgggggtggcggcacagccgccaagggcggtctcgcgcagctcggcgggcaggcgcttgcccacagcgtacatagcgtccagcatctggtcgaaggggatcagctgacggatgccgctcagggacagttctgctgcaatgagggcgttggccacaccggcagcgttgcggttctggcaggggtactccaccagcccgcctacggggtcgcacacaaggcccagcatgttcatcagcacggtggaagctgcatccagacactgctgcgggttgccgcccatcagctccacggcggcagaagcagccatggcagacgcaatgcccacctcggcctgacagccgcccacggcaccggccacggtggcgttgcgcatggcaagatagcccacggcaccggcgttgaacagggcatccacgatgcgctggtcggagatacggtagcactcctgcagagccagcatcatgcccggcaccacgcctgcagagcctgcggtgggtgcagccacgatcaggcccatggaagcgttcacttccagcacggccatagcgtaggtcatggccttctgcagcacatcgccgcagatgtttttcttcttattataatgtgtttccagctttttggcctcgccgccgatcaggccgcccatggatttgatgggctttttcagcggctgggtggcagaagcgtgcatgatcttccatgcctttgccatgcggtgatccacagcatcccggggcacttcgcccagaatgcactcccgctggcgcatcacttccgaaatgggcagttggttttcctcgcacaggtccagcagctccttggcggacttgaaatccatgttcatcgctcgtccctccttacggctgcacgaccattacatcgttgatgttcgggtttgccagcagcagctgatccacaccctcgggcaggcgctcgtccgactccacgatggtataagccgtatgtccctttccctcgcggaacaggcgcatgaacgcgatgttcacgccgcggtcgctgaggatctttgagatatgcgccaccacgccgggcttgtccttctgcaccacgatgagggcattgtactcgccggtaaagtccacctccacgccgttgatccgcacgatgcgcaccttgccgccgcccagcgattcaccgcgcacggtcatcacctgaccggccgcattctccatgcggatatccaccgtgttggggtggatgtcggtctccacctcattgggggtgaagctgtagccaaggccgcggtcggtggcaatggcaaaggaatcccggatgcgggtatcatcggccgaaaagcccatgatgccgcccaacagggcgcggtcggtaccgtggccgtggtaggtcttggcaaaggagccgtagagggtaaagtccgcccgcttcagcggcggggcgatcatcttctgtgccagaaaggcgatgatctccgcgcctgcggtgtgggagctggaggggccgatcatgttcgggcccagaacatcaaaaacactgataaatgccatggggtgtcactcctgtcaggtcaagaaccgcgccgcgcatcagacgcttgcgctgctcttgttgatgaacttctggtagatggtctccacgatcacgccgatggcgttgtcgccggagacgttgcaggcagtgccgaaggaatcctgagtgatgtacagagccaccatgatggcgcagatggggccattggggtcaccggcctcagcgccaaagatcatgtacaggaagggcagagcggtcatgatggagccgccgggagcaccgggagaagccaccatggcaacgcccagcgtcatgatgaagggcaccacggtagcaaggctgatgggcagctggttcatcaggcagacggcagttgcgcaggcggtaatggtgatcatagagcctgccatgtggatgttggcgcacagaggcaccacgaagttgcggatctgctcgctcacgccgtcagccgcagcgcactgcaggttgaccgggatggtggctgcagaggactgagtgcccagagcggtggtgtagccggggatctggttgcggatcatcttgaaggggctcttgtggctcacagcgcctgcaatgcagaactgcaggaagatgcagaccagatgcatgatgatgaccaccaggaacaccttccacaggatgcccagaatggcgtaggtcttgccggacttggtcatgtcgatgaaggtaccgcagacgtacaggggcagcagcgggatgatgacgctgtgcagcacctgatcgatgatgccagagaagtccttcatgccattataaagtgtatcaccgatggtcttgccgcgcaaggtggacaggcacaggcccagcacgaaggccagcaccacggcagacagggtgtccagcagcggagggatggagatggagatgtagctggccagagagttgtcagccgtggcggcgatctgttccagagcgccttcgctcatgaagctggggaacaggcttgcagacaccagataggatgccgagcctgcgatcagggtggagccgtaggccagagccaccgtgatgagcagcagcttgcctgcgccgctcttcaggtcggcaatgcccatggtgacgtaggccacgatcatcagcgggatgatgaacttcaggaacgagctgaagatgctggatgccgtgacgacgacccggcagaaccacaccgggaagaactggccgatgatgatgcccagcacgatggcgatgagcagcttcggcagcagtccgagcttgaattttttcttttccataagaataaaatcctccttttcctattctgacctttgtgcagcacctgacagcgctctctccgccgcagcccgcacggccagcctttcacgaaacgtcaaattttcacttgacgtgttgacacatttagtttaacatagacatatgcatgattcaaattcataaaaataaagttatagtttaaaaatcttaatagcagaggagctttgccatggaagtgcgccagctgaacaccctgatccgtgccgcccagttccagagcttttccaaggcagcggaaagtctgggctattcccagtctgccgttaccgtgcagatcaaagcgctggaagaagagctgggtgtgcgcctgttcgaccgcatgggcaagcgggtgatcctgaccgcacagggtcagtgctttctggaatacgccaacagcattctggataccatccacaacgcccgccgcgccctgagcgaggatgccgagctggagggctgcctgcacatcggcacgctggaatccctctgctttttccgtctgcccggcctgatgcatcagttccgggtggaacaccccaaagtcagccttcgggtcactaccggctccccggaagagctgatcgaaaagatggagcgcggcgaggtggacctcatctgcattctggacgagccccgctactccaacagctggcacaaatgcaacgagatcccggaggaggtggtgttcgtggcttccccggacatcgacctcggccaccccggcccgtaccgggtagcagagcttctggacaagcccttcttcctcaccgaacgcaacgccaactaccgccgcacctttgaccggtttctggcttcccgccagatcgagctgacccccagcctagagatcagcgatacctcctttatcatcaagatgctggagcgctcctccggcatttccctgctgccgcgcttcgctgtggccgagcctgcgtccagaggagatctgcgcattctggaggtgtcagacttccggctgaccatgtaccgccagatgttctaccacaaggataaatgctgcacccgggaaatggacgcctttatccagctggcctccgggccggaccttccgcttttataatacagaaagcagcagacccccggacggtaaaccgcccgggggtctgctgcactgaggagttttcaggaatttgcaaagcattgcgcagactgtgtgcaggcacagccccgcagatgaggatgatcaggcaaagaaggagatgatgagtgctaccaggaagcccacaccgccaaccagagtttccatgatggtccaggtcttgagggtggtcttttcatccatgcccaccaggctcttcaccagccagaagccggagtcgttaaagtgggagcacacggtggagccgccggcgatggcagcggtgacgcaggccagatacagcgggctcagttcgctgatgccgggcatggcggagatgatgcctgctgccatggtcatagccacggtagaggaaccaacggagatgcgcaccagagcagccacgatgaaggccaccagaaccagcggcaggctggcgtttgccacggcgttgccgatgacatcgcccagaccggagttctgcagcatgtagcgcagcacgccgccgcaggcagtgaccagcaggatcatgccggtgggctcaagggacttggtcatgatcttttccagctgggcattgttatagccgtgacgggtgcccagcagatacatagcagcgatggtagccagcagcagagccatgaagggctcaccgaggaaggccagaacgggctggatgccagccagagcgggtaccacttttgccacagagtttgcaatgatgaggaccagcgggatcaggatgatgcccacgatggtgccgaacttgggcagcttgttctcgtcgatgtctgcctgctgtgcaacgtgctcgggcacctcgatcatatacttcttgccgcagatggagccccagatgggaccggcagcgatcatggcgaagatgccgcagaagatgccgatgaggatgacccagcccagatcaacgcccagcatgctggccaccagaacggggcccggcgtgggagggatgaaggcgtggccgacagccagaccggccagcagagggatgacatagtacaggaccgagcgcttggtgcgctttgccagagagaaggccagcgggatcaggatgatcagaccggcatcaaagaacaccggcatggccaccaccagacctgtgatacccagcgcccatgcggctttttcgtcgccgaacctgcgcaccatggtcacggccagcgtctgtgcgccgccggattcttccagaatggcaccgaacatggagccaaggcccaccagaagagcgatgccctttaaggtgttgccgataccttcgttgaccgagccgatgatgtcagacaggggcataccggccatcaggccgatgcccaccgcaccgatcaggatggagatcatggcgtggactttgaacttgatgataaggatgagcaaaaggatcaggcccgccaccgcggcgaacacgagccgtgcggcgtccggggttgcaacagctgtcataaacgtttcctccattttttgatgttttgtgtgctttgggtcttatttcagcgccgtccccgcagacggacaccggatttcgatggtttttatagacgaagcaatatccgcttttttgtttttggcgtaactttatccagaccgttcagcaaaacaacgctgaacagttgatttttgtttttggtttttatcgtaaacgaagcgtttttactccatatatgcacccttcatggggctgacggcgtgctgagagtagagcttcagcaggcccttggtgtacttgggagccttgggcttccagttggcacggcgctgggcaaggatggcctccatctcttcgggggtcttttcctcaccgttcacgcccacgatggcaagctggcggttcggcacatcgatgcggatgagatcgccctcttccaccagagcgatggggccgcccacagcggcctccgggctgacatggccgatgaccgggccgcggcttgcgccggagaagcggccgtcggtgatgagcgccacgctggaagccagcttcgggtcggcgcagatggcctcgccggtgtagaacatctcgggcatgccgctgccgcgggggccttcgtaacggatgaagatagcatctccgggctggacctgcttgttcagaacggcgctgatgcactcttcctcgctgtcaaagggccttgcgcgcagggtggcgtggaacatgttcttggggcaggcggtgtgcttgatgacactgccttccggggctagattgcccttcaggatagcgatgctgccgtcggtgcccttggcgttgtcaaagctgtggatgatatcctcgcgggtgactttgatgcccagacccttggtcttttcctgcaggatctcgtcgcagtgctcgtagaagccgttcttcttcaggtcttccaggttttcgcccagcgtcttgccggtgacggtcatcacgtccagatgcagcatggacttgatctcttccatcacgcggggcacgccgcctgcatagtagaagtactgtgcgggccagtcgccggaaggacggatgttcagcagatagtgtgcgccgcggtgcatccggtcaaaggtgtcggcatcgatctcaaagccgaactcgtgggcaatggcgggcaggtgcatggtggcattggtggagccggagatggcggcgtgcaccatgatggcgttttcaaagctcttcatggtgacgatgtccttggccttgatgccctcggccaccagcttcatcacctgaacgccggcatcataggcggcctgcttcagctccggggcggtggcgggcatcagggcggtgcccggcagcatcaggcccaatgcctcggccatgatctgcatggtggaagcggtgcccatgaaggagcatgcgccgcagctggggcaggcattgtgcttgtagtagtccagctgctcgttggggatcacgcccgtcttttcccatgcgtcgaacttgccgatctgttccagcgtcagcaggtcgttgatggcgcaggcggggtcgttgaccacgtacttcttgggcagggtgtgggcttccatcacgccgccggtgaccacgatggcgctcatatccttcaggcggccaatgctcatcagcatggcgggcatggacttgtcgcagctggcgatgaacacgccgccgtcgtacacggtggcgttggcctgagcttctaccagattcacgatggcatcacggtggggcagcgagtagttgatgccgtcgtggccctgtgcgatgccgtcgcacatatcggttgcaaaatagcgtgcagccttgccgccgtgggtgttgactgcctgtacagcctccttcacgaactgatccagatgggcgctgccggggtggctgtcgccaaaggtgctctccaccatgatctggggctttgcaaggtcgtccaccttccagcccatgccgatcttcagcggatcgttttccggtgccagtttacgcactgcctgagaacgcagttccatgatcatacctccaaaatgctctttttctgctttgcaaatcatccttttgactgtcggacatcttacatgttcattttaatcgaatcccgcctcgtttgcaagttgtcgcagtcagaacccactttataacaataaccagcccagtttttcgtgcatattgctctgaaatcttggatacatcatataatctaacccatttttcgacttttctgtgtcattcgtcttaaaaagtcatcagacaacttcaggcataaaaagtccccgcacagaccttgcactgtgcggggacgtaaaatgcggcggcgtcaggtttcccattcgccgtcgtaaagctttcggatgcagttgcggttgaagttcaggtgcatcaccatggcagaccgggcgccaatggggtcatgccgggcaatggcttcggtgatcatgcggtgggtcaggatggtctcctccgtcagctttttgtgggtgacgttcacgaacatcatgaccgccgtatcaataatggggatcagctgctccaccaccatgttcttgctgctctcggcgatgcaggtatggaatgcgatgtcgtcctcaatgtacagatcaccgctgtggatcttgctctccacccggtcgcacaggcgctggatgcgctcaatgtcctcgtcggaagcgttcagcgctgccatctcggccatgcccggttccagcagcaggcgcacgttcaccagatccagtgccagcgcgttcttgtcctgcacgctgcgcaggttcagcgggtccgaaaggcccttggcagtcgtgaccacataggtgccggagccccgccgcacctccacgatgcccttgctggaaagcagcttcacggcttcgcgcaccgtgctgcggcccacgccgaatttttcgcccagctcaaattcattgggcagcttggctcccggctccagcggggtatccagaatatagtggtaaatttcgtcctccacctgttcggcaaggagtttgtttttcagatgggaaaattcgctcatggttgttccctcccctgttttttaagttattataaggcagggcagcagacaaaagcaagggctgtcctcattcacagacagcccttgcttttgggttttttattcgtttgcggccttttccagctccgcttcctctgcggcggcttcggcctcctcctgcttctggtactccaggaaagccgaccacatgggttcgatgtccttgcccttcacccggcggtcgaagtagttgcgggtgatgtccaccacagtgccggacagcaccagcacgccgatcaggttcgggatcatcatcagaccgttgaaagtgtcggaaagatcccacgcaaggcccagcttcatggtggcacccaccacggtcatgcacacaaagaccaccttgtagatgcggctgccggtggtgccgaagagatactccacggccttggtgccgtagtggctccagccaagcgtagtggagtaggcaaacagcagaatggaaacagcaatgaacttggggccaaagctgccaaatgcggcggtgaaggcctgacccaccaatgcgttgtcctgcacaccggccagtacagcgccgctctgcaggtccaccacgccggtggtcaggatgaccagagcagtgagcgtgcagaccacgatggtatcggcaaacacctcaaacacgccccacatgccctgatgcaccggctccttgacgttggaagcggagttgaccatgacggcagagccgagaccggcttcgttggagaaggcaccgcgcttgaagccccaggtgatggtctggctgatgccgtagcccagcgcaccgccgcctgccgcgttcaggttgaacgcacccttgaaaatagccgcaaatgccgctgggatgttgcccgcgtgcagcactacgatgatgagcgcgcctgcaatgtagaacagggccatgagcggcaccagcttttcggtaacagcggcaacgcgtttcaaaccgccaatgacgataagggccgtgaccaccatcaggcacaggccggtgacgagggtcggtacgccaaaagcagcgttcatgttgcccgcgatggaattgatctggctcatgttgccaatgccgaaggaagccagaatgcagaagcaggcaaacagcactgccagcaccttgcccagctgtttgcagcccttctttgcgccaagaccatcggtgaggtagtacatggcaccgcccgaccactcgcctttttcgtttttgcggcggtagtacacgcccagcacattctccgaaaagctggtcatcatgcccagcagggccatgacccacatccagaagatggcacccggcccaccggaaacgatggccgttgccacacccacgatgttgccggtgccgatggtgcccgccagcgccgtgcacatgctctggaactggctgatggccatatcctccttgctggtgtgcgcggtgatgtccttgttggtgaagatcgcgccgatggtgtgccggagccagtagcccattttgcggaactggaaaaagcccgtgcgggcgctcatccagaagccggtgcagaacagcagtgccagaccaaacggcccccacaccacgccattgatggcattgttcacctgcgtgatcatctcgaccattctctctttccccctatacacaaaacaaaagcggacagaacccgccaaaggctctgcccgcaaaattcggagcgctctcattttccgcagccggggtgcgccgcatttcccggctgcgccccattgcgcaaagacgatggctctgtccttttgcctgagagatacagccgctttccctgcggccttacaccttcggcacccactttacaagcgggcttctccagagtgcacggtctttccccgccgtgcacgtctttttcagttcttctggcgcacagttgtgcgcgatagaaagactataccatattctgtccttatgcgcaagacattttgtatatcatacgctgctttttcatctgttatgccgacagatgaattttgttttggtattacttttgttctcccgcatcatagcgctgccataaatttattctacctttcttttggctccgcgccttcaaacccccgggctttgccatccgggcttgcatcgccgttttctttcgcggtctcgtaagaatctgtgccgtaataggcgctggcggggccgatctccagccagaagttctcccgttctttctctgtggtcggtgctgtctcttttttgtttttcatctgcaaacgcctcctttgctgcataaagtcttgcctgcggaccaaagctttatgcaaaagaaaggcggtgtatcccatgcgcagtggaggttggaagcccttttgggcagcactgtttgcttcgctgctggtgctggtgccgctggtgggcggcacagtgctgctgtcccgtcagcagctgcgcacccagctgcggcaggctgcccgcagcgagagtggtgtccccatccagctgcccaagaccaccgaccagctcactgtgctgctgtgcgtctccggcgaacagcccggctttgtgctggcctacctgaacgccagccagaactgcgtgcatctgctcagcgtgcctgccgtgctcaccgtgccttttgcagaagaagaaacatcccttgcccgctgctatgccgccgctggcccggcccgctgccgcgaagcgctggcacaggtgctggccctgccggagggcacaaggtatctggccttttctcccgatgtgctggagcgcattgccagccggtacgggccggtgcgggtgggctttaccggcgcactgaccgaggaagagcttgcccgctatggccgcagccgggccgtgcagggcatttccgccggggacgcgcacgaattcctgtgccagctgcaggccgacgaagccttttcaccagtacgcaccgcagcggcccgcgctgccgtgtgggatgcttttctccggcaggatctggacctgctgcccgccaccctgccggatgccctgcgtgccagcagttcggccctgctcaccgacctgaccgcgctggactatgacgctttggaacgcacactggaatttcttgccaacaacagcgccgctgtggcggcgcaggccctgcccggccagtggaataccgccagcggcacttacacggtcacggatgcttcccgcgctgccatgcagacctttttcaatgtttcgcccaccgaggcgcaggcctcgtccttcagcgagccataacccagcaccagcgtgcccgccgctgagggtgcttctccggtcaggtcgtaatcgctcagcaggctcagctgcacgccttcggcttccgccgcgcagcgcagcgcagcatccgacggcgggtctttgagctttgccagcaggttcaggccggtgtgcaggcccgcaagggtcagctcgccgggagcaaaggcagtgttcaatgctgccgccagcgcgtcccgccgggccttgtaggccacacgttcccgggccagatgccgggtgaagtagccctcggtgataaagcgggccagcgtctgctgctcgaaccggctcaccgtgccggagtaaaggcggtattttttccgccatgcaggcagaagatgctccggcagcaccatataggcgatacggatgctgggagccagactgcgggagcaggtggagaggtacaccaccgggccgtctgcacccgccatgccctgcaggctgggcagaggccgggtatcaaaacggaactccgaatcgtaatcatcttctataatataccgcccgcccagcctgcgggctgcccagtgcagaagctcggccctgcggcctgcaggcatggtaacgcctgtggggaactggtggctgggtgtgacgtagcacaccgctgcatccgaccggttcagtgcttccaccgaaaggccgtcctcgtccaccggtaggcagcagcagtgcacaccgttgttctgcagcacctgcaaagcacgggggtagcccggcgtttccaccgctgcagggccgggcagcagcggtgccagcaggcccagcagatattccaatcccgcgcccaccacgatctgatgcggcccgcactgcacaccgcggtattcagagagatattccgccagcgcctgccgcagggccgggtcgccctgcgcatcgccgtgggtgagcagctggggcgaagaatagagcagctccttttgcagccgcgcccatgtgcggaacgggaacagctccgggtctaccccgcgggtggaaaggtcgtaccgcaccggcagcacaggcggttccggttttggcggtgcgggctgttccggcccgccggcaggccgggacggcagggccagatattcctgtacataaaagccgctgcgctcccgcggttccagatacccttccgccgccagcatctgataggcggcatccaccgtattcaccgagacggacagctctgccgccagccgccgcttgccgggcatccgggtgcccgccgcaagggtgccgcttcgcatctctccggcaaggctgcggtacagctgttcgtacagcggcacgctggaagaagcatccagcgccgtggtcagatggaccataaattatccctcctgtctgggtattgcgtcaaactgacctcattaaaaaactttattctgggtattttcatggtgtcagttctgcgtataataggagcatacccgctggacacccaaatgtcaagtaggattgtaggtaagtggttgcgaagcaatcaaagccccagtggggctttggtgccgcgggaacggaaatttggagggaaagtaaaatcatgtctactactgcaatgtggctgcttctggcagtcgttgtcatcgtcattctgtttgtaagtgtgctgtacaagcgcaccttcaccaccaaggagctggccatgaccggtgtcatggccgctttaagccttgtggcctatctgttcttccgtgtgccgttctacggcggctcttcgttccatctgggcaacaccttcaccgccctgaccgccctgctgctggacggtgtgtccggcggtctggccggtgccattggtctggcgctggccgatattctggccggtgacccgggctacgccgtcaccacctttgtgctcaagttcatcatcggcatcacctgcggtgccgtggcgcacaaggcattcaagctgcgcgacctcgacaagcacagctccggctatctcgtcaaggtgatcgtttctgccggttccggcctgctgctgaacgtgctgaccgacccgttcctgggctacttccgcaatgtgtacatttttggtcaggaatacaccgtagcacaggcgctgaccaaaattgcaggcggcatcacctttgtaaacagcgtggcctccaccgtgtgtgcggtcatcctgtacctcgccctgcgtccggccctggagcgtgccggtctgctgcccaagggcgaaaaacactaagcgatctctctatcctgatacagcactgctgccctcacctgccggacttctcctatcctccggcggtgggggcagcagtgtttttcgtggacgacctatcacacggaacttctccagtctcgcattcgctcgacggccccctcggggacggggcttttgacagaaactgaagcaaaaaagcgctcgtcacacaattctgcatgacgagcgtttttgctttttatcgcaattttcaaaaatagtgcctattaaaacggcatatttgcgatatgcagtttgcggatgttgcttgtgcattaaaaacgcaaactgctatcattacagcttttcaaatacaaggaaccggaacgagatatcggtttccagctgggacagcgcagcaaggcgctccgccccgccgcgcggcgttttccagtaatagggtgtcatggcgaacagcgcttccagctgttcgtggggcaccgtgacgcggccggtcactttccgttccccaatggcggcaaaaccgtcataggcgatctgctgcaccgggtttttatagggcttttcgtagagcacggccttcatctggtacagatgttcggcaccgggcaccacatagatcatccgtccgcccgggcgcagcacccgcaggaattcctcctgtgcaaagggcgaaaagcagttcagcagcaggtcggcccagccggtgcgcaccggctggctgaagctggatgccaccgcatactgtgccgtgggcagggccttggccgcaaggcgcaccgcaggctttgcgatatcaaaacccgccagctgcacccggcggcctttttcggcaagcgcctgcgcgatgcagcggtcgtaccagccctcgccgcagcctgcatccagcagatgcagcgccgcctccgggctggcaggctggccgtactctgcgcacagctcacccaccgctttgccaaagatgccgtagtatccggcattcaggaacgcgcggcgggcggccaccatctccttgctgtcgccgggggccttggtgcgcatgctctgcaccggcagcagatgccagtagccctccttggcgcggtcaaagcagtggccttttgtgcatttcagggtgctgtcgccggtcagtttttccccgcacagcgggcactgccatggggcaaacggttcatttttgctcatacttcgtcgctgtggtcctcaatgggtgcagttgcaccgccgtgggcgttcatatactcctcaaagttcgtgaacttctgctgcggcggacgacggctgatgagcataaggcccgggtcttcgtcccttgcagcagcggcacggccgcggcggctgctctccgctctgggggcacgggccggtgcaggctgtgcattgcgggacgcattctgacggccgcgctggccgttgtttgcaccgcggccctgctctgcgctctggctctgggcggcaggctggctgttctggcgggccgggcgttcattgcggcggccgcgcgggccctgactgccgccggactgctgtgcaggctgtgcagccgtacggatggccggggcggcgggtgcagccggagtctttttggccgggcgcagcggagtggcctccggggcactcacaaaatgcgggtcaaacttgggctgctcattgctgccgcgggcaggagcgttctgctcccggcgcgggcggctgttattattggaacggcggtcattgctgcgtccgccggtagtacgcttggtatcatccatgagtggttcctctttttcggtttttgcgggctttgcctgcaccttgggtgcgggtgcagcctttttttcaggttttgcgttttttgcttcggcctttgcgggcttcggctgctttgcggcaggcttttctgccggttcagcggcggctgccttgggctttttgccgcgcaccggcggttccgggcgcaccggcgcgggcacgccgtcccacgggtggccgctcaccacgggaattttgcggcggttcagcttctcgatgcctgccagatactcctgctcctcaggtgcacagaagctgaccgccgtaccgtcggcaccggcgcgggccgtgcggccgatgcggtgcacgtaagtctccggtacctcgggcaggtcgtagttgaacacatgggacagctcgctgatatcgatgccgcgggcggcgatatcggtagctaccagcaccttggtcttaccggccttgaagttttccagcgcggtcacgcgggcggtctggctcttgttgccatggatggccgccgccgggatgccctgcttggtgaggtcttttgcaattttatccgcgccgtgcttggtgcggctgaacaccagcgcgttcaccaccgggggctgcaggttcttgatgagccacggcagcaggaatttcttgttgcccttttccacatggtacaggctctgctggatgcggtccacggtgctggacaccgggtccaccttgacgaaggcgggcttgcgcaggatgcctgcggccagctgttcgatctcggtgggcatggtggcgctgaacatcaggttctgacgctccccgggcagctttgcgatcaccttcttcacatcgtgcacaaagcccatatccagcatccggtcggcttcgtccagcacaaagatctcaaggttcgagagatcgataaatccctgaccgatcaggtcgttgagccgtcccgggcaggcgatcaggatgtccacgccctttttcagcgcttccacctgcggtgcctggcccacgccgccaaaaatgacggtgctgcgcagcttgagatacttgccgtaggcatcaaagctttcgccgatctgcaaagcaagctcacgggtaggggtcaggatcagggcgcggatggcaccctttttgcggggcgcattggccgtgagccggtccagcatgggcagcgcaaaagcagccgtcttgccggtaccggtctgggcgcagcccatcagatcccggccggacagcaccggcgggatcgccgccgcctgaatgggcgacggggtctcatagcctgcctcctgcacagcgcgcagaagcggggcggacagattcaattctttaaatgtcatggttctccaataattattccgtaattttccggcactccacatagtaccgcttttcttctgcgtggcccatgctgaaggtcttgcgcggcagcacgccgcccatcacaacgcctttgaacaggtcactcttggcaaacggcggcatcaggaatgccacagcaccttttttgcacagggcgcgcacagcaggctcgtcgtgcacatagtccacgcgggcttccttgtggtgctcaagatagtattcgataaattcgtcaatggtgcccacggtcagcggtgcggttgggtcctcaaagctgagcacgttggacatgtgcggcccggccagcgtgaagggctgctgcttgctgccgccaaagctgcagccggccatattggaatcgctccacgtgatcaggctcagcagcaccgctgcgcagtccacattgaacagcacgcggtggatcggctcgatctcgattgcaggcgagtgcacattgcacacctcggccagacaccagcgggccggatggtttgctgcctgctccggtgtgagtgtctttttcagctcctcccagcaggcctttgcagtggccagcgagtggttgccgtcgcccacggccagcgtcagcgggtcgcggcgggtggcatccggatactttttgtcgaattcttcctgactgcccagcacagccagcgcatcttcgatctgcgcaatgagggcagggtcttccacagcccagcccgcaatgtggccgccgttcagcatcaattcgccctcgtataccttgggcagttcggctttatgcgccgccaccggctcgatgagagtgcagcctgggtcgtccgccagcatcatgatgtggggcgtttccagcgcggcaccggtgcgcaccttcatgcggggcgggatgcggctttccaccgtgctctcgctggggcgcaccgtgcatttctcgccccggcggtagctgtaggcttccagatccaccatgcccacaaggccctgccgcaccttgccgctctgctcggtgcgctccacgtaaacaaagccgtccaccgcgcgagtcagcacgttccgggcatagtcatccatggtggcatggatcttctcaatgcgtgcatcggcatcgccgtcctccagatagacctccggcaggatcatgttcagggtgctggggctgcctgccgcggcagcctcggctttctgccagtaatcccggtcactggtgaactgatcgcaggcaatgcagccccacttttccagtgggatctgctctgaaggcagaaggatgtgggccggtgcaaagcaggatttggtattcatagcagattcctccctcttataaaaccagagacgttactggaaaatgtcggcgctgtgcaacaccagatgctgcacgccctgtccggcggcagactgctccagtgcggtgcggctgtcggcgtccatcgccttgtctgccgtcaccagcaggttgtccatgcccagcgtcacagcgggcacatccagcgacacgctgttggtattgcactgatccagcgtgtagctgaaccacagggtcatgctgcccgcaaagcggctctgcagggcggcgatatccgccttgagctgatccgcgcgggaaacgccgctggtctcgccgtagtcctgtttgcggctgagcttcgggaactggacattggtcaggactacctgctcaaagcccatgccctgcacctcggctaccagatcgcctacatattccactgccgcagcggagtagggattcagccatgcattaccgtccttctgggcgtccagccacaggccgtcgccgtagtggatggccatgctgcggtcggtgcgggaggagatggggtccttgaaggctgcaagctgggccacagggatcacgccctcctcccggaagatggccgcgatgcgggccgggtccacggtggtgtcggcaatgctctgggcggcagccggcacctgcgaagcgtagcagatgctgccatccggtgttttcagggtcacaaggccgtaatccgctccctgcgccttgagctgctgcgccgctgcacggatggccgcatcatcggtaagggtgctcacatccactgcggcccagctgccgccggtaatggccttgccgtccagctccttgggctgttccggctccggctgggacgaagccgcttcctgtaccgccgaggatgcagctgcttcggacgaggcggctgcgcgggatgccgattcagcttccagatcacggttcttcaccacagtataccaggtgtgggtagcccagtccagcacgtggggtgctgccagccaggctgcgcccagcaccgccagcaccagcaccacgatgccgatgcattttttgatgcgtgtaccgcggctgtagaagctgcggcggtagcgcttgaccttctgacgtttatactttgccattgtcgattctcctccctgccaatgttacaggatcacagaatgtccggtgaaaccatagatcgccagtgccagcacgccgatatacaccagcgtgatgggcaggccgcggaatgcttccgggatggccttgctgcgcaggcggtggcgggcttccgttaccagcagcaccgccagcacatagccaaggccgctgccaaggccaaagccaaggctctgccccagcgtaaagctctgggtgcgctccaccagtacagtgccaagcacacagctgttcaggcccgccagcggcacgatgcgcagcaatgcgctgcggtgcggcaggcccttcgccagccacagcacggcgtgctccagaacgcacaccacggcaatactggcaatatacaccagcgggcgcagctgggcacgatttgccagcggcgcgatccggctgccggcataccacgcaaagggcgttaccagcacctgcgtgatgcacagctgcataccgaacagccagctgctggtgcggtcatcgcccaccagctgcaccagacgcgaaacgcccagtgcacgggtaaagacggcgttctgcgcgaacaccgccagcagtgcatagctgaagaacactgcgcttgttgttacaacatctctcattgttcgcggtccgcctccttctgggaatgcacatccacaaggttgcgtgcctctttggtgagatatgccttgcgcttttgggccagtgcacgccatacggcgcacagcacgcccagcacgataaagccgcctgccggcatgcttgccatgggcagcaccgggcggctgacaaccacaccgaacatggtgcctgcggccagccattcacggatgcagcccagcagcaccagcagcaaagcatagcccaccgtgatgcgcaggcccttggagacagccttgcgcaccgtctcctgcacgcggccaaagcggtaggtcagcagcggctccaccgtgagcaggggcaggtagatgccaaggctcagcaggctggtgctgaacagcatattcaggatgggatacaccgccagatacaccaccgccgtgctgaagccgtacaccagtgcacggggcagcagctttttctgcagcgtttccggggcggggtcctcgtcgtgcaggggcacaaggcggctcagcagacaggccagcacgcgggagggcaccagcagcagcgccaccgccaccgccagcatcaccgcattctggccgctggtggcaagcaccaccagcggggcaaggcccatgccctgcatgaccaccgggttattcagaaacacacggtcgtggtgggcaaacttgttgggatcttttacgatcagttcagccgttgcgcgtctcattgtgcttccccctttccggcatctgcctgcagatgggtcaggtgatacagctttgcctcggtgcggtcgatccatgccgacacactgttgaccaccagcagcgcaaagcacacaccggtctcgtacacgccatagtagcggaagcccatgctcacaacgcccaccagcacgccgtacagcacacggcccatgcggtggtgcacgcaggtgtaaggctcgttgatcaggaacaccgcgctgaacaggatcgcgccagtcagcagctcatcccgcacacactgcaggcggggcaggatatttgacagcacggcactgtcggcaaggcccgcctgccgcgggaagaagaacgcaatgaccgcacaggtcacaagaaagctgatcgatgcagacatgtgggcatccttctgggtccacaaaaacaggccgcaggcaaggatcaccagcgcagcgccggtgcccatgggagcagcatattcgcccagacccagcgccagcgagccgatgttcagcatgccgccgctgcgcagggtgtcctcaatggcgctggagaccggcaccatggaagcgtcccacaaagggatgttcgtatagggctgcggatagcggaacacctgttccggccatgacactgccgccaccacatagcccacagcagccgggttgaaggggtagctgccgtagccgccaaagatctccttgccgatcagcacaccggcaagcactgcggcgattagaacatagatatccaccgtcaccggcatcagcaaggcaatgacgagcgcaaagctctcgttggaaaagtcactgccctgatacacgcggcggcgcagcagcgaaacgagacggtcgcacaggttgccggtaagcaccgcaatgccgcacagcagcagtgggcgcacaccgtacagaaaacaggccatgcacagcaccggcaccgccataaagcagatatgcttatagtagcggccggtcttctggagctgtgcctcctgctcccggatcaaagattcatccataaatggttatcctttcaaaggctggcgaggtgctgcacggctgcagcagggtctgctgcgccgaacactgcactgcccgccaccagaatatcagcgcccgcttccacgcactggggcgcggtggcattgtccacgccgccgtccacttccagcagatagtgtgcgccgcgcgcttcgcgctctgccttgagccagcgcagcttgtccagcgccgagggcatgaacttctgcccgccgaagccgggctccacgctcatcaccagcacaagatccagctggtcaagatacggtgccagcgcctgcggctcggtgccgggcttgatggtcagccccaccttgcagcccagcgcccggacggcatcgatggtggcctggatatcgtcctcgcactcaaggtggaagttgtacagggtggcaccggctttgatgaaggcttccgcatactgcagcggatggctgatcatcaggtgcacatcataaaaggcatccggcagatttttgtgcaggctcttgagcaccggcacgccaaagctgatgttgggcacaaagtggccgtccattacgtcgtaatgcagcatctgtgcaccggcatccagcaccatgcggcagtctgcacccagtttgccaaaatcagcggaaaggatcgaaggacttacgattgccatattctatctttacgctccgttattttataaattcttattcccatttgtcccattgtgctggcggtttcaaaccgcaaaaacagcatgggcatggttatcttttagtttacatgaaaacgagcaaaaaatcaaacccgccaacggctttttcacggaaatgacgtatttggaaagatctgtccatttgcgaagtaaactcccccagtcaaagcctgacggctttgccagcttcctcggagagggagcctctggcacgcccggaagatttgcactttaaccggaagctttaccgccatgccaagggccccatcccagagggggctggcattgagcgcagcgagatgactgggggagtttcatcggcggcaaagtttccccacgccaaaacagccagaccgccccgggtccggggcagcctggctggaagttcattctacgggcttcatgcttgcagggtcttccacggtgggttcaccgccggcttcgtccggcagacgcttcatgccgccggggttcggggccacggtgggcagggtgaacacgaaccggcaccactcgccctgctggctctccacccggatctgcccgccggaaaggttcaccagcaccttgcagatgttcaggccaaggccagcgccccgggcgtgcaggccgcgggagcggtcctccttgtagaaccgctggaacacgtagggcagcgcttccgggctgatgccctgaccggaattccagatggagatctcggcttccgggccaagcttttccaccccgaagcggatggtgccgcccgcaggcgtaaacttgatggcgttgtccagcaggttatacaccacctgatggatcaggtcggggtcggcgtagaccagcaccttttcgtccatggtcaggccgtcgatgtcgatcatgccgtcgttgatgcgctgctctgccgagagcgccacgccggtgatcgtctcccagatgttgaacatccgggcattcacctgatattcgccgctttccagcttggaaagatccagcatgttctggatgagccgtgccagacggcccgtttcctcactgaccagctgcaggtagtggttctgcatatccggcgggatggtgccgtccagaatgccgtccacaaagcccttgatggtggtcatgggggtgcgcagctcgtgggcgatgttgcccatgaactgaccgcgggagttgtcgttcatctggatgttgtctgccatgcggttgaaggtgcgggcaaggtcggctgcctcgccttcgccttccaccccctccacacggacggaaagatcaccgccgccaaagcgctgggcggcatccgtcaccttctgcagcgggtcggtgagctggcgcatcaggatcttggtcaggatgctggcacacagcagcatcacacaggccgacagcaggaagttggaccagaactgctgcttgaactgggtcagctgctcgccggaagagcacaggaacaggtaaccgctgggctggccgttctcattgcgcatttcgctgaccgtgatgtagcttttcccgtccagcatgccgcccagcgtgccgaacacatggtagtagtccgcatcggaagcgtcgatcttctccatcatttcttccggcacggtcaggctctccagcttgtccgggctggaggcgatcatcacccggccgtcgttgtcggtaaagaacagataggcctctgcgctctcgccgatgatctccagcttggtgctcagtgcgtccagctcatcgccttccggcagctccgcctgctggaccagatactgggccgtgcgctgggtgacacccaccacctgatccagtgtttcgtagcggtccttggcaaagtagttcttgaacagcacccactccgaagctcccatcagcacgatgcccagcaccatcagggtggacaccagcgagaagaacgccaccgagatacttttgcgcattactgacgcacctcgaacttatagccaacgccccatacggtcttcagctcccatttgtcggaagcaccggccagcttctcgcgcaggcgcttgacatgcacatcaatggtgcggctgtcgccgtaatactcaaagccccacacctcgtccagcagctggtcgcgggtgtagacgcggttcggatgggaggccagacaattcagcagttccagctccttggggggagcctccaccaccttgcccttgacccgcagctcatagctgttcatgtccagacgcaggttgtcgaattcgatcacgccctcggtgctctcggcagcggcagtggtggtctggcagcggcgcagcaccgccttgatgcgggccaccacttccttggcgtcaaagggcttcaccatgtaatcgtctgcacccagttccagccccagcaccttatcaaaggtctcgcccttggccgtaagcatcatcaccggggtgttgcccgccttgcggatgcggcggcagacctccagaccgtccatcttgggcatcatcacatccagcagcaccatatcgggcttgacctgattgaacttttccagaccttcttcgccatcgtttgccaccgtgacctgatagccctccttggtcaggtacagccgcagcagctcgcagatattggtatcgtcgtccacaacgaggatcttttcgttggccataatgatctcctcccattttatcggatgcccgccgggcgggcagagcagcaaagtattccacttcttattatacggaagagttatgacaaaataaagaaggatttgtatgattttttcacaattccggcccggccttactcgatcatcagccggatgatctcctcattggtctccttcatgccgtccttgcccagacggccgatgcccttgatggtggtctcgatgtccttcatcacgatgccgtcgccgcccttgaactcctgatggcacttgtacatgttgtagccaagcaaggccgcgtccaccgaggatgcgatctttgccgcgcaggaggcctttgcgccgtcgcacacgatgccggacacgatggccagcgcattgaccaccgtgtggatggcggcctgatagccgtcgccgcacagatatacgatgcccgcgcctgcgcccgcaccggcgctgactgcgccgcagtaggcggacagggtgccgatgccggtcttttcgtggatggccaccagattggaaatgatgagggcacggtaaagcttttccttgccgctgtgcagctccttggcatattcaatgagcggcaccgagcaggtgatgccctgattgccgctgccggagttgatgatgaccggcagctcacagccgttcatgcgggcatccgaaccggcggccgccttggccttggcccggatagacacatcgttgccgtaggtagaaagcagcacccggccgatgttcgcgccatagtcgcccagaaggccctcctctgcaatggcgttgttatagcggatctggcgttccagcaggtccgccacatcctgcaggtcggccgtctcggcaaagtcccagatgtccttcatgttcagcaggctgcggtcggcccggctgtcccgccgggcctcctcgttcagcagcggcttttcgtaaagcacccggccattcttttcgatcaggcagatgttggtgtgaaaatctgcaatgcgcacctttgcgtaggaatccccgctgcgctcggtaacgatgatatcgaacacatgcccctgctcgatgtgctggatggaaatgggcaccgtctgcagatagtcccggatggcagccttcttgtcctcgctgacctccgagatcacttccagctccttttctgccgagccggcgatgatgcccgctgccacagcagcttccatgcctttcaggtggccggtgttgggcacgatgacgctcttcacgtttttgatgatgctgccgctcacctgcagctgcacgctctcgggcagtgcgcccagcacctcgcgtgcccgggccgcagcataagccagtgcaatgggctctgtgcagcccattgccgggatgagctcttcttttaatatttctacatacgcctgatagcgcggatcactgcgttccatgacggttccctgcctttcctgtcgattcgatatttaccaacaggagtagtatactatagaacccgcgcaatgtaaaacaaattcttccccgcccgcaggaccggctattgcaaagcgcaaaccgcagaagtagaataggagcatccaaaccgataaatccatggagggtcttccaatgatcgaaaaagaagtacaggagctgctgtccttcattgacggcaatcctaccgcataccacaccactgcatccgtccggaacatcctgctgaaggagggcttttccgagctgctggagagccgccggtggcagctggaacccggcaggagctattttgtctgccgcaacggctccagcatccttgcattccgcatgggagaacagctggaaaactacagcttcaatgtggccgctgcccacacggattccccctgcttccgcatcaaggaaaacgccgagatccacatgggccggaagtacaccaagctgaacaccgagggctacggcggcatgatctgctccacatggatggacaggccgctgtcggtggcaggccgcgtgctgataaaggagaacaatgccatcacctctcgcctgctcacgctggaccgcgacctgctgatgatccccagcgtggccatccacatgaaccgcgaggtcaacgacaaggcttcctacaacaagcaggtggatatgcttcccctgctgggcggtgccgccgaggaaggcgtgctgaaaaagctgatcgccgctgagctgcaggtcgcagaagaccagatccttggcagcgacctgttcctctgcatccgcgaaaaggccgccgtctggggctgcaatgaggagttcatctcctccggccgtctggatgaccagcagtgtgtgttcggcatcctgaagggtttcctgaacgcacacagcgcccagtccatcaatgttgccgcctttttcgacaacgaagaagtgggttccggcaccaagcagggcgcggcttccaccttcctgtacgacgttctgcaccgcatcgcgcagaacgtctgccccggcgatgaggacttccaccgtgcggtggcctccagcttcatgttcagcgccgacaacgcccacgccgtgcaccccaaccacccggaatacaccgatgtgaacaactgcacctacatgaacgagggcgttgtggtcaaggtgcacgccggccagaagtataccagcgacggcatgagcatagccgttgccaaagagcttgccgcccgcgccggtgtcccgctgcagtattttgccaaccgttccgataaagtcggcggcagcactctgggcaacctcgccatggcacaggtatccatgaactgcgtggacatcggcctgccgcagctggccatgcactcctgctacgagaccgccggtgcccgggacatcatttctctcatccggctgatggaggaattctacgccagccattttgaggagaccgcatccggcacccttaccatctgcaagtaagacccgtacaacctgaatcataaggactgcccgtggaaaagcagcactgcttttccacgggcggcttttcgtttccacttaagtgagtattgagaaaaaacgtccattgtgctacaattattctgttataatatcgctttttaccgcagcgtaaaatctttttcgcaaggagtataataaaatgaaattaggtatcgtcggcctgccgaacgtcggcaagtccactctgttcaatgccatcacctccaccaagaacgcagaagccgcaaactatcccttctgcaccatcgagccgaacagcggcatcgtagccgtgccggacaagcgtctggacaagctggccgagatctggcagaccaataaaaagacccctgccatcgtggagttcgtggatatcgcgggccttgtgaagggtgccagccagggtgcaggccttggcaacaagttcctgggccacatccgcgagtgcgatgccattgtgcatgtagtgcgctgctttgacgatgataacatcatccacgtggtggaggatgtttccaaggctgaggccgtggaccccattgctgacatcgatgccatcgactacgagctgatcctgtccgaccttgaggtggtgcagaaccgcgcaggccgcatggcaaaggctgccaagagcggcaacaacaagggtgctgccgccgaagccgcatggctgcagcagctggccgaccacctgagcgccggcaaacctgcccgcagcttcgattttgacgagggcgatgccgagcagcaagctgttctgcatgaaatgggcctgctgagcgcaaagccggtgctgtacgcctgcaatgtgggcgaggacgacctgatggagggcatcgaaaacaacaagtatgtcccgctggtggccgcacgcgccaaggaagagggcgcacgctacattcccatctgcgccaagaccgaggaggatatcgccgactactctcccgaggaaaagaaggcttttctggctgaaatgggcattgaagccagcggtctggacaacctcatcactgccagctatgatctgctgggcctgatctccttcctgaccgacggcaagaaggagtgccgcgcatggaccatccgcaagggcaccaaagcaccgcaggctgccggcaagatccacagcgatttcgagcgcggcttcatccgtgccagcgtcattggctacagcgatctggaagccaacaacttcgattacgccgccgtcaaggccaagggtctgcagcgcaccgagggcaaggaatacgttgtcaacgatggcgatgtgatcgagttcctgttcaacgtttaaagggaaaccctctcagtcaaaacccgacggttttgacagattcccccttttgtcgctgcgtgacatcttcccccggccgggggaagtctttcctctcagggggagctcgattgcagcgaaccggaagagccataaaagctctccctttgggagagctggcatcgcgcagcgatgactgagagggttcgttccccagccttcctgaattaaaaagagtcattcccctgaatatggccagagcgcacgcgtcggccatttaaaatcgtaaaagaggttacctatgattttcggtattatgggcgcaatgcccgatgaagtcgatcagctgtgtgcaaagctggagaatgtcaccgtggagccctacggcggcgtggattaccacaagggcacgctggccggcaaacaggtggtggtgtgctgtgccggcatgggcaaggccaatgccgccgccaccacgcaggtgctcatcacaaaattcggcgcggagaagatcatcttttccggcatcgcaggcaatatgacctcgaagatcggcattggcgatgtggtcatcggcaagaccgtgctgtaccacgacgcacagctggacatgatctgccagaacccgccgttcctcaaggaatacaccggcgacccggagctgatcgctgccgccgaaaaagcctgcgccgaagcgggtgtgaaggctctggtgggcaagattgccaccggcgacctgtttgtaggcgacagtgaaaccaaggctgccattgaagccaaatgcgcccccgactgcgtggagatggaaggtgccgctgtgagccagatcgccgccaagaacggtgtgccctgcgtcatcctgcgcgccatgagcgacaacgctgacgaggacggccacgaggtgctggtggtgaaaaagttcagcattgcggaatatgtagccaccgccaccaagatcgtggcagcaatggtggaagcactgtaaaaaagaaccctctcagtcaatgcttcgcattgccagctcccccgaaagggggagcttttgacattccggaaacgttttccgttttgccaatggctcgcccttcgggagagctggcgaacaaagtgagcctgagagggttttcttttacaagaactgttccagctttacccggctgtcctcctgaaactcctgcagtctttgggcaaggcgctttgcgccgggcgcggcattggggtaatccttctgggcctttacgcagtccaccacccccatgccgctgccctgtgtgagcatctcggccagattgcgggtggacttgtccgtgagggtcttcatactgatgcccatttttgtgttcagctttgccatggcgctctgcccctgcgcggtgccgccgcaggcctcgatggcggtgtgcgcttcctgattgagctggtggtacacattgcgctggcgcagcagctcggccttgaactgcacatcgtcggtcatcggcacgatctgttccaaggtgttcttgcccatctcggtattctgcaccacggcttccagcaggttcaggttgtcgtttttctggttttccatacaaaaaatcccccttctggccttagtctgcgccaaaagggggattttatacgctggttttattctgcacgcatctgatcgccgccggcgttctgtgcctcccgcaggcgtgcatcgcacaactcgtacagtgcctgccagttctttgcagggacatcctcaaggctcgccacgccgcagctcagggtaaagggcacccggcgcatcatgccggtggtggtgatgcattcccggggcatctgccgatacaggttctgcatttcctctgccagctgcttgccgtcggcatccagacaacccaccgcaaagatgctgccggtcaggcggcagaccacgcgggccgcaggggtatcaaagttctttttccactggttgcccacaaagcagtgcagctggtccatcacaggctggccgtaggtatcccgcagcttctggccgttgtcgatgctcaccagcgccacagccgccttgcggccctgcgctgcacactgttccagcttttgggcaaacaccgtttccagatagcggcggttgtacacgccggtaaggaaatcgtggctcatatcctcgcggcacagttcccgctcccggggtgtcatgcgctcttccggcagcacattgcctgccagcggtgcgcacatttccagctcccagcatttgccgtccgcttccactctgcggtgcagcacacagtccacacggccattgcgcagctcgtagtccacccgcaggccatcgtcctgccagccgtcacaaagcggtgcttcggtcagggtcactgcctcaaatacggcctgcgctgagcgtgcaagttcccgcagatcctgctcggtacattctttcttcatgtaattttccccatcatctgcgcacgcggcgctcccgtatcccgcgtgcagtcacctgttccccatacgttcaggaaccatctgccgcattacgcatcccgcgcccgccctgtttccggaaatgccgggaacgcatcaggcaaagaaaaatggcataatgccgctttagcaacattataccattcagcttccgattttaccagcaaaacgcacaattttctgccggagtttttatattttcgtcaaattgctaggctcccgccgctctgtgccttctgtttatacgcggcagtacacactgcactcgtcgtggatggtcttggccagtgccttggcggcaaagccgtctgcggcgcgccatgcccagtttccgcccagtttgccgggggtattcaggtgcgcttccgcacccagacccagccagtcgtacatggggatgatggcccggtcagccaccgaccccagcgctgcgcgcagcagagcgatgcggacatcatcggtccggatggccgccagctcctttgcggtgggctttacgccggtcaggtgcaggtaagcggctgcggcagccttttccttttcggaagcgccgttctcccaccagtcggtcagggtggtgttatcgtgggtgccgggatacactacgctgttcttgacgtggttgtggggcagatactcgctgtccccaccactgaaggcgaactgcagcaccttcatgcccgggaaggtgctgtcggccagcagctttcgcacgctggggaacagttcgcccagatcctcggcaatgatgggcagcttgccaagggcagcttccagcgcatcgaacagctccatgccggggccgttctcccacttgccggtgcgggcggtggtgctgtccgccgggatggcccaataggtatcgaagccgcggaagtggtcgatgcgcagcaggtcgtagatgcccagtgcgtggcgcacccggcgcacccaccacgcgtagccagtctttttgtggtaggcccagttgtacagcgggttgccccacagctgaccgtcggcagagaagtaatccggcgggcagcccgccacacgggcaaatccgccgtcggcatccagctcaaacagcgcgccgcccacccatgcatccaccgagtcggcagagacatagatggggatgtcgcccaaaatctgcacgtcccttttgttggcgtaggccttcaccgcctgccactgggccgcaaacttgtactgcacgaacttccagaagccgatctcctcctcgttttcggcggcaaaggcagcaagggccttcttgtcgcgcaggcggtagggcttgtcccactccacccagttcttcatgccgttggccactttcagggccatgtacagggcgtagtcgtccagccattcctcattggcgagggtaaaggcatagtaatcatccgggaagtaatagctgcagccgtgcagcccggcgcactgcttgcgccatgcggcgtaggcggtgcgcaggactttaaagcggctcacatacaaagtgccgtagtccacctctttggggtctgtgccccatttttcggccttgagcttggcggcggtgagcaggccttcttccttcaaagcgtcgaggtcgataaaataggggttgcccgcaaaggccgagcagctctgataggggctgtcaccgtagccggtggggctgagcggcaggatctgccagatcttctggcccgcttgtgccagaaaatccacaaacttgaatgcttccttgccaaagcagccaataccgtaagggccgggcaggctggacaccggcatcaggattccactttcacgcatgctattaccttcctcatttttaacattttatgggaatatcgttgtttcttatcataacatatccgcagactattttccacaggcaaaaaacgtggtatacttatttttaaactgggtgcgtatccctttttcgattttaaatagcctccgctttcgctctggctatgttcagcggaatccagattttttatttcgcgtttgtcgcggcctgcggaacttgtcggggcaaggcccctccatctgctgacgcagaccgctcgccgcttaaaagccccaccggggctttcattgctgcgcaaacgcgggccgctccaaacgcattttcaccagaagggccgaaaccggcagatgcagtaaaatctcttttgttgttggcctttacggccccttgcgtgaaaaagcagaattggaacgaccgcagtcgttccaattctgcaaaaataaaaataaattttccgctgaatatggccagagcctgcggcggccattttaaatcgtcaaactgcaccctgaacaggaggtacccgcgccatgcagcgcactgaaaaatactttgaacaggacgctttccgcacccagtgcgagagcaccatccttgccgcagagccggatgaaaagaccggcggcgggcgcattgcgctggacggcacagtgttctacccggagggcggcggtcagcctgccgaccggggcaccctgaccctgccggacggtgccacgctgaatgtgaccgctgtgcacgagcatgacggcatcctctggcacagcgtggacgctctgccggaaagcgctgttcccggcactgccgtttccggctgcatcgactgggaatggcgctttgacaaaatgcagcagcacaccggtgagcacatcctttccggcatcctgcaccagatgttcggagccgagaacgtgggcttccacatcggttccgaggctgtgcgcatggacaccagcgtgcccatttctgccgagggcctgcaggcagccgagcttgccgccaaccgcatcgtgtggcaggatgtgccggtgctggtcagctaccccacccgggaggagcttgccgcccttgtctaccgctccaaaaaggagatcgaagggcaggtgcgcatcgtgaccattcccggtgcggatgtctgcgcctgctgcggcacccacacccgcaccaccggacaggtgggacagatcaaaattctggccagtgagaactacaagggcggcgtgcggctgagcgtggtgtgcggccagcgggcattgcttgctgcacaggctatgcgccagcggcaggcagagatcggggcgctgctctcggccaaggccgaccagaccgctgtggcggtgcatcgcgtctacgacgagtatactgcgctcaagtttacacactttggcgtatgttctcagctgtttgatgcacttgcccagctggcaaaccccggtgaggatgccatccgcacagtgcccggccttgacccggacggcctgcaccggctggcggtgcgcctgaccgaagccaccaccggtctctgcgccgccctgacccccaccgaaaagggcaccggctactgcatcgcgcaggcagacggcgatgtgcgcgccctgaccaaagccctgaacgccgccctgaacggacgcggcggcggcaagcccggcatctgtcagggcagctgcgccgctgcaccggaacaggtggaggaatttttgcgggagcaaaaccggtaagcatcctcgccctctccgtctttgcttcgcaaagccacctctcccaaagggagaggctttggcagtacggaaaaccttccggctttgccaagggctccccctttgggggagctggcgcgtcagcgcctgagagggcgagccacgttaattttaaggagaacaacaaactatgagaatgcgtttcaaaccctatgcccacgacgagctgatggcagccgacttccatgtgcacgagccgctgatctggggcggcaagtggcacgcccagtacgcccgcccggagcagccctttgtgctggaactgggctgcggcaagggcggcttcatctcccagctggcctgcgcccacccggaaaacaactatctgggcatcgatatcaccgataaggtgctcatcctcgccaagcgcaagatcgaagccgcctatcaggctgcgggccgccccatcgacaacgtgaagatcatgagcaccgacatcgagcgcatcaagggggtcattaccgccgaggatacggtcagccgcatctacatcaacttctgcaatccgtggagcaagaacggctcttcccacaagcaccgtctcacctacccgcgccagctcatcaactaccgtgagttcctcaaggacggcggcgagatctacttcaagaccgacgacgatgatctgttccgcgacagtctggaatacttccccgcttccggctacgacatcgagtggatgacctttgacctccatgagaacgagccggagtggaacatccgcaccgaacacgagggcatgttcaccgaaatgggcatcaagatcaaggccctgatcgcccgcaaggacccggaccccgccagcgtgacctggatcgagccgaagatcctcaagcgtcaggcccgcgaagcggccgaggccgaggctgctgccaaggccgcacaggaaggcgaaggcaatgaatgacccctgcgagatctgcctgaacaatgtgcaggacgagtacggcagctggtactgtgctcagggcggctgtctggacgaggacgagatggcccgctatctttcccgcagcacggccgcctgcccgttctttgagccgggcgatgaatacaagatcgtacaaaagcagaactgacctgcacagcagcctgattctcacaggaggtgttttatgctcaactttctcacgaccaccacagtatgcggcttttcgctgtatcatgtgctggccttcttcctcatttattcctgcaccggctggtgtctggaggtcatctttgccgccgccaccaccggtcagctggtgaaccgcggctttctcaacggcccggtgtgccccatttacggcttcggcatggtcattgtgctgttcaccctgacccctttgcagaacagcgtcctgctgctgtacatcggcggtgtcatcctgcccagtgcgctggaactggtaggcggctgggcactgtataagctttatcatacccgctggtgggactacagcgactttcccttcaacattggcggctatatctgtctggaattcagcctgctgtggggcgtgggcacgctggtggtcatgcgcatcgtccacccggtcgtcgccggtcttgtggatatggtcccgccctttgtgggctttgtcgttatgtgtgtgctctatgcagtctacgcggcagacgtagtcgttacggcctttgccgcctccggtctggccaagacgctggatgccatggagcagctggccgacagtatccatgccgtcagcgatgccatgacccagctgctgggcaccaccaccctgaacgccgaccagaagctggacgagcagcgcctgcagctcaagcttgctgccgccgaggcccgcgaagccgcaccgaaaaagcgcgccctgcgtgaaacgctggccgccgtccgtgccaagaccgaagaggcccgcgaggccgcaaagcgtgcttccgagatcgccaagctcaacacggccgaagccgccaaggctgcacagctggccgccaagggcacgatggagcgcgctgccgagctgctgcgtctggaacagctggccgaggagctgcaggcccgcagcgatgaaatgcaggcccagctgctgcgcaccccccgcatcgttggcccgcgccgcatgctgcgcgccttccccggcctgaagcatggcgtaaaaaagaccaccctcaaggccctgcgccttggtcttgcccgccgggaaagccccgaagaagaaccgaagaaaaacggctccgacacccgcaaggatgcctgagaccgctgcccaaaagaccgctgcacaggaatgcagcggtctttttatgccccgccttccggacccgtccggcgttccgttctttttgccgcaatgtcgcaatgttttaaatatctattttcaaaggtttaaaatcgtgctatactgttttataaaatgccatattttgtcgaaaacatccaacagcgagggatttatcatgtccgaagaactgaagtcgaatgaaaatgtcggcgcaccgcaacccgatgcacttgcgcagatcgcatcggtagaccccagcccggccgtgggcggtgtgcaccgctttactccggccatgctcggccgtctcaagaagcagcgtcagctgctgagcgagctggagcacgccctgaaaaatcacgagttctgcttctttctgcagcccaagtgcaacagcatgacccgcgccatcgtgggcatggaagcactggtgcgctggaaccaccccacccgcggctgcgtgcccccgtctgagttcatgcccctgctggaaagcaccggccttgtgacccagctggatcagtacatctgggagtctgtctgcaagaccctgcacaagtggcaggagagcggcagcaatcttgtgcctgtatctgtgaacgtttctgtggtggatatcgtcaatctggacgtgccgcagatcttctccaaccttgtggaaaagtatcagctggagcccaagctcctgctggccgagatcaccgagaccatgctggccgaaaacgcttctctggtggaaaacaccatccagggcctgcaccgcaaaggtttctctgtgatgatggacgactttggcagcggctattcttcgctgaatatgctcaaggacaccaacgtggatgccatcaagctggacatgaagctcatcgacatgaaccagcaaaaccgcagcaagggcgtgcagatcgtggaatcggtggtggatatggcccaccgcctgaatctgcccatcatcgccgagggcgtggaaacgccggagcaggtctccatgctacaggccgccgactgcctgtatacgcagggctattatttctacaagcccatgccggtggagaacgccgaggccctgctggcccagcccaacagcgaggattactgggatatgcgccgcgacctgatgcgccgcgacctgatgcgccatgaccgccgggtccccgtctccgacagtgagcagaccgcactggcactgcaggcctaccagatctttgcggataatgtgctggagctttccctgctgaatctttccaccggcgaataccgggtcatcaagcgggatccacgcctgcccggtgccggttcggacaccgaggaggactttgccgcttactgtgagcgcatggtgacgaacaaggtgatccacccggacgacgcggagatgttcaccgaccagaccgatctggaggccctgcgctccgctgttttcagcacccagcagccggaggcctaccgcttccgcaaaaacgtgtccggccagttcgtgtggatcaccatggaatttctgccctgccgcaactgctgcgcccagaacccatgggccaccgtggtggtgcgtgaggatgcacaggccgaccatctcagcgaggagctggacttctcctacagccacgacaccctgactggcctgctgaaccgcagcctcttcgagaccgatctgcggacgctgcagtccagcgaatacgactccatggtgtgcacctacatcgatgtggtgggcctgcatgagatcaacaaccatctgggccaccgcagcggcgatgccatgctctgcttcattgccaatgcggcccgcaagttctttgtttccagccgcatctaccgcatcggcggtgacgaattcgtgatcctcaccccgaaccagccgccctacagcgtgtgggtggctgtggacaagatgcgtgctttcctgcgcgcgaaggaatatgagatctcggtgggcatccagagcaccaacaacctgcaccggctggacgatgccatgaatcaggccgaagctgccatgcggcaggacaagcaggcctattatgcccgcaacggccaggagcgccagctgcggggcctgaacgagaagctggagcagaccctgaccgaaaagcgggatgccgagcatttcctgcgggtccttgcccccaagtacaagagcgtgttcgttgtggatctgaagaccgaccgtatgcgcggcgtgatcgtcccggactatttccagaaaattctggacacctccggcggctctttcctcgccgttctgcagcagtaccgtgatacgcaggtgcagcccgcctaccgcgagagtctggcggacctgctggactacaactatatccgcagcaaggtcctgaccggcgacatcgtggagcacacctataaaaagaccgacgacaccaccttccgcgtcaaggtgacaccctactccaggagtggctctcatatcgatgaaacgctctggatcttctcggatgaaggggcatcccttacccctccccagacaaaacaagtgattaaacgttaaaaaaatcggaaacgactgcggtcgtttccgatttttgtttttacagagaagttgtgccgggcagcagcatttgccaatttcgaccccctccccgtgaaaaagaactccagaaaaatccgcgtttgcgcagcaatgaaagccccagtggggctttcaagcggcagaacggtcttgcttttagcaagatggcggggcctcgccccgacacgttccgcagatttttctggagttcaaaataaaaataataattccactgattatggccagagcgcacgcggaggccattctaaatggtcaagatggtcaggcccacagattttccgggtactggccctctgccgttttgcgggcgatggcttccaccaccagcggcttatcctcacggtaggtaacgccgtaccatttatccgtgctgcgcaacacctgaatttttgctttgccctcttcgatcagctccgtgaccaccagcggcaggaaatactcacacttgagcgggtttttaggcagattttcggtcagccagcccgcaaagcgctgctcggcttcgtccagaaagcttttgccaaagccccacaggttcatgctcactggggtatcgccgggcagatcggtccagcttgcgccgccgtcctcggtgaagtgtacgccgttttcgtacgtttcaatgcgggtgcgttcggtcacactgtgcagggtgccgtcgggttcggtcacgcacacgccgcgggccacgctgccgttctcggagacagtgttccggagcagatagcttaccatgcagtagtcgtaatagctgccgtcctcgtgggtggacaggtaatcatacatcacccggaaggcctctgggccgtaataatcatcggcattgatgactgcaaaagggccgtcgatgaggtcctttgcagccagaacggcgtggcaggtgccccagggcttgacacggccctccggcacggcaaagcctgcgggcagctcatccagctgctggaaggcgtatttcacgttcatggccttggacacccgctcgccgatggctgccttgaaagcatcctcgatctcatgcttgataacaaagatcaccgtctcaaagcctgcgcggcgggcatcgtaaagggaataatccacgatcacctgaccgttcggccccaccgggtcgatctgcttcatgccgccgtagcggctgcccatgccagccgccatgaccaccagtaccggtttgttcatataaggttcctcccgtatctgagccgcagccgcggcagaatatttattgtctcattatactccattttggacagaaaaacaatttgaaatggctccgcctcgctctgccatttttcaatcgtcccttcgttccgcaagttaaaatttccaaaatatgcaatttattcttgcaaaagtattgtttttgccatgtgaatattgtataatggcggcatcaatgcaggttttacctgtcaaaaagcgtcctttagtgaaagcaaagctttccaatacgatcaagaaagaggtattttatcatgaatgaagccattaccaagcgctttctgctgtatttccgcctgatgctgctggtgtggatcctgatcgccaatgccatcatccatgtgaccggtctggagtacagctggctgatctttctgagcaatatcatgatgttcacgctggaaggcgatgtgaaggatcgcttcgtcaccgttgagctgggtggtcttgtgggcctgatcctcaccgtgatcgctctgctttccatcacggccctgaccccggtgctgggcggcttcttcggctttctcatcccgctggccgtggtgctgttcatcctcatcatcctgcacccctacgcacccaaggtgctgaacaacgtgggctttgcctacctgaccgtggcctgcatcgacaccaccgctctggccacccacctgccccagttcttcatcaccttcatcgtgggttcggtcctcttcaatggcgtgtgcgtgctgctgatgaagcccgctaaggctctggccgtcaagagcgtccagaaggaaaacgtgtaactctctttacggagtatataacataagcgaaggccccgttccgatcggaacagggccttcccgtttatgtgttgttatttgccgaaaattgcacactgtcgatttttgtgctatactggtcgcgctgcccttcccattctggcatcagaagggggtgaggaccgatgaactcaattttagtcaactttctcgtggctgtcgcagcgcaggtaacggcaaactatctgtgcaagtggcttgatagtcaccgcaagggcaagtaagcacaagaacccccttggagcggcaactccgagggggttcacttttgtgtgagaccgatgcaatactcaatctctatcaactttctctacccttattatatgcatccctgcaaaaaagtcaaggcggcggtatttttttcagtttgcggcatccatacggatccttacattcgttgttgccatgcaaaaaaagcgccgctctcccctgccgggaaagcggcgctttgtgttttgcagtgtctgcttacaggctgcggttgcggatctcggcagtcacctttgcgatgaacgcatccagctccatcgtggtggtctcgcccttgcggtcacgcaccgagatgttgcctgcctcggcttccttggcacccagaaccagcatataaggcacacggtccacctgctgtgcctcgcggatcttgtagccgatcttctggttgtcgtcgtccagcacaacacggacaccggcttccaccagcttttcggtcacgccctcggcgtagtccagcgtcttttcggagacgggcagcaccttgacctgcgtgggagccagccaggtggggaacttgcccttggtctcttcgatcaggtaagccatgaagcggtccagagagcccaggatggcgcggtgcagcaccacaggggtcttttcggtgccgtccttgtccacgtaggtcaggtggaactttgcgggcaggcagaagtccagctggcaggtggacagggtgtactcggcacccacggcgggcttgacgttcacgtccagcttggggccgtagaaggcagcctcgccgatctcctcggtgaagtggatgcccagctcggtcagcacttcgcgcagggcctgctctgcatggttccacatggcatcatcgtcgtggtacttcttcttatcggcaggatcacgcaggctcagcacgcagcggtaatcggtaatgttgaagtccttgtacacctcaaagatcaggtcgcacacgtttgcgacctcgctcttgatctgctccggggtgcagaacaggtgagcatcgttctggcagaagtgacggccgcgctcgatgcccttcagggtgccggaggactcgtaacggaaatcgtgggcgatctcaccgatgcgcataggcaggtcacggtaagaatggggacgatttgcgtagatcatcatgtggtgggggcagttcatcgggcgcagaacatagctctcgccctccatctccatggcggggaacatgttctcacggtagtgatcccagtgaccggaggtcttatacaggttcacagtgccgatgcagggagtcataacgtgcaggtagccgcgtgcacgctccttctccttgatatagttctccagctcctgccagacagtgtagcctgcgggcaggaacatgggcaggccgcggccaaccagatcgtcggtcatgaacaggcccatttccttgccgatcttgcggtgatcgcgctcacgggcctcctgctgctccttctcccatgcatccagctcttcctgattgtggaaggccacgccgttgatgcgggtgagcatcttgttttccttgtcgttcttccagtatgcgccggactgctgggtgatcttgaaggccttcagcgccttggtgtaggtcaggtggggtccgatgcacatatccacgtactcgccctgctggaagaagctgaactcggtctcatcggccagatcagccatgtgctcgatcttgtagttttccttgcgctcttccatcagcttcacggcctcggcgcggggcaggatgaagggcttgatgggcaaattctccttgacgatcttgcgcatctctttttcgatgtttgccagatcctcgtcgctgagcttctggtcgcccagatcgacatcgtagtagaagccgttctcggtagcggggccgaaggcgaaatcagcctgcggatacaggcgcttgatggcctgcgccatgatgtgggctgcggtgtggcggataacgtgcagttcctgatcctgcgggcactcgtccacatgaccgtccttatagatgatcttcataatgtttgctcctttgacagataaagtaaaacaaaaaagcgcttcatcccgcacacttactcacgggatgaagcgcctgaaaaaatcagaaacgttccacggttccacccgaattgcgtgcttttctgcacgccactcgctgtgctgtaacgggcgcacccggcagaggttctcctctgcgctctgcggtggtagagctccggcacatgacaggctgcttgcagcgcccttgcggggcagccctctctgggtcatggagaaacaggaactcagtttgtccgcatcatcgcttttacaggatgaaactacgctgattgtagcacgtcccgccgaaaaaatcaagagacgcagccatgaaattttttcttcatttttcttccttcggctgcaggaattccgaaaaaagcttgctggtgcggaacccctgactggaatacaggctgtgatagccggagaacatatagctcaggccgcaggccagcgccatcagctcaaacccggccccgctgaacagctcagccgccagtacaatggaagccaccagcgtattggtcgccccgcagaacacgcacaccagacccactgcagcagaaaagcccgccgggagccccagcagcggccccaccacgcagccaaacgttgcgccgatgtaaaaactcggcaccacttcgccgcccttgaagcccacgctcagggtcagcaccgtaagcaccattttgcacacaaagtcccacggcagagcctgctccagctcaacggcatccataatgacatccatgccggcaccgttatagcggcccacacccatcaggtaggacagcgccaccacagccgcaccgcctgcagcagcccgcacccacggattcggcagcagtttggggatctcatgctcaaaaaagtgcagcatctggcagaaaatcaccgccaccaccgcgcagcacatggccagcacggcggtgcgcaccaccgtccgggcatccagcggcggcgcttccatcacaaaccgtgtgggcgcaatgccggccttcagcgagatgctgtatgcaataagcgccgccagaaagcccggcacgaaggccacggtcagcatcaggcccacatccaccaccatcatcgcaaacagggtcgcggtcagcggtgtaccgaacagcgccgaaaaaaatgccgccatgccgcacacggtagccgtgcggcagtcatgattgttgaagtgcagcacccggccgatattccagccgatgctgccgcccatctgcagcgctgcgccctcgcggccggccgagccgccgcacagatgggtgagcacagtgcccagaaagatggccgggaccagccacggcgtcaccgagctgccgtcctgcacggcccgcagcacatcgttggtgcccttgccgacacagcccgtcgccttatacagagccgtgatggcgatgcccgccgcaggcagaagccatagcagccagacatgctccgtgcgctgctcggtcacccattccactgccagatggaacagcgttccgatgccgccgcacagcacgccggtgcacacagccagaagcgtccaccggaacagcgccagaagcgagacccggatcgcttccttataatgcaggaaccattcctttattttccacatgtttcttccccgcacctctcttattttcgatctgattttgtctatatgcgccaaaacataacatgtttttctatcaatgtcaaccaaagaacggcaaaggatattatacaacttttacatacccggtaaaacaaatgtcaaaagccccgcttctttgtgcgcagaagcggggcttttgagtcggatcagaaaaaaggaaaaaggagaacaaagggagtttgtcggggcgaggcccctccatctgctttcgcagaccgtttggccgctcgaaagctccactggagctttcgttgctgacgcaaacacgtatatcacgccgctgtacagaggccggtgtcgtgccggtgcacctgcaccgcagcgggacagctgttagaattttggagctttactccacatcctgcagggcggcaaagtcctcttcgccggtgcggatcttgaccacgcgggtcacattgtaaacaaagatcttgccgtcgccgatgtgtccggtgtacagtgccttcttggcagcctccaccacagcgtccacgctgatcttggagacgatcacctccaccttgatcttgggcagcagggtggtatccacggggacgccgcggtacttctcggaagtgcccttctggatgccgcagcccatcacctgcgtgaccgtcatgccggtaacgcccagatcgttgagggcagtcttgagctgatcgaacttggaaagctttgcaatgatggacaccttgtgcataccggtgtcgtacacgccatcgtggatcacgggcgaaggctcgcgcaccacaggaacggcagcgctgatctgcttgtcggtggccttggtcacatcgtcctcgccgaggtcggtgttctcgttgggcaccatggcagcagagtttgcatcggagatggagaaaccagcgtaagcggatgccagaccatgctcgtggatatccagaccgtcgatctccacctctgcgggaacgcgcaggccgatgaacttatcgatgagcttgaagataatgaacatcacaacgacaacatagatgtcaacggtcacgaggcccagcagctgggtgcccagctgtgccagaccgccgccgtagaagagaccggcgtgctcggtgttggcaccggtggagaacagacccaccgcaatggtgccccatacgccgtttgcaaagtggacggaaactgcaccaacagggtcatccaccttggcgatgttatcgaagaactcaacgctcagcacaacgaggaagccggccacaaagccgatgaagaatgcgccgaagggagaaacggtatcgcagcctgcagtgatcgccaccagaccggccagagaaccgttcagggtcatggagacatcgggcttgccgtagcgcagccatgtaaaaatcatggtcacacaggtggcaacggctgcggcaaggttggtgttgaagcagaccagaccggtcatggtcatggcctcgtcggtggcaaggctcagagaagaaccgccgttgaagccgaaccagcagaaccacaggatgaacacgcccagagcaccggcggtcaggttgtggccgggaatggcgtgaggcttgccgttcttgtcgtacttgccgatgcgggggcccagcatccatgcgcccagcagagcgatgacaccgcccacattgtggactgctgcagagcctgcaaagtcatggaagcccatgctctgcagccagccgccgccccacatccagtggccgcagatggggtagaccaccagcgagatcgcagcagaataaacgcagtaagccttgaagttggtgcgctcggccatggagccggaaacgatggtggcagccgttgcgcagaacacggtctggaacacgatgtagacccacagcgggatatccagacccagatggctgtaatcgccctgaatgaacgggtcgaagccgccgatcagtgcgccggtgccgccgaacatcaggccaaagccgatgatccagtagcacggggtgccgatgcagaagtccatcatattcttcatcagaatattaccggtgttcttggcacgggtgaaaccggcttcgcacaaggcgaagcccgcctgcatgaagtagacaaggaacgctgcaaccagcgtccaacaggtgttgacggagctgaacataactttccatacctcccacgaatgtgatgccgcaaggccaccagaaccttttggcgtgtgcggtgttccccgtgccgatcgcacgcaggaacgcttcatttgcactcaggagaccctctatcttcccccgagcggcaatatccccgaaaacacaaaaggcgctggcggaatctcttccgtcagcgcctttgctttcgatggcaagagtatagtccctttgtgcaaaagtgtcaagggctcatgtcaaggttttacgtttttcacaacgcaaagaaagttatcacggcaaaagtttggcaaaactctgttttcagctgcgcactagtcattcttttccgcttctgtgtcgttttccgcttttttgcggccggagcggtgtccgccctgcatttcccagtgcagcatcaagctcatcatggcgcgcagcgcaaaggtggcagccagcggcaccaccgactccagattctgcaaaaggaaggtctttgcaatctccgccgacatcaggaattccagcgccgtggtcaggccgctgctcatctcgtggtggaaatcatggtggtcatggaagaaggtcgcccgcacatagtggtaggtggccttgataagactggtgacgatgataaacagaccaatcacttcggcaaggcccgcgatcatgggcactgcggtctccagaaagccttccagtccatgggtaatgcctgcgttcagatgataaagccagcccatagcagcatcctcttacagcagcgtcttgacgtatgctgccagctcctcgtccttgcaggaggcgaagaacagctcgctgaactttgcaccggccacagcgcccttcagcaggtcctgatcgatgctcttcaggcactcgatcagcggcttgaaggtagcggcacgcacgccgtccaggatcttcttgttgcgctgctcaggctccacgcgctccttggggtagccctgaccgtggccgaagccgaacagtttctcgaagcagtactcaaggttcagctcaccgccccagccgaagcccttggcaaacggcatggcaacggcgttgccgtcgttcacgtgggcaaaggtgtaggcatccacagggtcctccacatggccgcagatcacgccggggaagctgttcagtgccagcatggcaccctcgccggtgccgcagccggtgatgacgtaatcggctgcgccgctgttcagcaggatggcagccagaatgccgcactgcacataggtcagctgggcagcatcgtcggcagcgtacatgccgtagttgaccacctcgtggcccatgggctccaccacctttttcagggcggcttcaatgatgccgttcttggcagcctgactgttctcgttgatgagtgcaatcttcatagtagtttcttctccttttatgatcttctcctgcaggtgcaggtgttatacaaagtcctcgcgcatgggggtaaagaagtccagcatcacgccgccttccagacacacacagccgtgcatcacgccgtcctgcttgagcagggtgtcgccggggcccacctcgcgggtctcgtcgccgatggtaaagcggtagcggccggagacgatgtaggtgacctgcgtgtgcgggtggcagtgcatggcacccacaccgccggtctcaaaggtattttccacgcacatggcatccttgctgtaggccagaatgcggcgctttacgcccttgccgcacacctccggctcgatctcggcatggggcacccatactgcgtctttatgctgtttttccattataacacaacatcctttcccatacaaacacaaaaagcggcagccagcaggcaaagcctgcccggctgccgccgtgctcagtcctttgggatatcctcagccattactggggctgcttgccgatgtaagccagaatgccgccatcgacgtacaggatcaggccattgacaaagtcagaagcctcggatgccaggaagacagcaggtccgcccagatcctctgcctcgccccagcggcctgcgggggttttggcaacgatgaactggtcgaagggatgacggctgccgtcgggctggatctcgcgcagaggtgcggtctgcggggtagcgatgtagccgggtccaatgccgttgcactggatgttgtatgcgccgtactcagaagcgatgttcttggtgagcatcttcaggccgcccttggctgcagcgtaggcggagacggtctcacggcccagctcactcatcatggagcagatgttgatgatcttgccgccgccctgtgcgatcatgtcggggatgatggcctttgccacgatgaagggagcgttcaggtcaacatcgatgacctgacggaactgagcagcgctcatttcggtcatggggatgcgcttgatgataccggcgttgttgaccagaatgttgatgtggccaacttcctcggtgatctttgccaccatggcgttgacggcgtcctcatcggtcacgtcgcagacgtagccgtgagccttgatgcctgcttctgtgtaagcagcgatgcccttatccaccagctcctgcttgatgtcgttgaacacgatggttgcaccattggctgccattgcctttgcaatagccatgccgatgccataagatgcgccggtgatcagcgcgaccttgccggtcagatcaaaagatttgggagtgcactgtgccataatagagtcctccaatcaaattgttcctttgcggggaagccccgtttttgctctgcaggacgctcagaaagccgaactctcgatttcagcatccttcttgtatacagggtaacattctttttgggctctgtcaaggcattttcttctgcatttttgctgtatttttaattttccgggaaattttttcgtgaaaagtcgtgcaaagctgcaaaagcccgggtttttcttgtatacacggtttcagccattagcggtgcgcacaatttcggcggaaaaatttgggcttgttgacaagagccatattgagccatccagaatatcatcccagcttctttttctgctgccgtgccacaatgggcatcagcagggaggcaggcagcagcttctgcgccgtggtgcatgcccgcataaaggccgagggcacaatgatgatcctgcggtgcatcatgccgtgcatggcttcctgtacgcagaactccggcgtgatgcccttgagggcaaacaccacccccgcccggtcgttgaactcggtatccaccggccccgggcagagcgcacacacgtagaccgggctgtgcagctcctgcagctcccgggcaacgccccgggtcaggctgaccacataggccttgctggcatagtagcccgccatatagggcccgccgggcagcagccccgccgaggacgccacgttcaggatggtgccgccgcctgccgcgtgcatcctgcgcaccgcaaagcggaacagccgcgccatggcttccacattcacccggatcatttcctcttcccgggcgtcgtcggtctccagatagctgccgcacacgccaaagcccgcgttgttgataaagatatcaatggtctccccctccagctccttgaaaaggcgctggcagtcctcttcctttgcaagatcggcaggcaggatgcggcagggcgtgcccagttttgcggccagcgcttccagccggtcggtgcggcgggcggtcaggatgagccggcagcccagctttgcatagcggcgtgcaaactcctgcccgatgccggagcttgcgccagtgatccagatggtcttttgcatggtgattttcctttttcctctcgcccccaaagcgggggttttctgtacttattgcccctattttaacacagtttgaccgcattttctatgcaattttcgtaaactataaaaagagtgtccggaacacctgcggcatcccggacactctcatagattttatttcaacaggttgtcgttgtcgaagtaatcgatgcgcatggacttgcgcacctcggccagcgtggcggcggcagtcttttccgcgtaggcgctgccctctttcaggatctccaccacctcgggcaggcgctgctcccactctttgcggcgggtgcggatgggctccagctcggcctgcatgacgctgttcaggaactttttcaccttcacgtcgcccagaccgccgcgctggtagtgctcctttacctcgtcgaggttctggtattccggccagaactcggcaaagtgctccgggcggcagaaggcatccagataaatgaacaccgggttgccctccaccttaccggggtcctgcacccgcaggtggttggggtcggtgtacatggacatgaccttctttttgatgtcctccggttcctcggagaggtagatgcagttgccgaggctcttgctcatcttggccttgccgtcggtgccgggcaggcgcaggcaggcggcgttctggggcagcacgatctccggctcggtcagggtatcgccgtaaacggcgttgaatttgcgcacgatctcgcagcactgctcgatcatgggcttctggtcctcaccggcaggcacggtggtggcgtggaaggcggtgatgtccgcagcctgactgatggggtagcagaagaagcccaccgggatgctggtctcaaagttgcgcatatggatctcgctcttgacggtggggttgcgctgcaggcggctcacggtgacgaggttcatatagtagaagctcagctcagtcaattccggcaccatggactggatgaaaatatgggtcttggcggggtcgatgccgcaggccagataatccagtgccacctgcaggatgttctggcgcaccttttccgggttgtcggcgttatcggtcagggcctgtgcatcggcgatcataacgtagatctcatcgtactcgccggagttctgcaggcgcacccgctccttcagggaaccgacatagtggcccacatgcaggcggccggtgggacggtcgccggtcagaatgatttttttcatgatgttctcctttattttgccggaaggcggctcgccctctccgtctttgctccgcaaatccaccttattccccttctggcacttcgtgccacctcccccggccgggggagtctgtcaaagggagaggccttggcaatgcggaaaactttccggttttaccaagggctcccctttgaggaaagacttcccccgctccgggggaagatgtcgcgcagcgacaaaagggggaatctggcgcgaatgcgcctgagagggcgaggatgctgcccttaaaagcatccgcccaccaacaaattttcaattctaaaacatgctttaagtatatcccgcctcgcattttctgtcaacaaaagcggccggagaaaaagaaaaaagcgatggaaaacttccatcgctttgctggcgcctcttgcctgactcgaacaggcgacaccctgattaacagtcaggtgctctaaccgactgagctaaagaggcatctatataaaacggcacatgaccgttttactactataaaatggtgacccgtaccggaatcgaaccgatgttaaaggcgtgagaggcctctgtcttaaccgcttgaccaacgggccatacgtccattttgcatcgggtgttcgctcccgacttggctattctagcatagcacgcctgctttgtcaacacaaaaattcaattttttcaaaaaatcttccgcactcgggccgcgccggtgtggaacaggcccagcgccagccccagatatacgccgatcaccgtatcgttctggtcaaattccatctgctggcgctgcggcaggccggccagtgtacccttgtatacgcaccgcagctcttccagccgggtgtagtcgttcgggtgcatcagggtgctgtgcttgggcagctccatggcaccgctcttttccagcacctcgctgacgaactgggagcagaaatagtgccggcggcgcttccagcggatatgcatcccgcagagcgcaagaccgataacgttgaactggtaaaggctgccgtgggccatcatgtgctcggcacggcggcgggcacgggtgtaggcttcatcgctcacatccagcgcatacagtgcgcagggcacgttctcccgcagacggaacacaccccggttcaggtattccctgctgggccctgccgggaacatggtatagccgtttttgcgggtagagctgtacaggcagctcaggtcttcgtcaaaagccagcgaagcgtgggtataatttgcaccggtaacagcgtaaacaaggtttgaaagcagggtacccgaccgggtgagcaggatgtagatggtcttcatgatctttttcctttttatatgtagcacacagaaaaagcggggctgtccttttgtcagatacagtataccacaggcaaagcttctttgtcataaaaatcgtcaaaatctcgtaaattttgcacaaatcgggctgtggatcctgttccgttcttccctgccgcgccgttttgcgggaagggccgtttttgtgctcggtttttcatgcatcccagctcgtcaaaattttatcaaaaaattgttttcccgccgttccaccttattttttcaggtcttgccccctgcttttgtttcctgaaattgtttcaggcagttaaatttcttaatgaaatttgtttcttttctgcaaatagcacgattcgtttattgatttcgggatacttttatgtataatggtatacaggagaatttgcatttacaaactgcaagccttctgcgcagcgcccggcccgccgggaaacgctgtgccctatacaggacgtatggatcaaacgaaagtagaggtatagcgaatatggcaaagttggatcttaccaagtatggcattaccggcacgactgagatcgtgtacaacccctcctacgagcagctgttcgaggaagagaccaagcccggtctggaaggctacgaaaagggccaggtcagcgagctgggtgctgtgaacgttatgaccggcatctacaccggccgttctcccaaggacaagttcatcgttatggacgagaactccaaggacaccgtgtggtggacttccgacgagtacaagaacgacaaccaccccgcttctcaggaagcatgggctgctgtgaaggccatcgctcagaaggagctgtccaacaagcgcctgtacgtggtggatgcattctgcggtgccaacaaggatacccgcatggccatccgctttgtcatggaagttgcatggcaggcacactttgtcaccaacatgttcatcaagcccaccgctgaggagctggagaactttgagcccgatttcgttgtctacaacgcatccaaggccaaggttgagaactacaaggagctgggcctgaactctgagactgctgttgtgttcaacatcaccagcaaggagcaggtcatcgtgaacacctggtacggcggcgagatgaagaagggcatgttctccatgatgaactacttcctgccgctgaagggcatggcttccatgcactgctctgccaacaccgacctgaacggcgagaacaccgccatcttcttcggtctgtccggcaccggcaagaccaccctgtccaccgatcccaagcgtctgctgatcggcgatgacgagcacggctgggacgacaacggcgtgttcaacttcgagggcggctgctacgcaaaggtcatcaacctggataaggactccgagcccgatatctacaacgccatcaagcgcaacgctctgctggagaacgtcactctggatgccgagggccacatcgatttcgccgataagagcgttaccgagaacacccgtgtgtcctaccccatcaaccacatcaagaacatcgtccgccccatttcttctgcacccgctgcaaagaacgtcatcttcctgtctgctgacgcattcggcgttctgcccccggtctccatcctgagccccgagcagacccagtactacttcctgtccggcttcactgcaaagctggcaggcaccgagcgcggcatcaccgagcccacccccaccttctccgcatgcttcggtcaggccttcctggagctgcaccccaccaagtatgctgaggagctggtcaagaagatgcagaagagcggcgccaaggcttatctggtcaacaccggctggaacggcaccggcaagcgcatctccatcaaggatacccgtggcatcatcgatgccatcctgaacggcgacatcaacaatgtgcccaccaagaagatcccctacttcgacttcgaggttcccaccgtgctgaacggcgtggacaccggcattctggatcctcgcgacacctacgctgacgcttcccagtgggaagagaaggccaaggatctggcaagccgcttcatcaagaacttcaagaagtacgagggcaacgagcacggcaaggctctggtctctgccggcccccagctgtaagctgatctctgcctgatactgaagcgataaaaaaggacgtgttcccgcaagggagcacgtcctttttgttttgcagaccggcaggtaaacgttccgtcggttgtgttttccacatttctgtgttatcctgtggaaaaggatgtgagcagaatggatgcaaaagaatttggtgcattccttgcacaagtgcgccgggagcggaacatgacgcaggccgaactggctcagcagcttcacgttacggataaagccgtcagccgctgggaacgcggcatcgggctgccagacatcaacacgctggagccgctggccgatgtgctgggcctgaccctcgctgacctgatgcactgtcatgactcccgtcaaaaagatgacactcctcccgttcctctggaagattttttcaccatgctgcgccgccagcacactgtagactggcattctgtgcgtactgctcttcttgcattaagcattgcacttgccctgtggggaatttttgcctgtccaggcagattagctgtgcactggcggactctcagcgatggttcgcttcaggccgacggctggatgtcctccctggtcatttttccattgtttgccggatttgaatttctatctcttgagctctggaacaattttgagcaaaccggttactaccggcgctggggtgaggtgaatctttttatcattcacgccatgtctttcggcacgccgcttacccgtctgatgcggctcgtgctggattttctgttctttttctgttttggatttctgcttccatgctgcgaagcatggctgattcttttgaattaaatgccgctttcctctgcgtccccacccgtgaaaaagcaaaccggcaaagcccgcaggctttgccggtttgcactatctaaaaatatttttccgatattgatgcccagagcgcagcggagggcattttaaatcgtttttacttggcagcgtcgaactctgcctcgatctctgccgagggtgccggggtgacaaggctcaccacaacacagaccaccagagagatcaggaaggcaggcagcagctcgtagatgccaaacacgccgcccagcgggctgatgatgtacttccatacaaagaccatcaggccgccggagagcataccggccagtgcgccctgccagttgcagcgcttccagaacagggagcacagcaccactgcgccaaaggagccgccaaagccggcccatgcaaagctgacgatgccgaacacgctggagttggggtcgcgggccagcaccacgcccaccacgctgatgcagatgatggtcaggcgggcagcgaacaggctctgcttctcggtcagcttcatgtggccaaactcctgcaggatgttctgggatacgctggaggccgctgccagcatctgactgtcggcggtggacatggtagcggcaaggatgccggcaaggatcagacctgccagaatggctgccagcacgccgtgctgggcgatcaggctggccacgcgcacgatcagggtctcgctggaagagccgctcaggaactccagcgcgcccgccttggtcatgcccaggcccaccatgccgatgacgatggaagcggtcatggcaatgaccacccacacgcttgcaatgcggcggctgagcaccagcttcttttcgtcctcaatggccatgaaacgcagcaggatgtggggcatgccgaagtagcccagaccccatgccagcgtggacgcgatgtccagcagactgtaggaggtagcggagttgtcggctacattgtggcttgcagccatggtcaggtagccgggcaggctgcgggcgttgtccagaaccacgtcccagccgcctgccacgctgacaccatacaccagcactgcgatcagcgccatgctcatgacaacggactggatcaggtcggtggtagacacagcgcggaagccgcccatgatggtgtagcccacaatgaccacagcggacaggaccatggccgccatgtaatccacgccaaacaggctgttgaacagcttgccgcaggcggcaaagccggaagcggtgtacgggatgaagaacacgatgataatgaccgcgcccagcgcgttgagcaggttgcgctggtcatggaaccgcagggaaaggaactgcggcaccgtgatggcatccagattggccgagtagcggcgcaggcggcgggccacgatgagccagttgagccatgtgcccacagcaaggccgatggccgtccagcccggcgacgcgatgccggtgagatatgcaaggcccggcatacccatcagcagccagctggacatatcgctggcttcggcgctcatagccgtgaccagcgggcccatcgtgcggccgccgaggtagaaatcgctgctgtcctcgttggatttgctgtagacaaagccaaccagcagcattcccaccagatagatcacaatggtggcaatgatgcagatattgatcatttgattacccctctctttcttcccctcaacgggaacatatcttaaatattaccacaaaaacctgcattcctgcaagcttttcgggcaattcaagagcacaaactgctgtttttccgggttttgaacagaaaaagcagcatttctggtgcaaaatccatcagaaacactgccgtcgtaaattgatatccgcagcccggcgtaaagccgtatccgtattgaaccaaaaaagcaccccctgccatggccttgtaagggtcagcagcgggtgctctttttggtttatgtctgtacaaagaaatccgggaaccgttccaatatcttctggaaattctcgcggtacatgccaaggtgatgctcaaacagggcttctacgtccacgtccagcggcaggccgtcccgcagatagccaaagatctgctcgtgctctttctgcaccgaggcaatatttccccggcaaagggccgagtccagataccgcacacggtccatatgggaagtaacgttgtgcatagcctcccagatgcggtcgtagccggaatcgtggtacaaaagcctgtggaagtcgttatccagcgagatgaagaagtcatctgctgcatcctgatccagataaaggtcttcgttctgccggttcagcagttcctgaaattcgttcagctgttcccttttcagctttccggccagcccgcgcagcagcgccggttccagaatgcggcgcatggcaaagccttcgttcaggtatggaacgctgatcttggacacaatgctgccgcgctgcggcagaacatccacaagccactcgcttttcagcatcatcagcgcttcgtgtaccggtgtgcggctcatggccagctgttcgcacagttcggcctcgctcagctgacaacccggctgcagctgcaaggtcataatatttttgcgcagcatacggtaggcgtaagcccggttattttcgtccattctgcgcacgtccagcagcagcggcaatgcgctggccttttcttctctcatagcagtttccttttttgcttgccgtaattttaccgcagggcgcaccgccccgcagacatctgaaatcattcttattataaagcatcccgcggcacatgtcaaaaagaaaaagcaccaagcattgctgcttcgtgcttttttgtggtgcgcctcgcgcactcctatccggacggtgcgccgctggtggccatcaccggccaagtgggcaccgaccggatgcacatcccggtggtgaatgccatgatggcaaagggcatcatccccatggatgacaagtacagcctgtggaccatcggcatcccccagaaggactatgtgaaccagctgttcgaccgtcccgatccatattctgtacttttttatttgttctttgtcgtttttatttttaataagtatcacttctgccattattctgcaataaactttccaaaatcaagtccagaacactacactgtcacgcccagttcatccggccgtagcgggtggtcagctggcagatctccttttgaagcttctttgtcagctgagtctttttcagccgccagcgccagttttggcccacggtggagggcttgttgatgcgggcagagttgtccagccccagccagtcctgcatgggaacgatgcaggccgccgctgcgctgcgcaggatcagtgcgatcatgctcttatagagctgctcctccggggtggcgtagtcgtacagatagtcccgcaccatggcgcgctcggcatcggtgacagtctgataccacgataccagcgtctcgttgtcgtgggtgccggtataggccacgctgttcaccgggtagttgtggggcagatagtcgctggcactgccggtgtcgcgggagtcaaaggcaaattccagcaccttcatgccggggaagccgctgtcccgcaccagctgacggaccgtctcgctcatataaccaagatcctccgcaatgatctcccgcttgcccaatgcctgctccacggcacggaacagctcgatcaaccacatcgagaaccccaacctgctggccaccaagatcatcgtgccgcataagctcatccaacgggagagctgctgcccgccgccggaggtctgatgtgcaaaaaacgaggccgttccctctcatttccagagaggcagaacggcctcgttttgcttattttttccggtactcccggggtgtcatgccgaagtgcgccttgaacgcccggttaaaataggagaggttctcaaacccgcaccgggaagcgatggtcagaaccgtctcatccgtggcctgcagcgcttcggcggcggcgttgagccggaactcgttcagaaaggccacaaagctctgcccggtcatctgccggaaccaccgcatgaagtggctggcactgaaggagcagaccccggcggcatcggcgacccggagttcctcggtataatgggccgagagccattgcaggagcgttttcagccgctgggtgtcggctgtctcggcggcaagccgctgccggccctgtgcaaggagcagggcaagaaaccgcagcaatgcccccttgacctgcagctcgtagccggggagcttggcgcggttggcatcctccacctcccgcaggcaggcggcggcctgcagatagcacaaatcgttcggggtcagccgcgcaggcagcgacaagcgcccgctttgcagcggaagcagatatttctcggcacaaaggtcctctgcgccgcccagaagctccagctcaaaaatgatgttttcgtattccatgcactgcccttcggcctgccgcagggcatggagggtgccgggcgtaaaaataaagatgtcccccatgcgggccgggcagctctcagcgcccacctgcaccagtcctgtgccccgcttgacaaaaaccagctccatgctctcctgccagtggagcgccacctgcggaaagtcccccggaatggtgcagggatacagattgaagggaaaccgcacggcaccatgctgcttggtctcctgcaaagatgcctgattttgcattgtttcacctcccgatgataggattgtaccacagtctgcgctttttaggcaagattttgattgttttatgtggtatatctggaagtacagatgtcaaacctgttttccgcaaggtgtatttgaaaacaaagaaaatgacgaatatttcgcaagcacaaacgggatccaaggctgtttcacgcaagatccggctgtgcttgtaaaaatagactaaattttcgacttttcagatacaccctaacaaaggaggatgcatttatgagctttaccgaaacgttacagggtctcacgggcaagccgctggcagactgcacgaatcaggagctgtatctcgcgctgctggaactcgtccggcagaagagcgccgaccgtgtgcagccggtcaccggccgcaagctgtactatatcagcgccgaatttctcatcggcaagctgctgtccaacaacctcatcaatctgggactgtacgatgaagcccgcgatgcactggctgccgtcggcaagagcctttccgatatcgaagaggtggagccggaaccttctctgggcaacggcggtctgggccgtctggctgcctgcttcctcgactctctggcaacgctgaacctgcccggcgacggcgtgggcctgcggtatcacttcggcctgttccaccagtcctttgaggacggcgtgcagaacgaaaagcccgacccgtggctcaccgcccacagctgggcggaaaagaccgacatcacctacccggtggagctggcgggcaaggaatacactgcccggctgtacaagctggccgttaccggctacgagggccgcaccaacaccctgaacctgtttgaccttgacaccatcgatgaaagcatcgtccatgacggcattgccttcgataaaactgccatcgacaagaacctgaccctcttcctctacccggacgattccgatgaggcaggccgccgcctgcgggtgtaccagcagtacctgatggtctctgccggtgcccagctcattctggccgagtgtgccgcccggggctgcgattaccatgatctggccgactacgccgccatccagatcaacgacacccaccccagcatggtcatcccggagctgatccgactgctgggcgaaaagggcatcgaatttgaggaagccgtaaagatcgtcacaaagacctgcgcctacaccaaccacaccattctggccgaagcgctggaaaagtggccccgcgcctatctggatgccgtggtgccccagctgatgcccattatcgaaaagttggacgcactggcccgcacccgcaccaaggatgagagccttgccatcatcgacaaggacgaccgggtgcacatggcccacatggacatccacttcacccactccaccaacggcgtggcagcgctgcacaccgagattttgaaaaattccgagctgcacggcttttacgagctgtatccggaaaagttcaacaataagaccaacggcatcaccttccgccgctggctgctggaatgcgacccccgcctgaccgccgcactggaacagcacatcggctccggcttccgtaaggatgccaccgagctggaaaagctgctggcttttgctgacgacgaagctgtactggagcagctgaccgctgtgaaaaaggccaacaaggaagcactggcagactggctgctgcgcacccagaaggtgagtgtgaacaccgatgctgtgttcgatatccagtccaagcgcctgcacgagtacaagcgccagcagctgaacctgctgtacctcatccatcagtactacgagatcaaggccgggcacctgcccgctgctccgctggtgagcatcttcggtgccaaggccgcacctgcctacaccattgcaaaggacatcatccatgcgctgctgaccttgtccaaggtcattgccgcagacccggaagtgtccaagtggctgcaggtggtgttcgtggagaactacaacgttaccgccgccgaaaagctgatccccgcctgtgacctgtccgagcagatcagccttgcctccaaggaagcttccggcaccggcaacatgaagttcatgctgaacggcgcgctgacactgggcaccatggacggtgccaatgtggagatcagccagcaggtgggcgaggagaacatctatatcttcggccagacctccgatcaggtcatccaccgctatgccgtgggcgactacgaccccgcccagtgggtggagggcgatgtcaacatccgccgcgccatcaacttcctcaccggcccggagatgctggccgccggtcacgccgaaaacctgacccgcctgcacaacgagctgatccataaagactggttccagaccctgccggacttcaacgcctacgttgtgcgcaaggggcaggccctcagcgattacgcctgcgacccgaaaggctggcggcgcaagtgtctggtgaacattgccaaagcgggcatgttctcctccgaccgcaccattgccgagtacgaccgcgacatctggcatctgggcaaatagtttattatcgcaattttattgatcttctgccgcaggacgagatctatctaaccatgggcaccgcctacgatttgcggcatcaaagaagatttccaaaatctactgtacgcaaaatttctatcggcacaaactctatgctgccagaatttctgcgcgacccgcctggatgaggtggttgccgccatccggaagcacccctatttggagctgctctatgagccgggcgcagatgaacacaaataaaagacggggtgctgcacaaatgcacagcactccgtcttttacttattctgctttcccttccagtctgcttttatacccttcgccccatg

SEQ ID NO: 1237 - DNA, 699 bp, Unknown
  gut microbiota DNA sequence
attccacccggggcggcacttcagcgtagaccttccgggtcagcagcccgctttcctccatctgccgcagctgagcggtcagaaccttctgagttacatgaccgatggactttttcagctctccaaaacgctttgtgcccggcatcagatcccgaatggcaggacgcacacccggagtttcccagcatcgtctttcacggtctgcggcattccagtgcgacttatcagctgatgatctccggcggcgatgtgaaggccgttcagggaaccactggacacgctacggcagatatgctggtgaacacctacgcccatatccagcagtcctctcgtgttgaactggggaagaagttcgaggaagggttctatgccaaacaggaaagccccagcccgcaggctgtgcccgccgcagacgaaccgaccatttctatgaccgctctgctggaacttctgaagaatgcagaccccgaagtaaaggcgcagctccgtctggctctgctgacctgcaaaatttaccacgcatttcaaagtaattccagcccatgcagaggattcctatgaaaactccaaccgtgcaaaaaccgtgcattgaccgtacaagccccgatttttcggggttacataacaaaaaagaacgccaaatcttatgatttgacgttcaatatctggtgcacctcgcgcactcatatccgaactttt

SEQ ID NO: 1238 - DNA, 1246 bp, Unknown
  gut microbiota DNA sequence
acccaaaaccgtgtaaaacacttttctccatacatagcgcgttcactcgctgttctctcggaacagaaagaggaacgcgcttttttattttcgggctgaacttcccgaatccatcaaaggagggtttaccaatgaaaaaagttctgaccgtcacgatggacggtatccgctaccatgcttcccgcccggcagattgccggcactgcttcttctggaagaaccgaaagaagggctgcgttctcggcaaagagaactgctactatctgatcgagccgcccaaaggccccagcaagtgcgaagggtgcccctacaagcgggcaaagccctgtgtgctggttccctgctacaaagacctgatggcaccgctggagaaacgaggtgatgccaagtgagccacaagcgaaacgaagctctgcgccatgttcagcactccatgcaccatgtgatcgccgctggcgaaggttccgaccgtgccccggacagttgcaagctgtgcccgtactatcgacccgatttcaagttccgcacctgcctgtatgcccactgcccttataagaagcaggtcaatgtattccgttccacacctgaaaaatgggatattctctatgcccgaaaaaaagccgacaagaaccgcagaccttgattacttctatgggcagtccagcgagctgttctccttctaccggattcccaagctgttgtttcaggatagccgcttccaaccgctttccacagatgccaaaaccctgtacggtatcctgctggaccgcatgagcctttcagcccggaatggttggttggacaaagctgggcgggtgttcatcatctatactgtgcaggaggtgcaggattcactgggctgtgccgataaaaaggccaccaagctgctgcgagaactggaagagtacggcctgattgaacgcaaacggagggggctgggtaagcccgatctcatctatgtgaagaatttttcgtcagaatcgtcaaaactacgctttctgaatcgtgataatgacgattctggagtcgtccagaatacgcttcaagacccggccaaactacgatgtaataagactgagagaaataatacagagataagcgatactgatcctatctcttccgatgaaaacgactggatgagcgaacgtgaacaactggaggaatatttttctcaatctttggaggtagaccttctgctccggctttgcccggacgatgaggataccatctatcagatcatggattt

SEQ ID NO: 1239 - DNA, 60020 bp, Unknown
  gut microbiota DNA sequence
accaagaagcaggctcaggagtccatccgtgacgaggctctgcgctgcggcatgcactatgtcaatgctcgctggctgggcggtatgctgaccaacttccgcaccatccgcaagcgcatcgaccgtatggatcagctggctaagatgaaggagaacggcaccttcgagctgctgcccaagaaggaagttgccaagctggagctggagatggagaagctggacaagtacctgggcggtgtcaagaacatgaagaccctgccgaaggctatgttcatcgttgatcctcacaaggagcgcatcgctgttgctgaggcccgcaagctgaacatccccatcgtggctatcgttgataccaactgcaaccccgacgagatcgattacgtgatccccggcaacgacgacgcgatccgcgctgtcaagctgatcgctggcgctatggctgacgctgtgctggaaggcaagcagggcaaccaggaggccgctcccgctgaggatgcagcaaacgcctgatttcccatcccacaaacaacaaaataacgtgtaagggagaatacgaaaatggctatttctgcaaaggacgttatggaactgcgcaagcagaccgactgcggcatgatggagtgcaagaaggctctgaccgaggctgacggcaacttcgagaaggcaatcgagatcctgcgtgagcgtggtctggctaccgctgccaagaaggcaagccgtaccgctgccgagggcatggtctacgctgactactgcccccagtgcaaggtgggtgttgtcatcgaggtcaacgctgagaccgacttcgtcgccaagaacgacaagttcgttgctttcgtcaaggaggctactcaggtcatcatgaagcagaaccctgctgatgttgaggctctgatggcttgcaagaccgagaacggcgagaccgtggacgaggctctgaagaacctgatcctggtcatcaaggagaacatcaaggttcgccgcttcgtccgttacgagggcgtttgctctgcatacgtccacggcggcggcacccacggcattctggtcaacttcgagaccaccaacggcatcgaggctaaggacgagttcgttacctacggcaaggacatcgccatgcaggtcgcagctgctaaccccggctatgtcgatgaggcttctgtccccgctgaggtcgtggccaaggagaaggagatcatgctggctcagatggctggcgatcccaagaccgctaacaagcccgaggctgtgaagcagaagatgatcgagggcaagatcaagaagttcttcaaggagaactgcctggtcgatcaggagttcgtcaaggacggcgacctgaccgttgctcagtacaccgctaaggtcgctaaggatctgggcggcgacatcaagatcgtcaagttcacccgcttccagaagggcgaaggcctggagaagcgtgctgacgacttcgctgctgaagttgcaagcatggtgaagtaatttaacctttgggttgaatctgggagctgcagtacccgtaacagggcgctgcggctcctttttgtttgtgtttgccgggcggatgtgctatcatagagaaaacggaaagaagggaggacgaaaagcaatgcgcagtgtaaacaaaacgtctctccgaatggagagcatgatcggataaggagaatcccttatgaagaaacaaaccatgactcttgcgggcatccctgccattctgtacggtagccggagccggaatgtttacctctatctccacggcaagaacggctgcaaggaagaggcagaacgttttgccgctacagcctgtgaagcgggctggcaggtgctggctatcgacctgcccgagcatggcgcacggaaaaacagccatgagcggcttctgccgtgggtggctgtgccggagatagaagccgtatacgcccgcatgaagccggtgtgggcgcatatccggctgtatggcgtgagcatcggcgcgtggcttgccatgcaggcgctgcagggagacgcgccggaacagaccctgctggtctctccggtggtggatatggaagctctcatcacgaatatgatgcaatatgcccatgtgaccgaggaacagctgcagcgggcaggggagatccccacggatcttggggagaacctctcatggccgtatctgtgctgggtgcgggaacatccgctgcactggcatggccgcacacaggtgctgtacggtgacagagatgccctgaccagccgcaccatgatcgagcgcttccgtcaggaaagcggggcgcatctgacgatcatggagggcggggaacactggttccacaccccagtgcagatggcggtccttcaaacgtgggaagaaacgaatttttgatttttgatttagaatagccgccgcgtgcgctatggctatttttagcggaagtattatttttatatttgcaaaccagcaaagcctgcgggctttgctggtttgctttttcacgggaaaggtcgtgaccgtacactgcattttttgtggtgactatgcattttatctttgggactctttctgtgaaaaaatggtttggaaacgaccgcagtcgtttccaaaccacaatatcaaataaattttcctctgcttatggccagagcgcacgcggaggccatttcaaatcatagaagcttacagcaacaaaaactgccgctgacggtttttacgccgtcagcggcagtttgcatttacagattcagttcagcaggatctgaaactcagacctttgcttcgctgttgtgctcagcattcttataggccttgaaggagtggaacacgatgttcaggcccagaacgatcagcagcacggccaggatcagctgcaggccgtttgcaatgaacacagcaccccaagtggtctcgccagcggggatggtgacagcagcggcattgctgatggccttgaccatggcgatcaggcgctgcaccagagcggtgaaggtgacgcacagcatgatgaccagcggagggaagatcatcttattgctgcggccggtgaccttcaggaacacgcacagggtggccagaaccagagcgctcagcagctggtttgcagaaccgaacaggggccagatgttggcgtagccgatcttggtcagcaggaagccgaaagccagagtcaggaaggtggagaagtacacgttgcacagcagcttgcgccagccctcagcatgctccatgtcgtccacgctgaacagctcctggaagctcatgcggccgatacgggccacagcatccagactggtcagggccagtgcggaaacgcacatggtcataaacacagaggcaaagtgctggtccaggccaaagcctacgaagaagctggcaacgccgcggctgaagacctggaacggagtgccgtctgcgggggtgccgtctgcagcagcagaagcaccggccacgcacagggcgatgacagccagcaggctttccagcaccatggcaccatagccgaccttcagcatatccttctcattggtaacggtcttggaggaagtgccggaagacaccagactgtggaaaccggaaacagcgccgcaggcaacggtaacgaacaggatggggaacatggtgcccagcttggcgttggtaaagccggtgaacaccggcagattcatgacgggatggttgacgatcaggcccagaacagcgcccacgatcatggccacgaacataaaggtggtcatgtggtcacggggctgcttcagcagccacatgggcaggacagcggcaaagaagatgtacacaaaggtgatgtagctccatgcagccttacccagaatgatggggaagtttgcacccaccacaaaggacagcacgatgaatacgatgctgatcacattctctttccagccggtgaagtgcaggttcttctgcagcaggccaaagaccacggcgaacaccatgaacatgatggagaccatgccggcagcaccgttggtctgggcagcttccaccagagcaccgtcagcaccgtaggcattgaaggtgccggccaccatgtcggcaaaggcggcgatcacgatgccgcagaacagccagcagaacagcaggaacagcttgcggccggtcttgccgatgtacttttcgatcagcatgcccatgctcttgccgtcgttcttaacggaagcatacagagcgccgaagtcggtgacagcaccgaagaagatgccgcccagcagcacccacagcagcaccggcagccagccgaaagcagcggcctggatcgcaccggtaacagggcctgcaccggcaatggagctgaactggtgtgcaaacacagtccagccgtcggtgggaacgtagtcccggccgtcctcatggacaactgccggggtcttggcagaggggtcgatgccccacttgtttgccagccagcggccgtaaagcatataagcgccaaacagacacacggctgcgatcaatacgatgaccagcgtattcattgtttttacctctttccttttttggcatccggcaaatgtcagcggcatgggggcggcagggtgtaaaaaaggccccgtcttcctgcgttcgttccatttgggacgaaccatcgaagacgaaggccttcacatacactgcacatcgtgtatggaatactccgcgataccacttcgtttgctgcacagggcagccactcccagcgtacatacatacgcagccccgtaacgtgggcaaaacggccatgcattactggaaggcggggtcagcgcctttgttcacacaggctgctcgcaggggagaacgctttgctcctgactgctgcccttgcatcagatgggcggctctctgggagagggtgctgcaaagaatcatgtcctgttcatcgcatttgccgaatgattgtccgtattttagtgcggaattcacaaattgtcaatatctttggaacaagttcggaggatacactaattcagaaaagcgttctgcaataatttttaggtgatttttgttcatgcgtgaaacgaagaaaactatatacgcccacgaatgaaaagagttcacgccaagggcttgactttcacactttgatgtgctaaagtgatgatgcaagaaagaacctgaacatttccggaacatttaaaagagggaacgctcccaaaaccggacagtccgctgcggcggcaaggagaacattcatgtcagataaaaattccagaagaaaccagaccaccgatgcactgtttgatgccatcctcagtctggaaacgcgggaggagtgctacaacttctttgaagacctgtgcactgtaaaggagatctcggatatggcgcagcggctggaagcggcaaagatgctgctggacggcagaacctacgatcagatcgtgaaggcagtggagatcagcacggccaccatcagccgcatcaaccgctgcatccagtacggctccggcggctaccgcgagaccattgaaaaggtgcgcggcacccagaaccctaaaaagcaggagtaacaccggcgtaccaggcagacatagaatggggcgtacaccgcccctgaccggacgaacgaaaggaaggttttatcatgtctgctgagaactgtatcgataccacccgctgcccctgcctgcccaaggtgacgctggagcaggcggtcgttgaccttgtggagagcatcgctctgcaggaaaatgccctgagccacatcctgtgcgccgaaagccggaagatggacgccgccatgaaactggacggtctggacctgtgcaagctgctggaagtgaacgattcggccaccaacatggtgcacgccgtggcaaacctggagctggtgctcaaggataagctggagttcgtctccaacaacctgtactatccgcctgcggatgccgcagcgaagtaagaagatgctgaaaggcctgtccggatgccgggcgggccttttctctgcttgaatgcataatttttgtaaaaaccatttgttggaattgctgataacgggattctgtgctatactatacaatgtatcaccatgaaagtgaggaaatttacaaattgctgaactacgatgcgatcctgtttgatgtggacgggaccctgatcgattccgctcccggtatcataaatacattaaaagaagtctttgccaggatgggcgtggacaccacgaatgtgaacctgcgccgctaccttggcccgccgctgcgcaagagctttggtgagcactttaccgacccggccctcattgaaaaggccaccgacctgtaccgcgacagctacgccgtcaagggcagccacgagtgcgccgcctaccccggtgcagcagagatgctgcagcgcctgaaggacgcgggccttgtgctgtgcaccgctacctccaagcccacgcaggtcgtcacgcccattctggaagaaaagggccttgcaggctattttgattttatcggcggcgcgtccatggacgagagccgcgacaccaagaccgacgtggtgcgccatgtgctggcccagcccatgatgcagggcaggcgggtgctgatggtgggcgaccgcaacgacgacatgcgcggcgctgcagactgcgggctggatgccgccggtgcgctgtacggctacggcagcagggaagagctggaacccttccacccggtgctgctggccgaaagctgcgccagccttgcagaccagatcctgaacggacaggcatgaccggaaggccctgtgccggaaactaagtgaatggtgagagatatgagaaatacacgaccggaaaagcaatcgcttactcctatgcagaagcaggctgtgctggtgtgcagtgtgtgcgcgctggcagccattctgaccattgccattaccatgacgctgctcaagcgcggcaagacccctgcagctccgggggaacagccctccagcgaggtgctggtgccgggcgaagaggatatctcggatcactaccagatcagcgagacctctgccgccctgctgccggagaccgccgacgcgggcgagagctaccagaaggaaacgctgttcctcggcgattccaacacggtgcgcctgtacgccaacggcctgatcagcctgcagcagttctgcgccaaggagggcattggcacccatgccgccctgaacgagggcatcgttacctttaaaaaggacagcagcacctacaccatcgcgcaggccgtggccaaaatgaagccccgccgcgtggtcatcatgctgggcaccaacgataccggcatgagcgtggacgagttcatcaagaactacaccgcgctggtgcaggccattcaggaaagctacccctacaccgacatcatcgtgaacacggtgccgccggtgcccgcgaaccacgcaaactacccccacatggaccagaccaagatcgacgacttcaacatggccctgctgtccatgtgtgagcagatgggcctgaagttcctcaacagcgccgaagcgctgaaggatgccaacggctatggccgcgaggattactaccagaccggcgatatccacctgaagcccgtgggcctgaaggccatgctgagctatctgcgcacccacgcttaccagaccgacgaccgtcggcccgacaccgccaacatccccacccgcgccgagtataccccgaaccccagctctgcggtgacagcacccagcagctcggaggctgcaggctcttccgaagagcagggtgtgctgtatcaggccagctaccgggtggacaagaccggcggcaccctttccagcggcagcgacagcggcaagacatccctctcctatgaagtgaccagcgccgcccagtccatcagcgtgacggctgtgccgcaggacggctatgtgttcgtcaagtggagcgacggtgtgacccagaagacccgcaccgatacgaacttcaagcagaacgtggacgtgaccgccgtgtttgcagcggcttccgtgcatatcagcagcaccggcaaggccgtgctgggcgattcctacacctttaccgcaaagctgggcggcaagcacctcactgccgacagcatccgctggtacgccaacggtgcggaagtgccgcaggcggcgggcaagaccaccgtcaaggtggagatcgacccctccatgctcaatgcgacctttaaggtgtacgcagtggcaagctacaacggctgcaccgttaccagcaacgtcctgaatgtgacggtcagcggcgtaagctccggcagctcgtctcacagctccggcagctctggcagcacgtcgggcagcagttcttccggcagcaccagttcttccggtgcatcgtccggcaccacctccggggcatcctccggggctacatccgcctccggcagctcgtctcacagctcttccgacagctcgtctcacagctcttccagcagtgagagcacggcttccccggcaggctcggcttctgcttccaacggaacagccagctcttcccacagcaccagcaccagctcgtcccacgcggactctggtgagagcagctcggcttcccatagcagctccagcagcgagagcagctctgcaagctctggcagctcccatgcggcttcggaatccaatgccagcaaggaagccgccaacgagcagtccgcatccacggactccgcgtcctgaggctgtcaccccggcctgccgtgccgcataggctggcaggaagggaggcgtttgcatgtactacgaggaaccccgcatcccggcgctgcccggggaagagaacgtgaccgacggcagcgtggacgattacggcaccgactgggagaacgtggacaacggcgcgctggaagaggaaatggcaaagtgtgccgccaccccctgtgatgtcaaaaccacctgcccggacaacgacccggagcagacagacgtaccatcgtacgaaattgtaacagaatgatgtgaagccagctctgtttacggcagggctggcttctgcctgttgttgagcgcatggcagctgaggccatggcagaaggaaaagagggaaggtttatggcaaaatattattgcgtgctgttcgatgcagacaacaccctgctgaactttgacgcagccgaaagcaaggcactggccgaaacgctggtgaactacggcattgagccggacgcagaaacggtgcagacctaccgcaccatcaactcggagctgtggcggcagctggaaaaaggccagatcaagcgggaaaagctcatggcggagcggttcacccgcttcctcaaagccattgatgccgccggtgacggagccgagatgaaccgcttctatctggaacagctctccacccacccggacctgatggggccggaagtgctggacgtgctgcgggagctttccgaggtggcaacgctggccgttgtgaccaacggcttccagaaggtgcagatccgccgtctggccgagagcggtgtgctgaactttatggaggacgtgttcgtctccgagaagatggacagcgaaaagcccaaccgcagaatttttgatgcggccctgcgcgcccttggcgtggagaaccgcgagcatgtgctggtggtgggcgacggcctgagcagcgacattcagggcggcgtgaatgcgggccttgacacctgctggtataaccccagccacgccgagaaccccggcaaggtggtgcccacctacgagatcgcagacctgaaagagctgtacccgctggtgatggagcaggaagagctggccaatgtgggcctgaagaaccgccgccaccagtgctgagccaataagcggatggagaacgggatcataaaactatgctgatacatttggaaaaactaggcaagagctttggcgaaaagatcgtgctgcacgatgtgaccgccagtgtcgagcgggaggaccgcatcggcatcgtgggccagaacggcgcgggcaagaccaccctgctcaagattttgaccggcgagtaccaggactacgaaggtgagttcagcgtgacccacggcgtgacgctgggctatctggaacagaacgcaaagctggatgccacgctggatctctacggcgagatgcgctccacctttgcccctgtgctggatgccatggcccagatgcaggtgctggaacgcaaaatggccgcgcagccggacgacacggagctgctggcccggcacgaccagctgcagaacatcgtggatgccgccgacggctacaacatggatgtgaacatcaaaaaggtgctgtccggcatgggctttgcgcaggatacatggcagaagaacattgcggtgctctccggcggcgagctgacgaggctgcggctggcaaagctgctgctggaaaagccggacgtgctcattctggacgagcccaccaaccacctggactttgccaccatggaatggctggaaaactacctcaaaagctattccggtgcggtgctggtggtcagccacgaccgctacttcctcgataacgtgtgtacgaagatctgggaggtctcctaccagaccatgaccacctacaagggcaacttctcggcctacctgccccagaaggaagccgccgatgccctgcgccagaagcagcacgatgcagatgtggcactggccgaaaagctgcaggactacgtggaccgcaaccttgtgcgcgcttccaccaccaaaatggcccagagccgccgcaagcagctggaaaagctggagatcaccgaagcgcccaaggacgagaccaaccagctcaagttccggtttgaatatgacgtagaaccgtggaacgagctggtgctgctcaagaacctgaccatcaaaataggggagcgcaccctgctggaaccctttacctacacggtgtgccgcggccagcggctggtgatcgcaggccccaacggcgcgggcaagtccaccctgatgcaggtgctggacggcaagcgccgcccctccggcggcatggtgcggctgggcaccggcgcacggcccagcatctttgcccagcagcagaaccgtctggggcagggccgggtcatcgatgtgatctggaacaagtacccccgcatgaccgagctggaggtgcgcagccatctggcaaagctgggcttccggggcgagacggtgttcaagccctgcgaggcgctttccggtggcgagctggcccgcctgcgctttgcggagatcgtgctggaacggcccaacctgctgtttctggacgagcccaccaaccatctggatatttacacccgcgaaaaccttaccgaggccctcatggcctacaccggcacgctgctgctggtcacccatgaccgccacctgatgaacagtctggcctgccccatcctctaccttgaggacggcaaggccaccctctaccccagctacgatgccctgatgggccgcaacgccccggcacctgccgtgcagaaggccgccgaaccggccaagaccggctacggcagggagcagcgccgccgccgcgcagagctgcgggccaagatcaaggcctgcgaggacgagatggaagcctgcggtgcacgcgaagtggagctggacaacgagatcaactccccggaggtgtacaacgaccccgacctgctgcgccagaagagcgacgagctgagcgacctgcgcttccatcaggaagagctgtttgccgcgtgggaagctgccatggaagagcaggaaagctacgagcagagccagcagaccgaagagtaaaggagggtgcagcatgccccaaaacagacgcagttacgaaaaaacgcgccgcatcgccctttccggcctgctgtttgcgctggccatggcgctttcgttcattgagggcacgctcaccatcccgggccttttgccgggcatgaagctgggccttgccaacatcgtggtgatgtacgcgctgtttttcatggggccaaggcaggcgctggtgctggacgtgctcaaggcactgttcgtgtttctggtgtccggcttcacggcgggctttctctcgctgtgcggcggccttttgtccctgctggtgatgtgggtgctgtactatctgctgccggtgcggcccacctggttcatcctttccgtatgcggcgcactggcccacaacatcggccagctgctgggtgcgagcgtgatcatctcgtcgtcgctctcgttctactatgcgccggtcatgctggtgctgggccttgtgatgggcgcactgacctccatcaccctcaaggccctgctgccggctcttggcaaaatgggcttctccacgcaggaaaagcggggggaataaccaaccgtccatgcatcacagttgcattttggccggaaatcagtataataaggaaacaacctgctattttcaacctgctattttaaagataaaatctcttgcatacagcgctgccgccgtgggaaagtgcgcggcagccgggaggtgtttgcactatgagtgaaaaagttaccatcaaggtggagcgcaaaaagctgcatctgcccaccatcgccctgcgcgggctggtggtgttccccaacaatctcgtccactttgaggtgggccgcgaaaagagcattgccgccgtggagtgggcaatggcaaataattccaacgtgtttctggtggcacagaagtccatggacaccaccgagccgcagcaggcagacctgttcagctacggcgtggtggccgaggtcaagcaggtgctgcgcgtctccggggaccttgtaaaggtcctggtggagggcaagtaccgcgcaaagctcagtgcactggatgccagcggcgattttctgctttcggaggtgcgcccggccccggtgcgcgcaggcaaggccgacgatgccgtggagaccgaagcgctgctgcgcgccctcaaggccgggtttgacgagtaccttggcatgaacccgcgccttggcaaggacgtggtgtttgccatcgtttccagcgacgaccccgccttcctcagcgagtacatgcctgcaaacctgctgttccgctacgaggacaagcaggccgtgatggacgagggcaccctgaacggacggctgaaaaagctcatcgagatgctgcgccgtgagtgtcaggtgatgaaaattgaaaaggagatcgcggaaaaggtcaacgagtccatggacaagaaccagcgcgattactacctgcacgaacagctgcacatcatcagcgacgagctgggcgagggcgacgacacccacgccgaggccgacgagtaccgccgcaggatcaccgggctgcaccttgccgaggacagcgagaagaaactgctcaaggaggtggaccgccttgccaagatgcagggctccaatcaggaggcaacggtcatccgcacctatctggacacctgcctggacctgccgtggaacacctttacggtggacgaccttgatatcagccgcgcacagcagattttggaccgcgaccactacggcctgaaaaaggtgaaggaccgcattctggaaacgctggccgtgcgcaagctggcaccggacgtgaaggcacagatcatctgccttgtaggccctccgggcgtgggcaagaccagtattgcacgctccatcgccgaaagtctgggccgcaagtatgtgcgcatcagccttggcggcgtgcgggatgaagccgagatccgcggccaccgccgcacctacatcggcgcgatgcccggcaagatcatcactgccatgatctctgccaagagcgcgaaccccctcatgctgctggacgagatcgacaagctggcaggcgacttccggggcgacccggccgcagccctgctggaagcgctggacccggagcagaacagcaccttcaacgatcatttcatcgatatcccgttcgatttgagccatgtgctctttatcaccaccgccaacgatctgggcagcatccccggccccctgcgtgaccgcatggacgtgatcgagctgcccagctacacccgcgtggaaaaatacaacattgcccgcaagcacctgctgcccaagcagctcaaggcctgcggcctgaccggcaaggtcacgctgagccagagcgcgctgtacggcatcattgacggctacacccgcgaggccggtgtgcgcaatctggaacgcaccatcaccagcgtgctgcgcaagtgcgcccgcaagatcgccgcaggcgaggtggaaagcgtctccgttaccggcaccatgctggaacagctgcttggcccccgctttgtcaagcccgacttcctcaaccgcaccaacgcggtgggcatcgccaacggtctggcatggaccagcgtgggcggcgagaccctgcccatcgaggtgcaggtgatggacaacggcagcggcaagatcaccgtcaccggttcgctgggcgacgtgatgaaggagagcgctcagctggccgttacgtgggtgcgcgtgcacgccgccgagtacggcatcgacccggaaaagctcaaaaagtgcgacctgcacatccacgccccggagggcgcagtgcccaaggacggcccttctgccggtgtcaccctgaccacggcgctggtgtcctgcctgtccggcatcccggtgcgcggtgatgtggccatgaccggcgagatcaccctgcacggcaacgtgctgcccatcggcggcctgcgggaaaagagcatggcggcctaccgcgagggcatgaagaccgtgctcatccccaaggacaatgaacccgacctgtacgaggtggacgatgaggtgaagaagaaccttaccttcctgcccatgcagagcctgacacaggtgctgaacgcggccctgctcaagccccagaacgcaaagaaggccaaggctcccagccgcacccatgcaaagaaaaaggcggcagacgccgccatcgtgccgcccaccgcagaaaagccccagcccggcgcggtgtgctgagaatagggcaggaatctgcccggcctgcgggtctggagtttctctgagaaatgagagaattgtaagcatccttgccctctcagtcacctgcggtgacagctctcccaaagggagagcccttggcataaagatgcactgtatgtggattgccaaaggctcccactttgggggagctgtcgagcgaatgcgagactgagagggcgaggccgctgtccgggggagtctgtctcagtgagggagcctctggcgaagaggaaaactttaccgtactgccaaggcctccctctccgagggagggggaccgcgtcagcggtggaaggagttatcacaaacaagaaaggaaagctccatgaattacaacaaagctgatttcattgccagctacggcatttccagccagctgcccgagagcgaccgcccggagctgagcttttcggggcggtccaacgtgggcaaatccagcctcatcaataagctgtgcagccgcaaaaaccttgcccgcgtgtccagtacgccgggcaaaacggccaccatcaatttttattcggtggacgactgctactttgtggacctgcccggctacggctacgccaaggtgagcaacgccgaccgtgagcgctgggacgacctcatcaacagctactttgaagcaccccgccaccacaccctgctggtgcagctgctggactgccgccacgcccccagcgccgacgatgagcagatgctgcgctacctgcactatcaccagatcccctacgtggtggccctgaccaaggccgacaagctcaaaaagagccagctggccaagacgctggaagactttgagaacctctgccgcccctatggctgccagaaggtggtgctgaccagcggcgagaacggttacggcatcccggagctgcaggcggtgctcaatgccgctgtggccggggaacaggaagcggagtaaaccatggcctacaacgaatttgcctatttctacgatgaattcaacggtgaggccgattacgatgccctgtatgcccacatccatgcaaagctcaaggagcacggcatccacgacggcatccttgccgaccttggctgcggcaccggtgagctgacgttgatgctcacgcaggcgggctatgatatgatcggcattgaccagtccgaggagatgctctgcgttgtgcgcgataaggccgaacagctgggcctttccggcaggctgctgctgctccggcaggacctgctcaagctggatctgtacggcaccatccggggcgcggtgtccacctttgacaccttcaaccacatcccggacctcgacaccgccattgccaacgcgggctttttcatggagaagggcggggtgttcctgttcgatatgaacacgccctacaagcaccagaacgtgctgggcgacaacgcgttcacctttgaggaagaggatgccgcctgtgtgtggcgcaaccactacgatgccgccaaccgccgcgtggagatcaccgtggacatcgactaccacgagaccggcgagcacttccacgagcagttctgcgagtacacctatgaccttgacaccatccgcaccgcgctggaaaagcacggctttgcgctggaaagcgtctgcgacggcgagaccttcggcccgctgaccgaggacagccagcgctatttcttctgcgcagtcaagcagtatacacaattggagggataactttatggcaaatctgatccgcggcctgtcggagaatggcggggtcgtattctgcggcgtggattccacccagatcgtccgcaaggccgaaaagctgcacaccaccagcgccacctgcagcgcggcactgggccgtctgctcaccggcgcggccctgatgggctccatgctcaaggacgaccgtgaccagatcaccctgcgtgtgtccggcggcggcccggcgggcgtggtcattgcctgcaccgacggaaccggcaacgtgaagggctgcatcgatcaccccttggtggagctgcccgcaaagccgaacggccacctggatgtgggcggcgctgtgggcaaagacggtgtgctcaccgtcatccgggataaccgcctgcagaaggagcctaccgtggggcaggtgccgctggtctccggcgagatcgccgaggacctgaccgcctactacgcctacagcgagcaggtgcccaccgtcatggcgctgggcgtgctggtggacaaggacctgtccatcctgtgcgcaggcggctttatggtgcagctgctgcccggtgccaccgatgcggagatcgatcagctggaaaagaatatcgcggccatgccgtccgtcaccaccctgctgcacgagggcaagacccccgaggacatgatgcagctggcgctggcgggctttgaccccaacgtgctggacgagcgcgatgtgcactaccagtgcgactgcagcgccgagcgcaccaaggagatgctgttcagccttggccgcaaggagctggtgaggatgcgcgacgaggaccccgcctgcgaggtggtgtgccacttctgccacagcaagtaccagtacgacctcaacgacctgcttgccgagtacgacgcgcaggcggcggaacgtgccgctgcagagcaggggacttgacaaaccgctaaaaaacaactatactacaaatagaaaaggcgctgtccgcaatggtcagcttcccttcggctaaggagtcaataagaatgaccgctcaggtttgggagtctggggcggtcatttcttattgttatggatctctttgaagattgcccatgcgatctgaaatgtaatcccaactgtgccgccaacaatgacgaacagctgcagaacctcttccaacttcatgatgcatccccccttccgcgtttgcgaacggggaaacaaacaataagcttttacgtcccccggacgcttgccggaggaaagcatgaccacctgcgcttgcaggtcgggttgcggcacccagcatccgcttcgctctcgcttgcgtcttgctggccgcggccccaacaacttctccttgtttctgccactggcagcagtcgtcgttgttgcagcaccttaacgccacccttcggggtggcatttttagtttaacatactttttggcgaattacaacgggaatcctttcacccgcagatgtccgctgccacggtgtaggtaacggtatagtccagtacattgccgttcacggtgcagtcctctttgcgggcgatgtgctccgcgtccggccatgcggcgtacagcgcctgcaggctttgcagccgggccagcgcggcggcctgcgcttcggtgcggcgcagcgtttccggctgctgcacatagcggcaggtctcctccacagagcagggcagagcaaggcccagcagcggcacctccggctggaagtgccggaggatcaccgccgcatgttccggcgcaggcgcggcgggcagggagaaggtgtgcccgaacgctgtcacccggtatgtgcgggtgcacgcgccggtgtactgctgcaccgtctcttccaagggcacggtgcgggtgtcgctccactcaaactgagcaattaccgttccggcggcgggcgcaaagatcagggtgccgtcccgctcggcgcgggctgtgccaatgaggccctgcccggcctccacctgctggcccggctgcaccagcatggtgccgctggtaaggttcgtgcgcagaacagtgccgctgcattttgcccggatgccgtgcagcgttccggcggcaatgtccggcttgggtctggccgcggcggcttccaccaccagccgccctttggcaaaattcaggctggcccaggagaactcgccgctgtgcaaaagggcgtactccccggcggtgagctttgcctcggtcacagccgcaccgggctgcaggcccgcttcccgcaggacggcgcaggcccgcgcagcctgtccggtggtgagggaagaggtgtccgcataccagacgaactgctgtgcaaagagcagcagcggcacaaacaccgtcagccccgcccaaagcccggcccggcgcagcaaggggcgcagacggaaatacagccccagcttccggcggatgcgcagccgcacccggtgcttgcgggccagcgcggcaaggcgcgggtactgccacgcggcgcaccgcccgccaaaccctcccggcagggccgttaccccgtagggatgcagcccggcccgggcggcagcggtaagcagggcttcggtgctgccattgcatgcggtgaactccaccgcggcccaaaggcttaccggttccatgggcacctcctagtcatccgcaaagtccgtgcgcacgaaccgcccccgcagggtcaggcggctggcggtaagggtgacgatcttcagcccgtcgccgtagatggtcaaccggccatggggcatctgcaggcacagccggtcggggctgtaggccagaatgcggcaaaagtgctccacctccatgcggcccccgctcaggtagacggcaggggcgtggtaaaagccctgcggcggctgacggaacagcagggccagccagctttgcggcaaaagccgctttttgcgcttggcacacatcccattccctcccatcccgcagttctgcccgcggcgcgctgctacatatatatggatgcggagggctgagttatgaatcgaagctggaatttccggcggggcgtgctgctggcgctggcagggtacacggcgtttctggtgtttgccgcgccgcagcgctgtgccgatgccctgcaggcggggctgcggctgtgcggcgggccgctgctggtatcgctgtttccgttcctcatcgtatcggcgctggcggcaggctgcggggccgggcagtggctgggctttatgttccggcctgcggcgcggctcatgggcatccgggcaaagggtgcgggcggcgtgctgctcattggggccttggggggctttgcaccggcggcggtggctgcgtccgaagccgtgcgcaccggtcagctcacctcccggcaggcctcggcgctgctgcccgcctgtgtgtgcagcgggccgtcctttgtcatcctcacggtagggcagcagatgctgggcagccgcgcggtgggggtgcggctgtttgcggcccagctgctggcgggatacctcacggcggcgctgctgtgccggatgcagggcggggccgggcaggctccacccgcgcagggggaaaccattccgctgcccgcactggacgcggtgatcgcgcaggcggcagtgacctacctgaagctctgcggctttgtgctgtacttccggctgctggcggcagggtgcggggcattgctgccacagccgtgggcggcgctgcccgccatgctgctggaagtgtgttccggctgcgatcaggccgcccgcaccgggttgtgggccagcacgctgtgctgtgcggcgctcagtgtgcagggggtgtcggtgcttttgcaggtgcgcaccatctgcccggccaagatctcgctgcggcctttgctggcagcgcgggcggtgcatctgccgctttcggtggcgctgttctggctgggcagcaccgtgccggtgcaggccgtgcagacctttaccaccctgaccgaacgggtggtggtgctgcgccgtgtcccgctggactgcgccctgctggcctttgccgtgtgctgcatcacggtggaggtgttatctgatacagtggcagattattgacgctgatgcgatgaaaaatgcactgtgtcaagctgatacagtgccccttgattgatacagtgcgtcagtgtatcagggcaggccagtgtatcaacttgatacactggcaaaaagaaacataagtaagttatatatttctcactgtatcatgtgtttctccacggtaggccagccgggtaaaccaccctcgcgcgccgtccttttggcacagctgatattttgcaatgtcgccatcccgtacaagctcagcatacgagcgtttgtaagtggcttcactgcacttgatctcctgaagtacagcacttttgagttgaggatttgccatcgacccaaggcggctctcggacagaacgttcaggatggcgctgcgggtgtcctgccgggtctccgccgtgcgcacccgccgctcctcaatgaagtcggcatccttcttgtcggtgtagccgtcaaacacggcccgcgcggtctttacgccctccacctccacatcgtcgatgtgcagcagcaccgtctgctgggggcgggcgtagctgcttttctcgtggctgagataaattttgccgtcgttcttggcgcggcccatcatcagcacgctgcgggccatgtcccagatatccgagctgtcggccagacgtgcgcggccggaaacgccctgctttttgttggagtgcatcacgatgagcaccgcgcagccctgctttgcggcaatggcgcgcagcggcagcagggcactgcgcatctggttgcggcttgccatctccacatcggcgggcagaaaactctgcagcgggtccacgatgagcagcagcggcctggccttggcggcaaaatccgccagtgcctgatccttgagggtaaggggctggccggtcttgccaaagtagtcgtcggcggtcagcaccagtacccggttcatgtcggccccggccgccagcagacgggccttgagcaccttgccggggtcgtcctcgcccgcaagcagcagcaccttgccggtctgctgcggcggcagcggaaaaaagccggaggtcttgcccgccgtcacataggcaatgagctgtgcctgccagatgcccttgccggtgccgccgtcggcacccagcagcgacacttcgcccagcggcagcagctgcggcaccagccacgccacgctctgcatgggcacatcggccagcagaccgggctgcgccgcgctgccctccagcgcaagcttgcgctgctttgcgtccgcgttcacggctgccataaaggctgcggggtcggcctgccacgcctgcttgcaggtgttgagccattgatcgatcttgtaattgacggcgggcagctgcatgttgcaggctgcgccgcgcacgtcgtccagtaggtcttcccgtgcatccgggtcggtctggtggaacattaccgcaaaggtcaggcggctgaacagctgctgctcggtcctgcaggcatccagcatgttcagaaagtctgtgcggtcctgaatggatactcccaaaatacatttctcctttcgctgtggtttataactggaagcaaaaccaaatgttgttgctataagtataactctgaaaaaacaacgtgtcaacaaatagttcttgcgcaaaaagccacagcttccggggtgaaaatgcacaggaaaatggggaaagaaaaagagaaggcgggcaccttctcttgacaaaacggcaaaaaataactatactacaaatagaaaaggtgctgtccgcaatggtcagctccttccggttagatcaataagaatgaccgccacggtttggagacaggggcggtcatttcttattgttatggatctctttgaagattgcccatgcgatctgaaatgtaatcccaactgtgccgccaacaatgacgaacagctgcagaacatcattcaacaccatgatgcatcgacccgctgaagtaaggagtgattctggatgttacagccgaagctgacaaaggtggaacccgtaaaaccgctgaagctctgcctttattatgagacgggcgaggtaaagctgtttgatgcagccccttatgccaccggctcgtggtacggcaggctgcaggatgagcgttactttgctaccgtgcatctgctgccgggcggtattggcatcgagtgggaagaggggcaggatatcgccccgcatgagctgtacgaaaacagcgttcctgtgaagaaaacagcataacccaatgcaaaaggccgctgcgttcacatgcagcggcctttccatttgatggggagtattcagcggcggtttactggatgccggtcacagggtagtcctgatcctcaacggccttcttcagcacgtcgtcggcgacctcggcgttcagggtgacgatggcggtgccggcctcgtggctcaccacggcctcgtccacctcgggcagggcttccagagccttcttcacgcgggcttcgcagtggccgcacatcatgccttccaccttcagggtctttttcatagcagtgtcctccttggtactctctttatttgcaaccgctgcgggctgtgcggagacagcgggcagggaaacagcattttttgccgcacgatcgtgctttgtgctgtgcacgtcgaacaggttcaggcgcagggcgttgcttaccacgcagaagctggaaaggctcatggcagcagcaccgaacatggggttcagcgtcaggccgaaggggatgaacacgcctgcggccagcgggatgccgatgatgttgtagatgaacgcccagaacaggttttcgtggatgttgcgcagggcagcgcggctcaggcggatggcggcgggcacgtccgacagcttggagttcatcagcaccacgtccgccgcgtcgatggcaacgtcggtgcctgcgccgatggcgatgccggtgtcggcacgggtcagggccggggcatcgttgatgccgtcgcccaccatggccaccttgccggatacctgcagctggcggatgaccgcttccttgccgtcgggcagcacgcctgcgatcacctcgtccacaccggcctgcctgccaatggcgtcggcagtgcgctggttgtcaccggtgagcatgaccacgcggatgcccatggtctgcagctcccggatggcctgcgggctgtcctccttgatggtatcggccaccgcgatgatgcccagcagacggcctgctccgccgaagaacaggggcgttttgccctgtgcggaaagggctgcggccttctcctgcagctgtgcgggcacggtgactttggtgccgataaaggacgcattgccgccaaagatctccacgtcgtccagctttgcggccagaccgttgcccggcagggcggcaaagccggatacctcgggggcggtgagcttctgcgcgtcggtgcaggccagcacggcctttgccagcgggtgctcgctcttgcgctccagtgcggcggcaagggtgagcagctccgtctcggaaacgccctcggcgggcagaatgtcggtcactttgggttcaccgctggtgatggtgccggtcttatccagcgccacgatctgggtgcggcctgcagcttccagcgaggcggcggtcttgaacaggatgccgttctttgcacccagaccgttgcccaccatgatggccaccggcgttgccagacccagcgcacaggggcagctgatgaccagcacggagatgccgcgggccagtgcatagcccagctcccggcccagcagcagccacacgatggtggtgatcaccgcaatggtaatgaccgcaggcacgaagaaaccggacaccgtatcggcgatttttgcaatgggagccttggtggcggcggcatcgctgaccatccggatgatctgggcaagggtggtgtcctcgcccacgcgggtggcccggcactgcaggaagccggactggttggtggtggcagcgctcaccttatcgcccacagccttgtccacggggatgctctcgccggtcagggcgctctcgttcacggcgctggtgccttccagcacgatgccgtccacggggatgttctcgcccgggcgcaccacaaagatgtcccccttctgcacctgctcgatgggcacggtcacttcggcaccgtcccgcagcagggtggcggtcttgggggcaagcttcatcaggctcttgagcgcgtcggtggtcttgcccttggagcgggcctccagcatcttgcccaccgtgatgagggtcaaaatcatggcagcggactcaaagtagaactccatcatataatgcatgaccagctcactgttgccgtccacctgcgcgcgggtcatggcgaacagggcgtaggtgctccacacaaagcttgccatggaacccatggccaccagcgtgtccatgttgggcgagccgtggaggaggcccttgaagccgttgatgaagaacttctggttgatgaccatgacgatgcccgccagcagcagctgcacaaggcccatggcgatgtggttgccgtcgaaccagcggggcaggggccagccccacatcatgtggcccatggagaagtacatcagcaccagcagaaagcccagcgacgcaatgagccgccgcttgagcttgggggtctcgtggtcggccagcgcgtcaaggtcggcgctggtggagctggcagccgccgcgcccgcacgcttggggctggcaccgtaaccggcatcctgcacggccttgatgatctcggcagagctggcggtgccctccacgcccatggagttggtcagcaggctcaccgaacagctggcaacgccgggcaccttgctcacggccttctccacccgggcggagcaggctgcgcagctcatgccggtaacgttgtattgttccataaaatatcactcctacgttgagtatgcacggggaagggcttcttatttcatgagcttgggcagcagattcaccagctcgtccagctttgcctcgctgcccgcgcgcaggtcgtccgccacgcaggtggagatgtgctgtgccagcagctccttggaaaagctgttcagcgccgagttcgccgccgccacctgcacaaggatgtccacgcagtaggcatccttttccagcatgccgcggatgccgcgcacctgcccctcgatgcggctgagccggttcagcagggccttgtgctcctccggggtgcggtccttgtggcggcagcaggagggggtgacgctttcggtgggcacagcggatgcgtcaatggccggagccgtggcagcttcgggctgggcgggcgtgccgcaacagcagcagggctttttctcgttgtccataaaatatctcctttacccatagggggtatacatcttacagcatgagtatagcacagcaaacccgataaatcaagtagggaattgaaaaatacaaacaaaaagagggaaggcactgcaaatgccttccctctatcaaatcacttttacttctccagaatccgcggcacaaacaggcccagcatcttgccccaccagtaccactcgtgggagacatcgccgccccagacctcgaggtgggcgggcaggccctgtgcggccagcacatcggccagcgcctgcgtgtcggctttggcatcgtcctcgtaggcaccctgaccggcgcagagcatcaggctgttctcctcggccttggccagagccagcttgtcggcgatgccgttctcggccagatactgcaggggagagcagcgcagcaccagatcgtcggcttcactgccccagaagcgggccagatcgtagatgccggaaaggccgatggcaccggcaaagagcttgggacggcgcaggcggcagttgacggcgtgcacagcgccaaggtcgatgcccacacaccacagcttggcatcctttgcggcaccgttcagggccagcacccggggagccagctcggcggtaagatagacgaagtacttttcctccatctcggcgcggcggcgcaccgggatgtcgccgttcagtacggcctcgccgtcaatgctgtcggcgcagaacagctgcaccttgccctcgttcagcagcggggcaatggcatcgggcatgccgttgttctcccaatcataaaagcggccgccgcgggcaggcagggccagcaccggcacaccggcgctgccgtataccttgaactccatctcgcggttcagcacgctgctccactctttgtaataggtaccctggatcataaatcaagcactccttgtttctatattcaccggcccgggcgcagtcgctgcacgttggtgccggtcgttagcgatcaaaagaaagctttctctggaaatatcacacgaactggttgcgctgggcatcgtactcgtagcccacggcccggagctttgcgcacagatctgccttgtcggcatccagatcttcgcacagagcatcgaggtttttgtaaaaatcacgcagcttcaggttcaccacgctcagcagcatgatgggatcattgggcagagccatgtgttttgcctccttacagcaacaaaaaaagccggccactcgacaaagtgaccggccacatacaccaaattagacagcgcgggtaactttgccagcgcgcaggcaacgggagcatgcgtagacgtacttgggagaaccctcaacgaccgccttgacacgacggacattcggcttccaggtacggttggaacgacgatgagagtgagaaaccttgataccaaaggcaacacccttgccgcagcattcacatttagccatggtacttgcacctcctgcagtgaagtaaggaatcaaaataatcagcttgactattgtagcagattaccgggcaaaatgcaagccttttttcaaaaaatattgcgggtttttggaaaaccaaactccttcagtcatcgctgcgcgatgccagctgttccccttctggcactttgtgccacctcccccggccgggggagtctgtctcagtgagggagcctctggcgaagaggaaaagctttccggtatgccaaagcctccctctttgagggagggggaccgcgttagcggtggaaggagtaatacccccttgtctaaaacctcaaaaaatagtattatatatggtatactgaaaaaaggcaggaatatcgaatgacctctcagggcatctattatctcatccgcgcgctggtggcgctggtggccatccccttccacgagtgcggccacgcgctggcagcatggctgctgggcgacgacaccgcaaagcggcaggggcggctttcgttgaacccctttgcccactttgacctgctgggcacgctgtgcatggtgtttgcgggcgtgggctgggcaaagcccgtctccaccgacccccgcaatttcaaaaaccccaagtggggcatggcccttaccgcgctggctggccctgcggcaaacatcctccttgcctatgtgggcatggtggtgtggaagctcatgtactactgggccccggtgaacgatgccaccatttacattgccatgttcctgcagtaccttgtgctgatgaacgtgagccttgccgtgttcaacttgatcccggtgccgccgctggacggcagccgcatcctgctggtgctgctgccccggcgcatctactttggcctgatgaagtacgagcgctatatcatgatcgccctgctggcggcagtgtggttcggcgcactggatactcccctgtactacctgaacaacatcgtgtgggagctgctgggcaagggcaccggctacattgataagatcgcgtattccatctactatgccggccttgggacggtggtgtgagcgtggcagaagaactgaccttccatctggaagattttgacggcccgctggaattattgctggcgcttgtggccaaacataagatggacctgcacaacatccccattctggagctgatcgaccagtacaccgccacggtggcgcgggccgacccggacccggaagccgccagcgccttcatcgagatggccgcgcggctggtggagatgaaaagctacctgcttttgccccgcagcgaagagggcgagcggctcaagcaggagttcaccggccagctgatcgagtacgaccagtgccgccgtatggctgcgcttttgcgccaaaaggccgaagctgcgccggtttttgtgcgtccgcccatggagatggagttcgataacacctacgacctgcaccatgcgccgcaggtgctggcggattactgggccgttctttccggccgcaccaagctgcgccgggagcctacccagcagcagttcgagccgctggtcacagcgcccatggtgtcggtgacgagccgggtggtgtacattctgcggcacctgatcagcggcacagcggcaaaaatgagccagctgttcagccgccagcagacccgcagcaccaacgtggccacctttctggccttgctggagctggtgcgcggcggccgcgtaaagctggacgacgagggccggctgaccatgcagcggggccgcatccaacgtgataaggagaaggaatgaaccagaaacagatccgtgcagccgtggaagccatgctgtttgccagcggcgaccccattggtgccgacaagctggcccaggcggtgcagctgccgcagctcagcgtggaagccgcgctggaagccctgcgggagcgctacgcccgggaggacagcggcctgtgcctgctgcacctgaacacccgctggcagcttgccaccaagaccgagtgggccgactgcatccgccgcctgctggacagccgccgcgcagtgccccttggccccgccgccatggagaccctgaccgtgatcgcctacaaccagccggtgtcccgcgccttcatcgaacaggtgcgcggcgtggattcctcgtccagcgtgtcgggcctgctggaaaagggcctcattgaggaagcaggccgccttgacctgccgggcaggccggtgagcttccgcaccaccgacacctttttgcgggtgttcggcctttcttctctggccgacctgccgccggtgcacggacaggaaacggaaacgaacgcatcaccgacggaaagtgaggggtaacgcatgggagcattcctcgccgcgctgggcgcagtgctgctgttcatcctccgggtgatcggtattctgctgctggtggtgctgatcctactggtgctgttgctgctgtgccccttctgcgcagacctgtgctgggagcacggcgtgctcaccgtaaaggccggtgcgctgggcatcaccttcccggtgttccagtacccgaagccggagccgccgcccgcaccggaaaacccggagccgcccaagggctttggcaaagtgaaagcaaaatttgctgcatggcgggccgagcgcaagcggaaaaaggcagaggagaaggcccgcaaaaaggccgccgccgctgccgccaaggcaaacaagcccgcccagccgcgcaaaaaggcaaagatcacgctggagatcctctgcaccatgctcaaaggtgcgggcactttgaccaaagcggtgttcggtgcgctgcgcatcacaaaaatacaggtgcgccttggtgtgcgcggggaggaccccgccgccgctgcccgcagctacggcaagctgcaggcgtggctgtacccggtgctgggcgtgctggaccgctttctctggctgcagttcgatgagctgcgcatcctgccggactttggcagcgggcagcccaccgtggaggaccgggtgtcctgccgggtgagcgcgcaggcactgttcatcgtccttgcggcggtgcgggtgctgtacgagttctggcgcaaaaaagtattggacatcttcctataatgtggtacactataagggtatccggatctgcagacaacgggcctttgcccgaatcaaaccgataaaggagagctgttttatggctgagcatcccattcagggcctgatgaacgttactatggagaagatccaccagatggtggactccaacaccatcattggcaagcccatcatcaccgaggacggcaccaccatcctgccggtttccaaggtgagctttggctttgcctccggcggcaccgactttgacggcaagaacgccgccaacaaggacctgttcggcggcggctccggtgcgggtgtgaacatccagccggtggccttcctcgtggtaaaggacggctgcgtgcgcaccatccagctgtcggacaacgccgacaccatcaaccgtgccctgaccatgctgccggagctggtggacaaggttgccgccctcatcaagaaggacgaaaagaaggaagagcctgctgctcctgctgagcagtaagtggagggcttggcaccggacactccgtcccgcctgcgctcgccagaccaccagcgtggtgtagccatcgcacttcccggcaggcttttctgtcgattttagtcgcagcctgcactttagacatggcttcgcgcatcttgccggagtatccggtgccgatcccggcaggacggcagggagtttctccagcgaatgtcctgggggtggggccccggcgcgcaagcgttggggcgggactggagccctgcaacggcaacgaccgccgccagcggcggaaacagggagttgccgttggggccgcggccagcaagacgcaagcgatagcgaagcggctgctgggtgccgcaacccgtcgctgttcgcggagaaagctccctgctggcctgctaactactatcgccgtaactgtgagcttccaactcacagttttgatacaggcgcacccgcaccccaaagcaggggagaggtgcgcgttttgagcgccgggaggcgcacaaggagttttattatggcagaagaacgtattcaaaagatcatggctgaacagggtctgtgctcccgccgtgcggcagaacagatcattgccgagggccgcgtgaaggtcaacggccaccccgtcaaggtgggcgacaagatggaccccaaccgcgacgtgctgcacgtggacgacgagcgcatctatatccgcaaggatcagcagatgtactatctggccctgtacaagccccgcggctatgtgaccaccgccagcgacgagctgggccgcaagaccgtgatggagctggtgagcgatatccccgcccgcctgtacccggtgggccgtctggataaggacagcgagggcctgctgctcatgaccaacgacggcgcgtttgcgcaggccgtcacccatccgtcgggcggcatctccaagctgtaccgcgtcaccgtgcagccccgcgccgatgaaagccagatcctgaagctgagcagcggcgttgtgctggacgacggcaccaagaccatgccctgcgccatcaacgttgttaccgacgagccgggccgcaccgtgatggaaatgaccctgaaagagggcaaaaaccgcgagatccgccgcatgtgcgagaccgtgggccttgaggtggtgcgcctgaagcgcaatgccgagggcgtggtgaagctgggaatgctcaagcccggcacctaccgtgagctgaccaaggcagagatcaacggtctgcgtgccgctgccgccaagggccgcgcccagacccgcagcgccgcagtgcagtccaaggctgccgagcgccgcccccgcggcccggtgggcaagggtactgcccccaaaaagcgcaagtaaatacacctgtaaaggggagaagtgtccaaagatgcttctcccctttttgctgctgggtggaaagatgaataactgtcagctcttcacctttcaggtgagaaaaattgcagtccaccgcaaatacactgaaaacggacgcatctgcaacgaaaattgcggtacagccctgcggcaggacgggctgtgcacgcgggaaagacaaagaatacttttgacaacaaaagttcatcttgctgaagcgcccctgttcttcgaccaaatttgtgctataatacaaaagcaacgcttcgctcggccccgcaaagggcagggcagagcagaacggaaaacaaggagtttggaatcatggaaagagaaaaactgaagtcccggctgggcttcattctgctttcagcgggctgtgccatcggcattggcaacgtgtggaagttcccttatattgctggtcagggcggcggcggcgcgttcgtgctgttctacctgatcttcctcatcattctgggcctgcccatcatgaccatggagtttgcggtgggccgcgcttcccgcaaaagcccggtgcgggcctatcaggcactggaaaagccgggccagaagtggcacatccacggctacctcaccctcattggctgctatctgctcatgatgttctacaccaccgtggcaggctggatgctgcactatttctacatgaccgccaccggtaagctggcaggcctgaacgccgatcaggtggctggcaagtttaccgaaatgctggcagaccccggcgtgatgaccttctggatggtgttcgtggtggcactgggcatctttgtatgcgccaagggcctgcagaacggccttgagcgcgtgaccaaggtcatgatgatcgccctgctggtgatcatggtggtgctggccgtcaacagcctgttcatgcccggcgcaaaggaaggtctgagcttcttcctcgtgcccgacttcgggcgcatgaaagaggtgggcgtggtcaacacgctggtgtccgccatgaatcaggccttcttcaccctgagccttggcattggcgcaatgtccatctttggcagctacatcggcaaggagcactccctgctgggcgagtccgcccgcatcgtggtgctggataccttcgtggccatcaccgccggtctcatcatcttcccggcctgcttcacctacggtgtggaccagaccagcggccccagcctgatcttcattaccctgcccaacatctttgccaacatggccatgggccggttgtggggctccctgttcttcctgttcatggcctttgcagcgctttccaccgtgctggccgtgttcgagaacatcatctgctgcggcatggagctgaccggctgcagccgcaagaagtccagtctggtgaacctcgtgctcatcactctgctttcgctgccctgcgtgctgggctacaacgtgtgggcatgggacggctttgccgtgttcggcggcgctgtgctggatttggaggacttcctcgtgagcaacctgttcctgccgctgggcagcttggtgtacctgctgttctgcgttaccaagtacggctggggctgggacaactataaaaaggaagtcaacaccggcaagggcctcaagatgcacgactggatgcgcggttacctgacctgcgtgctgccggtgatcgtgctgttcatctttgcctttggcctctacgataaatttctctgatagttactttggcccctcttactgcaagaggggccttttgcggtagaaaggaaccttccatgcatatcctgatctgtgacgacgatgcggcgttcggcgcgcgcatggcagaatatgtcaccgtctactttaccgcccgcagcgtgcaggtgcacaccgccgtctgcaccagcgcagccgaggtgcttgcaacgccggggctggagctgtatcagctggcgtttctggacgtggacatgcccggtgcaaacggcatggtgctgggccgtcagctcaagcagaagtgccccggcctgatgctggtgtatgtttcggcctatctggaatttgcgctggaaggctacacggtgaacgcctaccgttacctgctcaagcgggacattgcgcgcaccctgcccaagtgtctggacgacctgcttgccgccctgaccgaccagcgcaagactctgacggtgcaccacaaccgcaccgaaacggaaattccgctggatcagatctattatctggaaagcgacctgcgccagatcaacgtctacggcgacattgcccgccggcccatctgcacctactacggcaagatcgccgacctgccgcccatgctctacgagaacggctttttgcaggtgagccgcagcgatgtggtgaacatgaaatatgtgcgcagcatccgcagctaccgcgccctgctgaaaaacggggtggagctgagcgtgagccgcgcaggctatgcggccatccagaacgcatatctggaatggaaggggcagtatgtggatgagtgatgcatttgcggaaatgatgctggggcatctggtgtgtctggtccaggggaacgcctttattctggtggagtgggcctatctgggcaggggaaaactgcgctggccggttctgtgggcagagctgctgtgtatggggcagctgggcctgtcactcgcaacaggaatgtcatttttcaatgtgcagagcgtcctgctcaatgtgctgtacctttttgttacggcgcagctgtttggcggaacctttgccgataagctcaccgcctgcctgatcaacggcaccatgtgcctgctggtggagaacacggtcaactatacctactcctggttcaccggagtgcgcaccggcgaagcatggcagcaccccggctgcctgatcgcgctgtgcgccgcgaaccttatcgtgggtgcagcagttgcgcattccctgtacagctggaaccagaagtgtgctctgcagccgctgcaggcgctggtgatgtcctttttccccggggtggctgtggtgctgaacattgtgctgatggtcacagggacccagcagcccgctacccggatgaccatgctgctcacctttggcatgagcgtggcggtgctggtgcatatcgccatcgtgcagatgttcaacgatcaggtggtgcagcggcagaactcccgctaccgtgctcagctggaacagcagcgtgccgaagccctgctggattcctacacggaacagcgccgcctgacccacgagttcaccaaccacatgacagcccttaccgccctgctggatcagggagatctgaaaggcgcacaggcctacattgccagcgtgagcaaaacggtggcggcgggcaccaccatcatggatacccacaacccgctgctggattctattctgagcaaaaaatacgaagaagcggcaaaagttggcgtgaacatttactttgacctgtgcgatctcaagcggatgcccttcgacagcatggatatggtcatcgtgctctccaaccttctggacaacgccacccgcgccgcagcgcaggccctgccgccggaggtgcatgtgcgcatccgcaagacgccggaagaatacctgatctcggtgcgcaaccgcgtgcaggaagacctgctgctggaggagggcaagctgcccggcaccaccaaaaaggagagcggccacggcatgggccttgccaacgtgcaggacgtgctgcgcaagtacggtgccgagtataccgtgagctgccgcgaccggtggttccggtttacctgcgccatcccgtgcgcagttcatgacatgagcaccgacaatttatgacatgttttgtgcaacaggcacgcaacaatgctatactaaggccagtaaaggtgacctcctgccggggcagggcggatttgcggccaaaggaaaacctggtgaagctttgcccccctgtgcagtgatccgggcagcggtgcgtgttaagctgctctgttttccctttgctcttcgctgtgcagtcctcatgcgctgcgcagctcatctggcggggctttcaacggcgaactttggggtttgctgctgataaagtcactcggtacgtcgcatttctgtccggcaggtgctgcttgtgggaatggagcatctgccgcacagggcatttgcgccggtgagagttccgtcagatttttttattgcaaaaaaagagctgctgtacggcaaaattgcctgatacagcagctctttttctgtgtcgttattccggctttacctgcagctcctgctcgcagtagatgcagcggtatttgccgttggagctcagctcaaagatctggtcgcactcttcctcaatggaggagatgcagcgggggttgcggcattttacaatgttcacaaggcgcttggggggcatcggcttttccttgcgcacggccttgccgttttcaatgatggtcacgctgatgcccgggtcaaggtaggccagcacatccaggttcagccaggaagcatcgccctccaccttgatgatgtccttgcggccgctggcggtcttgctgctgcgtgcattctggatcagcgccacgctggcggtgcggttgcccgcaatgcccagcaggtccatcaggccaatggcggtgcctgccttgatgtggtcgatcacgattccgttctgaatttcatcgatgttcagcatatcagttctcctccttaggtgccttggggtcgcgcaggcccagcagggtcatgatcagtgccatacgcacatacacaccgttctgcacctgctcaaagtaggcggcgcgcgggtcgtcgtccacgtccagtgcgatctcgttgacgcggggcaggggatgcagcacagccatattcggctttgcaaggtccatcttttccttggtgaggatgtagctgttcttcaggcggatgtagtcctcctcgttgaagaagcgctccttctgcacgcgggtcatgtacaggatgtccagctccgacatggattcctccagactgcgggtctcctggtaggggatgccgttggcctccagcacgtcctttacgatgtagtccggcacgcgcagctcttccgggctgataagcacgaaccggatgttcttgcagcgggccatggtcttgatgagggagtgcacggtgcggccgaatttcaggtcgccgcacaggccgatggtcaggtcatccagccgtcccatgcggcggcggatggtcatgaggtccgtcagggtctgggtggggtgctggtggccgccgtcgcccgcgttgatcaccgggatgcgggagtagcgggaagcgcgcagcggtgcgccctctttggggtggcgcatggccacgatgtccgcatagcaggacaccacgcggatggtgtcggcaacgctttcgcccttgcttgcgctggacacgttctcactgggaaagcccagcacatggccgccaaggttcagcatggctgcctcaaaggagaggcgggtgcgggtggaaggctcgtagaacagggtagccagctttttatgccgggccacctcctgatacgcggccgggtcgtcatggatgcggtcggccaggtcgagcagagtggaaatttcctgctgggtaaaatccaacgggtcgatcagatgtcgcatgggtgcatacctccgtcagttttttggtttagagcagcttgcgtaaaatggaaaaatcaaagaagtttgtgtagtagctcagcgaacgcatcaccgggcggcacaaacgattgaaacacacttcgtccagcagcagcatggcctcgcccggagcaaggcgcatggcggagcggatggcatcgtcgccgcagcttgccttcaggtgggcgacgttggaggagatctgctggtgacactcccgttccagaatatcgaacacgccgccggtcaggtcgatgcgggtgtagtctctggcaccgaacagtgctctgggcaggtagtcgatggagtagatcaccggggtggtgtcggccagaatgcgctttttgatgcagatcacgtcgtcgcccggctcaatttccagatcgtgggccagctcttcaccggcacggatgggaaatacctgaatgccgtcggcatgggggtagctgccaaagctgcggatcagcgggtagtattccagcttctggtccagccggctgcgcaggctcagcacagcgcggttcaccaccgtgccaatgccgcgcacgcgctccacataacctgcgcgctccatctcgctcaaagcatcgcggatgacggtgcggctcacgcccagctcagcggcaagatctacctcggcgggcagacggtcggcccgggcatagcgcccggtgcgcagctcttccagcagactggcaacgatgcggtcgctgatcacagcaccgcccaatcggttggaagaggtaagtgcagattccttcatggttcggttcctccgttcacgggcaggggatgcgccccgccgggacttgaagcctgcgccgcacggcacctttgtgaccacgccatacgccgcagacccctttatactttattataacataaattgacatttataaaagcggcatttatactggaaacagcgaaaaagtatgattttattttggagggaaacgcaagatggaagtttttctgcacaagatctgcggccagccggtgcagccgccggtgtccatgcagctgcgccgctgcacgccggagcaggccacggcggtgtacgccttgcagaacgaggtgcgcgccgccatgccggacccggagcagttcgtgccggacacgctggaaaacatcacagcctatgtccgcaaggacctgtgcatcggcgcatggcagggcagccgccttggcgggtatctcatcgtgcgtttctgcgggcgcagcgcacacaactatgcggccttcatggatgtgccgcgcaccgagtgggagcactgggccaatgcggacagcgccatcgtccacgcagactttcgcggcaacggcctgcaacggctcatgctggaagcagcgctgccgcttttcccgaaaaaaatcacccacatcggtgctactgtcagcccgcagaaccagtacagcctgcacaacgcccttgcgtccggttttgccatcgtctcccggcgggaaatgtatggcggccacgaccgctacctgctgaaaaaagacttgtaaaaaaacagggctgcgttcccaaatggatgcagccctgtttttcagtcgatagaaagtttaagcctgtttttcatcttgtgccgcaccaccagcaggcaggccagatgcacggcagccgtcagcacccagctgatggggtagctgatgtacagcatgaacggtgtgcggttcagctggaagatggtggcgatccacaccagccgcagcaggcagctgcccacaaggctcaccaccatgggcagcacgctgtagccaaggccgcgcaggctgctggccagcgtatccatgatgccgcacagcaggtaggtgccgcagatcacccgcaggcgctcgtatccggcggcgatcaccgccgcatccgaggagtagaagtgcagcagctgggtgcctgccagcaccgcaccgccgcccagcaccacgccggtcacgatggcgcacagcaggcagttgaggacaacacggttcaggttctggtacttgcgcgcgcccatgttctggctggtaaaggtgacggcagcctgcgaaaaggcgttcatggcggtatagacgaagccctccagattggcggaggccgaactgcctgccaccaccgtggaaccaaaggagttgatggccgactggatgaccacgttggacaggctgaacacggtgctctgcagaccggcaggcaggccgatgagcaaaatctgcttcagggcacccatgtggaagcccagatgatgcagatccagatgcagcgcgccctcctccttcatcagcatccgcgtcaccatgcaggcggaaacggtctgactgatgatggtagccagcgccacgcctgccacgctcatggaaaagccaatgacgaacacaaggttcagcaccacgttgatgagaccggctgctgccagacagtacagtgggcgcttggtgtcgcccacggcacgcagcagcgcactgctgaagttgtacagcatggtcataggcatcccgatgaaataaattttaaggtacagcgcagaaaggtcgatcacatcctccgggcagctcatcagctccagcagcccccgggctgcaaagaaccccaccacagccagcagcacgccgctgacaaggcccagcgtcaccgaggtctgcaccgtgtcctgtacgccgtggtcatcctttgcaccaaagcagcgggccgccaccacgtttgcgcccagcgaaagccctacgaacaggttcaccagcaggttgatgagggagccgttggagccgacggcggccagtgcggtgctgcccgcaaagcggcccacgaccactacgtccgcagcgttgaacagcagctgcagaatgctggaagctgccagtgggatggagaacaggatgatcttttggagcatcgggccgctggtaaggtcagcggagcggcttgtctgagccatgagaagagtacctcctttttatcgtttacgcggagaagccgttttccgaagcattgcacactgcttaggaggacagcatctgaaatgtaaatttttcgtaaataaagggaaccgaaggcatattataacgcgcggcgcagaaaaatacaagtggcaccgccgaaaaaatgcaaattcccggcggtgccgcttataaaacaatcaaaaacatttcttgaagcacggcagaagagtttattcttcctgcaaagcgtcccggaacaaaacccgcagataatcccgcccgccgtagagaacgcggtcaatataaatatcgttccgaaaagcatgataaaaaatcagatactttccgctgacgagaaagcgctcatccaaataaagttcatgatccagcggagctacggaagaaagcaatgcaccgctttccgggaacagctttaattgttcagcagcatccatgatgcggttcagaatgcgctctgcagaaggcagattttgcaagtcgaacgagatataatcccagatgtcgtccaggtcctgacgggaacgagttgtataaatgaggttattttccattggctcttgcgcggaaatgcgccctcatttcttccggagtgtaaagcttttccgtctcaccagagcaccgtccttttgcaatttcattcataagccggatggtagcctgcgttttctcataatcttccatgtccagaatggcatactttccacggccgtttttggtaagaaaaaccggcgatcctgcttccacatcgcgaaggacttcgttgtaattccgcaggtcagaaataggtttgatgttcggcataagatcaactcccttcatctgtagtataacaaattctgctgtgaaattcaacgtaaaatttgcagctgataaaagtgagattctacaaaaaaaccgccgtcctgtcgggcagcggtcttctgataaaataagcttacgcttccaccgtcttccagtgctccggtgcggcaaaatcgctcgtctcgccgtcatcggtgtacatccggcagcgggcgctgccattttcgtccgggcaggcccacagggtcaagctggtctcgtccagctgggcggtgcagctggcgggtcttgccaccggcaccgcatggcccggacggatgaacagcagcacttcgtccagtgcgcagcggacgtagtggtgcccggcgggcagaagctcggtgtcgtagtcgtctacactgcggatgcggtagagcttcattgcttccggcaggtagacgtgccgtccgctggcgttctgggtgtagacaggcgctaccatcacaccctcgcccagcagcagctggtcctgcacctcgcgggcatccgggtcagcgggaaaatcaaagcccaagggccggaagtagctggtattttccaatgccgccttcatgaaggtactataaaggtagggcagcagggcataccgcagccggagcatcttccgcagggcaggcagcatatccgcaaagcgatagtattcctgcatccgggagccgtcggtggcgtggttgcgcatcagcggcgtgaacaggccgaactccagccagcgcagagccagatcaggcgtagtatcgtaggaaaaaccgcacaggtcggcaccggtataaagaaagccgcacagctgcacgttgggcatcatctggatattggccagaagctgtgcccatgtggaagcgttgtcacccagccagatgccgccgtagcggtggctgccgatgaagctggaacggctgtagagcagcgtgcgtctgccgggccgcaggcgggcaaaggcttcgcctgccgcacgggtcatattgccgccgtagaggttgtgcaccctgtcatggcgcacccgctggccgtccacatcgtggtagaagctggcgtagtcctccggggcgttcatcaggcccagcgcaccgcccaccaccttgccaaagaattcatcctgcacgatgttgtccttccggctcagttcgtccatgctctcaaagaaagccttgagccgctcgggtgagtaaaacagcgcaggctcgttcatatcgttccagaaaccctcgatgccgcagtcggtcagtgccttgtactgccggccgaaccactcccgcacatccgggcgcaggaagtccgcaaagtaagccttgccgggccacaccgccgccacaaagggggtgccgtcggctttggtgcagaaggaaccgtttgcaaggccctcggcacagacggggttttccgggtcgatgcgcacacctgcatcgatgatgggcaccagtcggatgccctgtgccttcagttcggcgctcagggcggcaaggtccgggaagcgctgcttgtttacggtaaaatccgcgtagtcctgcatgtaatcgatgtccatgcagatcatatccagcggcagatcgttctctttgtactggcgggccacctcccgcacgtcctcagcggtcttgtagccaaagcggctctgtgccagaccaaaggcccacttgggcgggatatagctgcggccgatgagctgccggaactggcggctgatagcgttcaggtcgtcgccggtgatgatgtaaagctcatagtccggctcttcggtggcaaagcgcagggcatcgtattcggtgtagccgatatcgtaacgcactttgcccgggaaatcgatgaacacaccaaagcattcacggcctgcgccgccgtcaatgagcagaaaattgtgcgcaccatagtaggaaagcttatcctcgctgtggcgggcttcatcggtgttgttggtcacgtagtgccagccgcgcttgttgatgccgcggggcatttcgcccagaccgtacacgatggcatccggagccatccggtaggcccagccgtcttcttcggctgtgaggaagggcaccggcccggcggaaactgggatctcctgcaccacactgtcggtgggcaggggcaggccaaaacggaaacgctggatcatagggaacctccttgtagcatccttgccctctccgtcacgcctttcggcgtgccacctcgctcaaagtgagaggttttgccaaaggccccatctccgagggggctgtcgagcgaaagcgagactgggggagtggacttctcattttctttatcttaccccgggccacgctgcaaaacaagagacaaaaccggcacttttttgccacaaaaccggcagaacgcagccaaagcataaaaatatcggcggcaggcggcggatgcaattgcaaattccggcccatactgttatactggaactgctactttgaatcggaaaatggaggaaacccatgtatcgcaatggaatcaagcgcctgctggcggtggtgctgtcgctgtgcggcatgatctgcctgtcctggctttttctcattctggccgtcgccatcaagctggactcgcccggcccggtgttcttcaaacagaagcgtgtgggcattggcaaaaaacacttttacattttaaagttccgcaccatgcgcatcgatacgccccacgatatgcccacccatctgctgcacgacccggaccagtatatcacccgcatgggtcatttcctgcgcaagaccagtctggacgagctgccccagctgtggaatatctttgtaggtgatatggcggtcatcggcccgcggcctgctttgtggaaccagtatgatctgctggcagagcgcgacaagtaccatgcaaacgatgtgcgcccgggcctgaccggctgggcacagatccacggccgcgacgagctggaaattgccgagaaggccaagctggacggctggtatgtggagcatctgagctttgggctggatgtgaaatgcttctttggcaccattgccgcggtgctgaagcacgacggcgtggtggagggcggcaccggcactctgcacgaagagaaaaagtgactccttctgccgcctttggtgacatctctccccggcgcgggaagagtctttctcaggggggagcctctggcgaagaaggagagtttgccgccatgccaaagcctccctccctgagggaggtggcatcgcgcagcgatgacggaaggagttcgttcgccatatctcttgatttatccccggaaaagcgtataataaaacagtacacaagacgtcaaaggaggattcctgtattatggaacgcacctatatcaacgaggctcaaaaggccatcggcggcacggtcaaggtgcagggctttatcgagaacctgcgcaacagcaagtatatggcctttatcgtgctgaaggatattaccggcaagctgcagatcacggtggaaaaggaagatcaccccgatctggtggataccatcgatcagctcaccccggattccgtcatcaccgtcaccggcaaggtagtggagaacgactacgtcaagatgggcggcgtggagatgatccccgagagcatcgagatcgagagcatcgccaacgctctgcccatcgtccgcaaggagatcgcagccaccaagaaaaagaaggctgtggagcgctccagcatcgatcagcgcattgattaccgctggatcgacctgcgcaccgacgagaaccagctcatgttcaaggcacagagctgctttgtgaacgccatgcgcaagttcctgctggaccgtaacttcatcgagatccacacccccaagctgatcgctgctgccagcgagagcggctctgaggtgttcaaggtggactactttgaccgcaacgcctatctggcacagagccctcagttctacaagcagatggccatggctgcaggctttgagcgcatcttcgagaccggccctgtgttccgcgccgagaagagctacaccaacaagcactccaccgagttctccggcttcgacctggagttcagctacatcacttcctataaagacgtgatgaagatggaagaggagctgctgactgccggtctgcaggccgtcaaggacaactatggtgaccagatcaaggagatgttcgggcaggaagtgatcgttcccaccactccgttcccggtggtcaagctggcagacctgtacaagggtctggaagaagagttcggctacaccgtcgatgagagcgagaagggcgacctgaccacggaggccgagcgcctgagctatgagtgggtgaagaagcactacggccacgagttcctcttcatcaccgattattccgccgagaagcgtgcgttctaccacatgcgcgacgagaacggcgtgccccagggctacgacctgatctggcgtggtgttgagatcaccaccggtgcccagcgcgagcaccgctacgaggtgctgaagaagcaggccgaggaaaagggtctggccgatgatgtcaagttctatctggagttcttccagtacggctgcccgccccacggcggtttcggtctgggcatcgaccgcctgaccatgctgctgtgcggcctgaccatcaaggacgccgagttcctgttccgcggccccaaccgtctgaccccgtaattttatagagatcataccgagagctgctgtgcattttgcgtggcagctctctttttgttggacgatttaaaatggtggactcaccctctcagtcaaatccttcggatttgccagctcccccgaaagggggagcttctgacgcatccgcaaggcttgcattttatctggaaactgcgccgttactgcaaaaagctcccccttcgggggagctggcgaacgaatgtgagcctgagagggttcagcatgctgaaagcaaacgaaaaagcctattctacagcgccgcgctttcgcagaaagcggcgctgtaaatgctgtttccctctacgaccccatctgtgaaaaagcaattcaggaaaatccgcagattttcctgaattgcaattataaaataaattttccgctgaatatgcccagagaagagcggagggcattcaaaatcgttccggcataatgccccgtcctgtttcatacgattacaacaagcggaccggaatcctgtccggtgcacagcgcaaacgggaaggggagagcaatttggcaaatcaggaacagaagagcatctgccgcgagatcggcgcacgcaccggcggagatatctacattggggtggttggcccggtgcgcagcggcaaatccacctttatcaagcgtttcatggaacagctggtgctgcccgccatcggcccggcggctgcgcgggagcgtgcccgggacgagctgccccagtcggcagcgggccgcaccatcatgaccacggaaccaaaattcatcccggaaacagccgtgcccctgcagttggagggcggcggcgagtgccgggtgcggctcatcgactgcgtgggttacatggtggagggggctatgggccacgaggagaacgacaagccccgcatggtcaaaagcccgtggttcgaccacgaggtgcccttcgaccttgccgccgagaccggcacccgcaaggtgatctgcgaacattccaccatcggcatcgtggtcaccaccgacggctctgtgagtgacatcccgcgggagggctatgccagaaccgagaagcgcatcgtggaagaactgaatgcactgggcaagccctacattatcctgctcaacagcacccacccggatgcgccggagacgaagcagctggccgagggcatggcccgggactacgaccacaccgtgctgccggtgagctgcgtggatctggacgcggaggcactcggcagcatcctgcggcaggtgctgtacgagttcccggtgcaggagctggattttgccctgccgcgctgggtcacgatgctggaaaacggccactggctgcaaacgcaggtgtacgatgcggccatgcagctggcggcaaaggtctcccgcatgaaggatgtgccctccggaacagacgcacctgcgctggaatgtgacgcggtgcagcgctcggccatcagcggcatcgaccttgcaaacggcagtgtgcgcatcacggtggagctgaaaccggaaattttctatcaggtgctgagcgagcagaccggccttgccattggcgacgaagcgggcctgatgccctgcatcatggagctggcaaaggccaaacgggagtacgagaaggtacgcagtgcccttgagcaggtggaagccaccggctatggcatcgtgatgcccacggtcagcgagctgaaactggaacagccccagatcgtgcggcagggcacgaactacggcgtgcggctggaagcctgcgcgccctccatccagatgatgaaggccaccatccacaccgagatcagccccatcgtgggcaccgaaaagcagagcgaggaccttgcccgcagcctgctggccggctttgaggacgacccggaaaagctgtgggaatccaacatctttggcaagagcctgcacgagctggtgaacgagggcttgcagaacaagctgctgcacatgccgcaggaggcccgcacccgcctgcaggaaacgctggaacgggtcatcaatgagggctgcaccgggctgatctgcattctgatctgaccgctacaaaacagaagagggaagcgccgcgcgggtgcctccctctttatttgttcacttttcttcttcggtcagcttattgatgagcatttggtagatctcgttgcccttgaggatgaactgcttttttaccagctcggcggtcagccggtccggtgtgccgagatccagacagaacagctcactgtccagccctttcaccgtgcagcggatggtgcagtggccgtcctctttttcggtaatgctggcactgtacttggcttccttgcgggcccatgtctggcagcgcagcacagcggccacagcgcgctcccgcacactgcggggcaggtcgtaggcaagctcctgcgccactttgcggcccttctcggtaatggtatagctgccctttgtcagggtgacgagctgctgcttggtgatatcgtccagacacgagccgatctcgaaatagttcaccagcgcttcttccatcagggcgttttcgatctcctgccgggtaatgggtccggcatttttgaccagatagcacagcagcagccggatctcggtgctgctggtcaacccgccgggacgtacaccggcagtaaaagcatcattggcggccatcgttccatacatcccccttgcattccttttcttttatagtataaaggctttcacgccggattgcaagccgcagcggcaaaatctgtctcaatgcgcttggggctttccggcgtggagtacacccagtggtccagatggccctcggtgatgaaatacttcagctcgaaccggtggcgctggctcagggcatggttcacgatcaccagcttgatcttcattttttccggcaggatgtttttgatgtagacgctcaccgcctgcccgggcacaaggtcggtgcagctctcggcaaggcccgcgaggttgggcgcgatctcgataaaggtgccgtattcctccacgctgcgcacgatgcccaccacggtctcacccacggtgaacccggccgcattttcctcccatgtgcccagcagttcccggatggtcagcacaaagcggccctgtacatcccggttcttgacggcgcacaagatctgctggcccacgctcacccggtcggcgggggaggagatgcggctcaccgacatgcagtcaatgggcagcagggcactgatgccgcagcccacatcacagaacgcgccaaacggctcgatatgggtcacggtgcagggcaggatatcgccgggctgcagggtgtccagatagtcggccttgcacatctgctgcgccagtgcgcgggagagccggtagaagggctgaccgttctcgtcggtgtccagcgcctcgatcacaaagcaggtggggcggcccaccctcgtcagcaccgcaatgtcccgcacggtgccgtttgcggcaccatcggcgcactgggcaaagggcatcacggcccttacaccgccgatctcgaaccgcagctggcgctgggtatcaaaggccagagcagtggcctgcaggatctcgcggtttgccatggcggcgcgcagctcagcgggggacaggcgcgcagcagaacgatagttgccttcggtacggtaagcttgcatcatctttcattcctctttctctgctttttaggccgtgcttggaacggcagcggcctttctgttaaaacttatgcatccgcatgggcggatatttgcattttgtgcggctttgcattatactatatctgtatgcgcagcaaaccggcacgccgggctttgcgcacacaccgcctgctgttttgggcaggcagaagggagaagcagagctatggacattgctgtaggcgataccatcctcacccgcaaaaagcacccctgcggagcgtccagcttcgaggtactgcgcgtcggcatggattttaagatccggtgtaccggctgtgggcgcgaggtgatgctgccgcgtgctaaaattgaaaagaacatcaaaaaggtggtaaaacccgggcaggcctagcgcccggcgcagcacgcatccggggcggaaaggccccggaaccgttcggctgcacgaacatgaatctgagtttgtaaggagaactgccggaattatgccgaacatgtttacccagatggatgctgtctgccaccgctttgaagagctttccatccgcctgaaccagccggataccgccgcagaccctgcgcttttccgcaggctgatgcgggagtaccacgatgcagaacctgtggtgcaggcctaccgcgcgtggcagaccgcacaggatcatctggcacaggccaaagctctgctggaagaaccgggcgcacttgacccggacttcaagcagatgatacagcaggaaatcagcgaaaaaagtcaagatgtggaaaagctggaaaataatctcaaaattttgctgctgcccaaggatgtgaacgatggcaaaaatgtcattgtggagatccgcggcggcgcaggaggggaggaagctgccctgtttgcccacagcctgctgcgcatgtacaccatgtatgtgcaaagcaggggctggcagctggaaatgctcaacctcaacgagacggagcttggcggcgtgaaggaagccatcttttcggtggacggtgccggggcctacaaccgcctcaagtacgagagcggtgtgcaccgtgtgcagcgtgtgccggagactgagacgcagggccgcatccacacctccacggccacggtggctgtgatgccgcaggccgaagaggtggactttgcgctggacatgaaggacctgcgcatcgacaccttccgctcctccggcgcgggcggtcagcacatcaacaaaacctccagcgccatccgtgtgacacatctccccaccggcatggtggtagaatgccagaacgagcgcagccagttccagaacaaggacaaggcgctggagatcctgcgcagccgcctgctggcccagaagcagaaacagcagcaggatgccatcaacgccagccgtcaggggcaggtgggcaccggcgaccgcagcgaaaagatccgcacctacaacttcccgcaggaccgctgcaccgaccaccgcatcggcctgaccgtgcacaatctttccaagatcatggacggcaatctggacgagctgatcgacgcactggccacccgcgaacaggccgaaaagctgcaaaagctcaacgagcagggctgaaatgtggttttaaaataaaacgatatcctgtcgataaatgctgaaaagcataaatactttacagatagaaagaacgatgatccgtatggaaatgaaaactgaaattttgcccgcatcggacgaaaaaagcattgaaaaagccgctgccctgctgcagaacggtgagctggtggccctgcccaccgagacggtttacggcattgctgccgatgcccgcaacggcgaggctgtgaagaagatctttgtggccaagggccgcccgcaggacaatcccctgatcgtccacgtcaccggaccggaaatgctgcccggccttgtcagcgaggtgccggagcgcgcccagctgctgatggctgcgttctgccccggcccgctcaccatcatcatgccccgcggcccggaggtggcagcggagtgctgtgccggtctggacaccgtgggcatccggatgcccagccacccggtggcccgcgccgtcattgaaaagagcggctgcgcctttgctgcccccagcgccaatctttccggcaagcccagccccaccaacgcgcaggatgtgttcaccgatatggacggccgcctgccgctgattttggacggcggcgagtgcgacgtgggcgtagaaagcactgtggtgtcggtggtgggcgaaaagcccaccctgttccgcccgggccacatcacgctggaagacctcgagcgtgccctcggcgaagaggtggaagtgtccaaagccatcctcgaaaagctgccggagggtgctgtggtgcgcagccctggcatgaagtacaagcactacgcccccaaggcggatgtgaccttgctggacggcacctttgagcagttcaaagcctatgtggatgcccacgccgagcagaatcccagctgcctgtgctttaccggcgaggcggaaaagctgggtgtgccctgcgtggagtatggccgcgagggcgacggtgccgatcaggcaaagcacatcttccgctgcctgcgcgcgctggatgagcagggcgatgccgtggtctacgcccgctgcccgcagaaggacggcctttccatggcggtgtacaaccgcctgatccgcgctgcggccttccgggtgatcaagctatgatcgcgcttggcatcacgggccgcagcggctgcggcaaatccacggtcacggcggtgttttcggcccacggtgtgccgctggccgatgccgaccagatcagccgtgagattttactgcccggctcgccgctgctgccccggctggcccagcggttcggcgcagacattttaaaagcagacggcacattggaccgccgcctgctggctgaccgcgcctttgccaccccggaaggcaaggcggcgctggacagcctgacccacccggagatcgtgcgccgcatccgtgcggcaaagcaggcagcacaggatgccggtgcaccgctgttcgtgctggatggcgcggtcatcgtggggactgcggcgcaggccgagtgcgaccgcctgtgcgtggtcacggcaccgtttgagaccagtgtggcccgcatcgtggcccgggacggcatctcggccgagatggccgcccgccgcctgaacgcccagacaccggaaagcaccctcaccgcgcaggcagactatgtgctgcgcaacgattccagccttgcgcatctgcaggctgcggcagagcagctctgcacaaagcttctggcagaaggaggtgcgggaaaagaactttgaacaaacgatataacgaacaagatcctgcaccgcagtacgacccggagacggcccgcatccgccgcgctctccgcgcccagaaggcacgccgccgcaaaaaaatgcgcagccgcaggctgttcctgctgggcatggcgctgatcctgctgtttgtgctggtgcccaacttgtggggcagggcagaacggcttttatacccccgcaagtacgaagcgctggtggaccagtgggcggagacttacggccttgacccgcttctggtggatgccttcatccgcaccgaaagcggctttgacccgcaggccacctccactgtggatgcccggggtctgatgcagatgaccgaggagacctttatctggctgcgcagcaagatcgcaccggacgaaggactgctttttgcaaatctctacgacccggagaccagcatccggttcggatgctattacctgcacctgtgcatggagcgctacaacggcgatgttgccactgccgctgccgcttatcacagcgggtggggcacggtagatgctcttttacagatggaagagcactccgcagacggcgaaacgctgcagggctttccctataaccagatgaaccactacgtaaaaaagatcacttcctgctatgcgcggtatcagcgtatctatgcaggaagctgagaggagataaggaacatgagcgagaaacttaccgcaaagcaggctgccgaacagctgctttacaagccggagtacgctgccgacaagagcgccgacgtgaaggagaaggctgcagcctttgccgaaggctacaaagccttcctgaacgctgccaagaccgagcgcgaagctgccgccgccagcgaaaagctgctgctggaggccggttacgaaaagtttgagccgaaaaagacctatgcccccggccagaagatctactttgtgcaggagcacaaggcggtggtggccgctaccatcggccggaaatcttttgaggagggcttccgtctggtgatcgcccacatcgacagcccccgtctggacctgcgcccgaacccgctgtacgaagcaaaccacctcagctacttcaagacccactattacggcggcatccgcaagtaccagtggggcaccatgccgctggccatccacggcgtgttcacccgtgccgatggctctagcgtgtcctttgcagtgggtgaggacgagaatgaccccgtgttctgcatcaccgacctgctgccccatctgggtgccgagcagaacgaccgcaagctcagcgagggcatcaaggccgaagagctgaacgtgctcatcggctccgacgctgtggaggatgccgacatcaaggaggccgtcaagctgaacaccctgatgctgctgcacgaaaagtacggcatcaccgagcgggacttcacccgcgctgagatcgaggtggtgcccgcccataaggcccgggacgtgggctttgaccgctccatggtgggcggctacggtcacgatgaccgtgtggacgcataccccgcccttatggccgagatcgagacgaaagatcctgtgcacaccaccgtctgcgtgctgaccgataaggaagagatcggctccgacggtgtgaccggcatgcagagcatgtatgtgttccactttatgcagctgctgtgccgcgccgccggtcaggacgacatccttgccttccagaacagcgtgtgtctctctgccgatgtgaccgccgcctacgacccctcctgggcaaatgccttcgagccgcagaacggtacttacgcaggccgcggcgtggccttcttcaagtacaccggcagccgcggcaagagctctgccagcgatgcttccgctgagctggtaggggacatcacccgcctgctggatgccaacggcgtggcatggcagatcggtgagctgggccgtctggatctgggcggcggcggcaccattgccaagtacgtggccaaccggggcatcccggtgctggacatcggcgtgccggtgctgtccatgcactcgcccttcgaggtcatccacaagaccgacctgtacatggcctaccgcaccttctcgctgttctgccaggctgagcagtaagttctgtgcctgaaaaaatatccgcagcgcttcccggtttgcaaaaaccagcggaaatactgcggatattttatttttggcgcaaaaagcttgaccttcaaccggctttcaggtgtaatgtaagggcggaggtgaagcaaatgaacatcaaacaggcttcgaaacagagcggggtgtctgcccccaatatccgcttctatgaaaaagaaggacttctgaatcccgcccggctgcctggcaacgactaccgtgattacacggaacaggacatccgcactctccggttcatccggatgctgcggatgctggatgtgccgcttccggtcatccgatccgtgcttgcaggcgatgcatcgctggggagtgtcctgcgggagcaaaagaccgcactggaacagcgcgcaaagcagctggaaggggcggcgcgtttttgtgcagaactggcccggcaggacccgtctgtggcatcactggatgtggacgcctgcctgtcccggatggaggaccctgcgcagccgcagacgtttttctccggctgggtgcaggattaccgcacgctggcgcaggtgcagcatcagaagcactttttctttatcctgcagggcagcatcaacacgccgcaggagtttacggcagccctgcaggcgtatgcagaggaacgcgggatgcaactcagcctgaccaaagagggaatgtacccggagttttcgttggacgggatcttgtacaaagcctaccgcaacccgggcaagtaccgtgacgaggtctgctgcgacgccgtccatccggaacagctgaacaccgggctgccgtcccggcgggaaaagctgctgcgcatcgcgcgtatcgtgctgccgccggtgtgcacctttgccgccatcatggcggcagggtgggtagtcaccggcggtgcaggctggctctggctggcagcactggcagcggcaggggtcctgcttggccgcggctttgaacaccggctgtaactgggccagtctgctcagcttagcggcagagcctcggcaacggtcaaaaaggtatagccgttgtctgcataccaccggataatgtccggcagtgcttcggcggtggtgtgtgtggaggaagaatcgtgcatcagaacgatgcagttcgtctgctgcccggtctcgtgcaccacattgcggtaaatggtgcccgcgcttgggtgcccgcccacggcatcctcggcgcacacgttccagtccacccaatgccagcctttctgctctacttcggctttcagctgcttcatcaggcctttcccgccgtagcgtcggctcaccgtgttggtgctgccgccggggaaccgcagataccggatgctttctgcgtccacatagggagcaatgcgctccttcagcagtgcaatgtccgcccagtaggcttcgctgctgcggtagatatcgctgtactcgtgggaagcagagtgcagtgcgatctgatgcccggcgctgaccgcttcggtgagcaggggcagatacttctcgttgtaaccggtagccaccacaaaaaatgtggcgtgcactccggctgcgttcagcgcgctgagcacatccggtgtggtcttgctggggccgtcgtcaaaggtcaggcagacccacttttccggcagcggctgggcagcaggctcctgctgctcctgtgccagagccgaaacggcgggggagagcatcgaagtgtccggtgccggggtaagatcctgcgcctgacatccggtgacgaccggcggcgcagcagatacaaaccccataatgagggcgaacagcatcacggccgcaactctggcccgcctgcgccgtgcgagatattctgcaagcttcaagagcaaaacctcctttgtctgtttggtttgctcttatcagaatatgaacgacggcggattctatgaaaaaaatcagcccacccgctgccgtttatccagtcgcatcttgtcggcgatcatggcaatgaactccgagttggtgggcttgccgcgcagattgtggatggtgtaaccaaagtagctgttgagggtgtccacatcaccccggtcccatgccacctcgatggcgtggcggatggcgcgctccacccggctggcggtggtgccgtttttcttggcgatttccgggtacaggcgcttggtcacggcgttgatatattccggctcgttcatggtgagcaggatggcatcccgcaggaactggtagcccttgatatgggcaggcacgccgatctgatgcaggatctcggtaacggtcagctcatcactgtccacactggtgtgcaggatgtgcttttccgggccaagtgccgccttgagcacccgtgcggcaagcacggtctcatcaaagggttttacaaagtagtaggcaaagccttcgtccagcagctcctgaaccatctcttcgctctggaaggcaccggtcacgaagaaggaggtgtgccgctcaccggcggcattgtagcgctgctttaccgcaagggcatccagaccgggcataaaagcatccagcaggaccacctgcgggcgcacggtgagcattttctgcaggaccttgttgccgtccttttccacaacggtcacgtccacgcccttctgctccagcgcttcgcggcaggcggcagtgaacggggcaccagtatccgacatcaaaaatctaactttgtccatggttgtttcctccaatgtgtgcagttcccttaacaccatggattttaccataattttccagaactttcaacggtttatattggtaaattttggcaaagaaaatcgaaatgcgcaaatttttttgcagatcagctttatggctgcgcagcatcgtctgttttttcaacagcgcgggcctgcttgagcatggtctgagcaaaaatgccgtagccccgcgtggggtcgtttaccagcacatgggtcactgcacccaccagtctgccgttctgcaggatgggactgccgctcatgccctgcacgatgccgccggttttggcaagcagctgccggtcggtcacgcgcaggatcatgttgcggtgggggtctgcgtcgtttaccttttcaatgcggatgcggtatgccttgggcacctcgccgtccacagtcgtccagatctcggcatcgcccggcaccacctcctgcgcaaaagccatctccagctccgggccggaaaatgcagcccgtgttctgccatagaccccggtcttgctgttgatgcagatgctgccaagcgcatgggtgctcagaaagcggcccttcagctcaccggggctgcccacggtgccgctggtacaccccacgatctggcaggggacgatctcgccgctgcgcagggccacgctctcaccggtgtcgctgtcgctgatggggtggccaagcccggcaaacaccccggcggcattgtccacaaaggtcatggtgcctaccccggcggaagaatcccgcacccacatcccggcgcgccactgcccggcggtgctgtcccacacgggggtcagccgggtctggaattgctcaccattgcggatatagaccacctgcaccggcgcgcctgcggccgtttccagagcatcgtgcacggcatcgttcgtctcggtcagggtgtcgtccatgcgcaccacccggtcgcccagccgcagcccggccttcttggcggggttcgcggtgccgtccggggtgttcaggtcggaaaagcccacaatgagcgcaccctcggagaacatcttaacgccgaaaggcgtaccgcacacggttaccaccggacgtgtttccaccagagcgcgcacagtcttgacgggcagccacccgccaatggacaaagtggcctgatagctgcccgcagcctgcgtgctggccgcgttgcgggagccagcggtgcgcagcggctgcacataggcaaaacggggcagggtaagggtctggccgggttccagcaaaatttcagcaggcagactgtgccacagccagcccagcaccgccagcgcggccaccagaagataagctgccgcaatgctgccagcgcggcgtagttttgatctgcgcatcggcaaaaagcccctttccgccatggaaaatgatacgatcgtccggcgatagtatgcgctgtgaagggcggaaatatcaatgcagtgattgacttttgccgccggaactgatactatattaaggcggtttggccgcagctgcagaatagaagaatacgcgggtatggtggaattggcagacgcgcaggatttaggttcctgtgccgcaaggcgtgtgggttcgacccccactacccgcatacaaagaaaagcgcgttggttcgtacagaaccagcgtgttttttcttatcatggtaacacttttggtaacactattaagttttcagactgctctcaccagcgcattatacagcatttcaatgaactgcaccgcgctgggcgcaccggtcagcggatagcctgccagctgctgcacatactccgggtttgtgagccatgcacctttagctgcccggcggacagcgctttgaatcgcttttggctcacatcttctgcggtcggcgataggggtatagatatctttctccacggcctgcaggcggtcttcctgctcacagaccagctcaagacactggcacaggatactgtaggcgctcagattgcgtgtgatgcccatcgggcgcagcaaatcattgacctgagtggacaattcggaaacgatcatagttgacacatcctttctatgcgtcaactctaaccgaaaaatacttaaaatttaccaattacgtcgatatacgtcgtaaagcgtcgaaacacgccaaacaaaaacagccccgaggaaccgtcaggctccccggggctgctgctatgtatggctattttgggcagggcggcttacttcccc

SEQ ID NO: 1240 - DNA, 431 bp, Unknown
  gut microbiota DNA sequence
gataccggcggtgaccagctgctccacggtctggctctcgatgggcagcacgggcttgcccagtgcagacagcacctgattggtcagggccagcagcaggcaggcggtgcgggcaatggtacctgcggagatggtgggtgcgttgtaggtgtgtgcgttcatagtcagttcctttctctttcgtgttcgtctgcttctaaatcagcgatgcggtggttggccaccttcatctgctcttccaaaatggggacgcggcgggcaaaattgttgtgttcccgcacctcgcgggtcagctcttccagcttggtgtcggtcacggcctgactgcggctgttggcgatcagcacgccgatcagggtcaccgcaccggcaaggatggctgagatgatgctttccactggtctcaccccctcacagtgtccaccggctct

SEQ ID NO: 1241 - DNA, 653 bp, Unknown
  gut microbiota DNA sequence
cggcccacgccgccccagccgggcatcaggctctctacgtaggcggccacagccagcgggtcggtatcctgcacctgaatgtcagcggcccggcccagcaggtgctggctggatcttgagccgcccaccctcgtgttgtggctggctgtgcggtagccgctggtgatggtcaccggcttgccgaagtgctcccggatgcactgcagcagcaccacaaggccttcgtcaatgaggatggtgtcggtaccgtcgcggcagcggaactcccgcacacggaatgcgggggagagctgctttgcgccgtccttcttcaggctgtactgtttgatcgccatatggatcacgtcctttcacggcccggtcaggcgctggtcttttcgttcagcatctcggtcagctcggcatattgctcgtcggtcagcttggcggcggcgtagaagatatccagcttcttttccataccggcggtctggccgcgctcgatcatgcgcttgcaggtgttataaagtgccatagtagtcattcctttctgtttatgcggtggtttcatcatcggtcacgcccagctccaaaagagttaggcggtagtcctggtcaaggttcaaagcgtctgcgtcggcaagagcggcattcagcgccgccaccgtctccgg

SEQ ID NO: 1242 - DNA, 531 bp, Unknown
  gut microbiota DNA sequence
ggggcggcgaaaagctgctggcccagctgcgcaccgggtccatcgagtttgacgtggacgatgataccctgcaggtgggcgatgtgctgagcgcaagcctgcctcagctgggctacaccgccatggtgcgcgtggccgacatcatcacccagagcgaggacagcggcaccacccgcacaatccggctgggcacgcccacatggcacaagacctgaaaggaggactttatggctgatatcattacttaccccgaaaacggcattacctacgatgccgacgacgcttcgggttacctcgccacccgcctgagcggcgtgtacagcgccgaggaggatttctccgtcacggcacagggcggcctgagcgtacaggtgagcgccggtcaggcatgggtgcgcccggcgcggttcaagggccgcagcatcatcatggagcagcccgccacactgcccctgaccgccgccgatgccgtgcgcagccgcatcgaccgcgtggtgctgcgctacgacgccgccgccaaaaagaccagcc

SEQ ID NO: 1243 - DNA, 340 bp, Unknown
  gut microbiota DNA sequence
cttcttcctgcgcggccaactcttcgtccgtataacggatgtatctctgcaccggcacctgttcggtccatgcggcctgcgcaggcacgcccggcacatccaccacccgctgcacgtccttgccgccgttggggtactccgccaccgtctcgtagtggctcacttcctccacgccttccacggcgggatgctccactggctcggtgtcgtccaccagatacccaagcgtcaggtcagggttttcaatggctgcaccgttctcgtcaatgatcttcatggttcaaaacctcctttctcaggccacgcgccgccagatgtgcacatagtaggcggcaggctg

SEQ ID NO: 1244 - DNA, 618 bp, Unknown
  gut microbiota DNA sequence
aactgaattcatcacgagtaattatggcacatcgtggccgagtttttgatagttggtgccatagcttgggctattgccacgggtatcggaattgttgtagctgtcgatggtttccttgccgagtgcttcggcaagatctttcaaggtggtaggttcactgccacccagaaatatctgactgtccatattgcccacgatggtatctgcgttatccttgtagatggctttcaactggctgcgggtctgcaagaccagacacgccgagatctcacggctgcggatggtagccaccagcttttccagctgcggaatctgaccgatgttagcacactcatcgatcaggcaccgcacatggactggcagtttgccgccgtattggtcatctgccttatcacagagcagattgaaaagctgtgtgtagatcatggagatcaggaagttaaatgtactgtccgtatcgctcatgataaggaacagcgccgttttccggtcacccagcttgtccagttccagctcatcgtacatggtggcatcccggacttcctgaatatcgaagggtgcgagccgggcaccgcaggaaataagaatcgacttggccgttttgccagaaactaaatg

SEQ ID NO: 1245 - DNA, 2295 bp, Unknown
  gut microbiota DNA sequence
cttggggttaattaagcaaacctctcccaacttcgccatcacaccatctcctccaactctgccaaacccttggtgatctccatttccagctcatgcaggtcggcaaggatttccgtggtcgagggatactccaccggcacatactccgtctctttgtacttattaatggataaatcgtacccgttggcagcaatttcttctttgggcacaaagaaactctgctcggtgcgcttgcggtcagtttcggcatcaaggttctgaaactgggcgatgatgtccgggatgtcgttttccttcacctcggtgcgcttgtcgtccagcgagaaaccgtcggctttcatatcgtagaaccacaccttatcggtgccgcccgcgccggtcttggtaaacaccagcaccgccgtagacacgcctgcgtagggcttgaacacaccggagggcatggagatgaccgcccgcagctgatggttttcgatcagttcttttcggatactctggtgcgccttgctggaaccgaacagcacgccgtccggcacgatgcaggcgcagcgtccgccggttttgagcatccgcaggaagagcgcaaggaaaagcaattctgtctttttggtgttggtgacggctttcaggtcgtcgttgatgctctcggcatccacagtgcccttgaacggcgggttcgccagacagatggtgtacttgctgcaaatggagttttgcttcgacacgctgtccttgtagtcgatctccgggttcgtgatggagtggagcatcaggttcatggccgaaatgcgcagcatggtgcggtccatgtcaaagccggtgaacatcggcccggcaaaatgctgccactgttccggagtcatatcgtccccatagtgcttgcgaacatattttgcgctggacaccagaaaacctgccgtaccgcaggccgggtcacagatgaaatcgtccggcgtgggctgcaccagctccaccatcatatcaatgatatgcagaggcgtgcggaactggccgttccgacccgccgttgccagtttgcccagcatatactcgtacaggtcgccctgcatatcaaggtcggcaatgtcgtgggtgtaaagatcttccagcccggtgatgatcttttgcagcacctgcggggtggggatcaggaacatggcatcgtccatataccgcgcaaaggcggtgttgccctcatccgggcgggtggggtcgtctgcgatctccaccagctcaccgtttgcgtcaaagtccggcagacggccatacttcatctttttgatggcagggaacacccgctgctgcatggtcaggaaaatctcgcgggaatctttatccttgaagcggctccaccgcatagactgtcctgcttcgctggccgggaagatatgctccatcttttcgcccgccatgttctcaaaatcttcggtggcaagctctttctcgtccagtgaccggatgaacatgagataggtcagctgttcaatgacggtcagcggattggtgatgccgcctgcccagatgtccgtccagatcttgtctaccttatttttaatggctcctgttaccatgcgttcctcctgaatgtttgccaatcgcaaacgccttgcatctcgaatttttggtgataatatcacaattttattatagcagtgtacgattatattttcaatgtagagcgtttagcagacgtgctttcttgatcgcaaggcaagaaattagtggaacgttaaaacagcaatttgcgatatgcaattcaacgctattgctgttgcatgaagaagttgaattgctataaaacggtaaagtggattttatctgctttaccgttttttctttacatctggactccaacatgcctttgtgctattcagcgattccatcgcgcagcctgcgctctgcttaccaactgatgatctccggcggtgatgtgaaagccgtacagggagcaacacttgtgcaggctgccccggttgaagcagaaccgaccatctccgtatcggcactgctggaacttctgaaggacgcagaccctgccgtaaaagcacagctccgcttggctctgctgacctgaattgcaaaaaatagcacgaattgcagagtaattcacagacttactccatctgacacgaaaaatgcggaccgtgcagagaccgtgcaaacggcgtacaaaaagaaaatcccacgaggaaccttacggttcttcgtgggattttggtgcgctcgagggaactcgaatccctggccctctgattaaaagtcgcaaaataccggctgagctacgagcttccttat

SEQ ID NO: 1246 - DNA, 4019 bp, Unknown
  gut microbiota DNA sequence
atgagcgatatcaccatgaccgccaccttcagcgagacagccattactgacatccagctggatctgtccggtgagaccgactccattggtcaggccgcaaaggatgacctgatcaagcagctgctggaagctcagaacagcaccatcgacggcgtgtccggtgcaaccattaccagcgatgctgtgaagcagtgcatgaacgactgcatcacacaggccatgggcggcactgcagtgtctgccccggaagcttctgagcaggctgccagctggcgcaccgccccggaagccatcccggacagtgagatcaccaagacctacgatgttgacgttgccatcatcggtatgggctatgccggcctgagctgctaccgtgagctggccgaagagggcaagaacgttctggtgctggaagccatgccccgcgagagctggtggacggtcggccacgatatcggccacatcaactcggactacctgctgagccacggtgtgcccaaggtggacgaagtggagtttgtgaacaactggatgatgcagacccacggcaaggcaaacaccgcactagtgatgaagtttgccaagaacagcggcagcactgtggactggtggctggacaagatcaacccggacacgctggctaagacccgcatccagttctggccggacaacgagtacaccgtgcaccagctgaacaacggcatgcactactacaccggcacgctggaatggtgggagaactactgggagaaccccgccagcggcgagaagaacaacaacaccgccggtcagctggagctgaaggacctgagctgggacaactacaattatgtggaggagaatttctctgacaatgccaccgctctgtttggcaccaagggtgtgcagctggtaatggacggtgcaaaggtcaccggcgtgatcgcacaggacagcgatggcaattacctcaagatcaacgctaagaatggcgttgtgctggcaggcggcggctttggcggcaacaaggaaatgatggacgatctgctgccggacatcaagcgtctgttcaccaaggatgaggacttctttgctccctttggccgcgacggctccaccatccagatgggtgtgtgggcaggcggccgtctggagggcgacatctccaccatgaacttcgactccatggctgtgcccgactatctgcccggccccctgtgggtggacgagaatggccagcgcttccagaacgaagcctttgccggcccggagatcaacggcttcttcatggcacgtgcaaagcgcggcaatatcacctccatctacgacagcacctatgagacccagatcctgcgcggcttccccggccatcaggcattcgagtacgacatgcccactgtggtggaagccatgaagggcaactttgaggccgcaaaggctgctggtgctgagggcgccaacggctggtactgcgccgacaccatcgaacagctggctgagtacatcggtgtggagcctgcagccctttccgctactgtggagcagtacaataaggtttgcgccgagggctacgacagcgactttgccaaggacccgcacttcctgaatgcagttgcaaaggctcccttctacgcccatgtcaccaccccgagtctgggctttgcactggtgaccaccggcggctttgtgaccaccaatgaccagcaggtgctgaacgaggattatcagcccatcgagggcctgtacgcttccggcaacacctgcggtatgcgctttggtcccgagtatatcaccccaatccccggtgtgagcattggtatgtgcctgacgctgggccgcgaactgggcaaatacctggctgcaaagtaagcagctgccttcgtcaaagcctgatcggctgcagtaaagccccataagcaataaaagatcccgtccacttctgggtgaacgggatcttttttgcgtatcagacaggaaaaagcggctcagaggtcgtttttctcctgccccagattatcggattccaggacgacacaaactatgttgccattggcggcgtaacgccggagaacatcccggagttccgcaaggcgggctgccttggcgtgggccttgccagcagcctgatgtcgaaggacaaggccgccgcccgcgactgggatgcctgcgcggaatacgtgcacatgctgcttacaaaagccaaaggcgaataaaccgcagaaacagcaagaccgctcacccgaaaagatgagcggtcttttgttgtgtgatgggatggcatcgccgcctactctttagaccatggcttcgcgtcatcctgccggagcagtcggtgtcgatgccgttctgctttgtctgctgcatgaaccactttcactcctgaaatgaactgcatgaaaaatcagaaggcttcattctattgactttgcctttgcaggggagtatactccatgtcaccaagaatattacggctatgacgagaaaaagtacccggaaggaatgctgcagagagctgccggttggtgcaaggcagtgcagggcatccgtgggaagatcctctccgagcttttcggctgaatgggcggtgtgcgccccagtaagcaggaacggcaggcccccgttatcacgggccgcgcgttgttggacgtgcactgagtggtcagcgttgtgctggcaataagagtggtaccgcagaggatattacacgcctttgtctcttacagaccgtaggggacaagggcgttttgttttgcggatgcttttgtcccaaagcatgtcagaaggaaaaggagaaacaattatgaaaacactggaaaaagtaagcgactttgtgggcaagtacatggccgccatcgttattgtggtggctgcgggtgccctgttcttccccggcccgttcagcgtggtaaagacggcgtgggtcaataacctgctgggcatcgtgatgttcggcatgggccttaccctgaagccggaggacttcaaggtggtgttcagccgcccgaaggatgtgatcgtgggctgcgttgcacagttcaccctcatgccgtttctggcatgggcgctcacgcaggtgttccacctgcccaccgagctggccattggcgtgatcctggttggcacctgccccggcggcacctcttccaacgtgatgacctacctttccaagggcgacgttgcactgtccgttggcatgaccgctgtttccaccgtgctggctccgctcctcaccccgctgctcaccctgctgtacgctggccagcgtgttgacgtgaaccccatgagcatgttcatgtccatcgtcaaggtggtgctggtgcccatcgcactgggctttgtggtcaatcacttcttccataagttcaccgaggaagccgtccgcgtgctgcctctggtctccactaccgccatcgtgctgatcatctgcgccgtggtctccgccaacagcgccaagatcatgaccagcggtctgctgatccttgtggtggtcatcctgcacaatgtgctgggctacctcaccggctttggcgtgggcaagctgctcaagctggactccaccaagtgccgcgcgatctccatcgaggtgggtatgcagaactccggccttgcaaccagtctggccgccgcacactttgcacagtatccgctggctaccattcccggcgctgtgttctccgtgtggcataacatttccggtgcgatcctcgccaacttctttgcccgcacagcagagaagaaggattgatctttcataacacagcaaagcccccggcaggcgcaaacctgccgggggctttgctatgcctgtgggccgggcaactgcaacaaaaccggcacaaatcgtgcttttcacgctgcttttagggcgattcacgcaggtttgcttccaaaatccggtaaagtgtgggataatcaaaatactgtaatacatacccccccccgtaaaaatgcgaggggaaaaaaggaggttgtaccatgaaacaaggcaaacttatccggcgtgcagtatcggcggcgctggccggatgcatgatgttcac

SEQ ID NO: 1247 - DNA, 217 bp, Unknown
  gut microbiota DNA sequence
catcgctgcccttgccaacgttctcacccggcatgatgtgggtgccacgctgacgaaccaggatgttgccggccagaacaaactgaccgtctgcacgcttggtgcccagacgctgtgctgcggaatcgcggccgttcttggtgctgcctacgccctttttatgtgccattgtaatttacctccttagccgttgatcgcagtgatctcaaccttggtg

SEQ ID NO: 1248 - DNA, 690 bp, Unknown
  gut microbiota DNA sequence
atggcaccgggttccatggtgcacttcggccttccggccttgctgcctgcgggctgatacgccgtctgcacaagaacggtgcctttgtgctggccgtagacctccccagcggcatcaacacggataccggggaggttgccgaaggtgctgcccatgcagatctgaccgtaaccttcgacagttataagcctttgcatatggcagaagcttctgcgccgctgtgcggaaaaatcgtctgtgccgacattggcatccgggatgaatggcacccggagttttgacgaggcttgccgctgcggaataataccgtgaaataaaaatgcccccggagagcttgttacagctctccgggggcatcttatgtgcgcgtgtgacttggcgcacacgaccggcgttttactcgattgcaatcagattcgggttctcaggcaaagccttcgtctgctgaggagcaggcagctcgacgtgcaggacgccatcctcgaactttgcgtggatgtcttccttcttcacatcgcccacgtagaaactgcgtgcgcaggtgccggagaaggattcgcgccgcagatagcgacccttctgatccttttcgtcattgctgtggctgcgcactgcctgaatggtcaggtagccgtcgttcagatccatctgaacgtcttccttcttgcagcccggcaggtcaaccgctac

SEQ ID NO: 1249 - DNA, 783 bp, Unknown
  gut microbiota DNA sequence
tcaaaatcgagatcttccggggtcagacctacgatctcgccctctcgcagtgcgcccaccagtgtgaggtggactgccagatgcaggatggggtcctccatgctgtccagagccgccctcatttcctctaccgtccagatggtgcgctcctgcgtagacttcttggggctgtccacgggaacagggcttttgacaaggatgccccactctacggcatactggaaggcagtgcccagcagccggtgcacctcatggatcgttgtgccggaaaggaaacgctgcttctgcttttcggtcagttcctgcttcttgccctcgatatacgaaccacagggcgttttgctcagggtcgtgtagaggttctccatgtggtagggcttgagcttctgcatctccatgctaccgatataggggataatgagattctgaatggtggaaaggttggattcgtaggttttgggtgcccacttgtgcttgctgcactgtttcggcagccagtccatcaggaactctgccaccgttaccgaggacggaatcaggaaagtgccagcggccagttcatgctcgatttgcttttttcggttcgttgcctcctcttttgtgggaaagctctcccatttgtcgcagctcttgccgtgctcatcttcgtaggtgtagcggacgctgtaagagttgccgcgcttcgtaatatatgccatactgtttgcctccttatcaagctgcccggtagagccacgcatcgaagctgtccttcggcacacggatgcttccgcctactcgcag

SEQ ID NO: 1250 - DNA, 700 bp, Unknown
  gut microbiota DNA sequence
aaagtattaaagttggttttgaacggaggcagttaccgtgtctgaaatcaaaaaggtcgtgctggcatattccggcggtctggatacgtccatcatcattccgtggctgaaagagcattacgacaactgcgaggtcatcgccgtctgcggcaatgtgggccagaaaggcgaattggaagggctggaagagcgcgccaaggcaagcggcgcttctaagctgtacattgaagacctgaccgacgagttcgtggaggattatgtcatccccaccatgcaggccggggccgattacgagggctatctgctgggcaccagctttgcccgcccgattttggcaaagcgtgtcgtggagattgcccgcgccgagggtgccgacgccgtctgccatggcagcaccggcaagggcaacgatcaggtgcgctttgagctggccatcatgcactttgcacccgatctgaagatcatcaccccgtggcgtgagtgggacatccagagccgcgatgaggagattgactacgccgaggctcatcacatcccgctgaagatcagccgcgagacgaactactccaaggacaagaacctgtggcatctgagtcatgagggccttgacctcgaagatccgggcaacgagccgcagtatgataagccgggttttctcgaactgggcgtttcccccaagacggccccggacaagtccgag

SEQ ID NO: 1251 - DNA, 757 bp, Unknown
  gut microbiota DNA sequence
gccaagctgaacgagatcggcggacggaacggcatcggcctgtacgatgtggtggagaaccgcttggtcggcatgaagagccgcggcgtctatgagacccccggcggcaccatcctctacaaggcccacgaagtgctggagactctgacgctggacaagctcaccgcccacaagaagcgcgagctagccatcacctttggtgagctggtctacgatggccagtggttcagccccctgcgcaaggccctgagcgcctttgtcacctctacgcaggagcatgtcaccggcaaggtgcgtctggaactgtacaagggcaacctcatcaacgccggtgtctggtcgccgtattccctctaccgggaggacattgccacctttgccgcaggcggcgactacaagcagagcgatgccaccggtttcatcagcatctacggcctgcccaccaaggtgcaggccattgtaaacaacgaaaaagaaggtaaataaagagttatgcttaccgctgttactggaatcaactggggcgatgagggcaagggccgcgtcatcgacctgctggccgaacatgctgacatcgttgcccgctatcagggcggcaacaatgctggacacaccgtcgtcaccgagaagggcaagttcatcctgaacctgctgccctccggcatcctgcacccggacgtgacctgtgtgctgggcaccggcatggtgattgacctcgagcacctcgcaaacgagatgcaggccatcgaagcccgtg

SEQ ID NO: 1252 - DNA, 868 bp, Unknown
  gut microbiota DNA sequence
tatcaaaaataagggaccgatttttaattgtcagaacggaggaaccattatggcaatctttgaaaagaccatccgaaacaagaattttgacaaactgcttcggaagctggaaaatgaaatcccggacagcagttggtcggcagatttagaggcaggcagtgatttcaaagagggcgatgcccggtgcagtgtccgtgtgtttgaacggtacagcatgatgggcggcaaccgcctgagtctgacactgaccatgttccagaatggagatagcccgattcggctgtctgcaattacagcgggcggcagtcaagcggtgttcttcaaggtgaacaccctcggagaagaatcttttctggacgatgtaaaggacctgctggaagaaattttggaggagtaaaatgttttttggatggtttgacgctatattcagcttcattttcccaatcctgttcctgctttttattggaatgtttttctttgctctaatttcaaatctccgcacatggaacaaaaacaaccactcgccgcggcttaccgttccggcaacagtggtagcaaagcgcaccgatgtttcgcattccagcagtgccaatgccggagatatgtccggtgcgcacggatacgacactagcacatttacatcgtactatgtgacttttcaggtggagagcggcgaccggatggaatttgaagtggacggaagcgattatggtctgctcgtgcagggcgacatcggaaagctgagttttcagggcacccgctatcttgggtttgagcggagctaagtgtttcttacattatatagtatggagtgctgtatgaacgatttgtttatccaagggctgaccatcgactggaacagagttcg

SEQ ID NO: 1253 - DNA, 802 bp, Unknown
  gut microbiota DNA sequence
gaacagctgaccgcagttgctgtacttttccggggcgctctgctcgtcctgcttcatcttttccagccatgccagaagctcctctttcaagggcttggtcatgtacagaatgcggttggactttttggtcttagtccgcttgagaatcagcgaggacttgctcccctcccgtctgtccgggaaggtgtggtagatttgggtggggtcgatcttggacaaggcgaccttgtcggcacgctgcagggctttgttcaccgagatggttccccgtccgtctgctgcatcaaagtcgaggtctcccggctgcaagccgaggatctcgccctcacggagcgagaggatcatgctcatgtgcaccgccagatgcagagcggggttctcgatggtctgcagcgccgccaacatggtgcgctcatcccagatggtgcgttcttcggtgttgatcttgggggcttcacggggagtaggcgatttgtgaatcagatcccagtcaacggcatacgaaaaggcggtcttcaggagcgtgtggacttcgtgaatggatgtgctggataacagccgtttcttctgattttccgtcagctcctgcttcacaccgtgcacatactgcccgcagggggtctggctcagggtggcgtagaactgctcaatatcgtaggtgcggaggtcttgcaccttccgctttccgatatacggcacgatgaggttctgcaccatcgccacagattgggtgtaggtcttgggagaccacttgtgtttgctggactgaatggggatccacttgtacagcatctcctccacc

SEQ ID NO: 1254 - DNA, 740 bp, Unknown
  gut microbiota DNA sequence
catgaaacacaaagcgttccgctggataccggcagttttgctggcagcactgctggcaggctgcggggcaagggccgcagcctctgcccgcccggctggcagccgggaactgaaatcgaccccgccggattccatgcacgccaccgcggcgatcaccgagcagtacacccttgaaaaggtggtgcaggcagagaacggcggcaccgtccggctgaacatccatctgccccggctggaaagcgacagcgccgacgccgcccgcatcaacgccgagatcgcccgctactacgaatacgatgtgcaggattatgcggactgcccggaggcagccgacccggaatcgtgggacatctgcattgagatgaactggaatgccagctggtacggcgactgcgtcagccttgtggtcagcagctgctacggtggtacggatgcgcccttctatcagggctggtgcttcgactttgaaagcggaaaacaactcaccgccacccagctgctgcagcgcatgggggcagaccccgccgcgctggaagaagcgctgtaccgtgacgtgaagcgccgggatgaacaggaccggcaagccgcctgtgagcgggggctgctgcctcccgacagcctgaaagagggcaacactgcatggtgggccacgctggatgaattgccgctttcgtttgacgaagcggggaacgtttccttcgtggtcaggcggtccagcgcagcgcaggagcagtatacag

SEQ ID NO: 1255 - DNA, 547 bp, Unknown
  gut microbiota DNA sequence
ttcctctgccattgaatagatatactcaacaacgggggcggtgttcgggtcgatcacaaggtgattgtggtcggcagggtctttctggtagccaaacggtgcgccgctggagatatactttccgcttttcttgcgtgtccgaagggcactcttgatttttcgggaagtgtctttggcgtacatttcattgatgatgtttcggaacggggcaatatccatctgagattgctcgttggaatcataaccatcgttgattgcaatatagcggacaccgtgttcaggaaagaagatttccatatacgttccggtttcgatgtggttgcgtccaagtcgggactggtctttggtaatgactgttgccacctttccttcccggatatcatccagaagttcctgaaaggcagggcggtcagagttcgtaccgctgtaaccatcatcaacatagtactggcaattcccgaaaccgttgcgtgtggcatactccataagcatcgccttttgagtgcggatgctcaggctttcgctgtttgaaccgtcatcttttgac

SEQ ID NO: 1256 - DNA, 666 bp, Unknown
  gut microbiota DNA sequence
ctgattgtcctcatacgcctcatcctcctcatactcaagagaaacatcttttcctgcatctatcgtcacatcacctttgattggtgtttcacctttaatttctaccgtaccgctgcatgtgatatttgcgccattttcgatcgaccaattcacactgccggacgtcaccttcacattgtctgcactgttcaccgtcagtttcgaagccgtcgtgccccacttattaccaagctctatatcgccagtacagtcaataatcgtttggtcgccaatgctgccttcggtcgtgacattgtttgccccattcacggtaaggccatcccttgtcaggtttcggccgcgataagacgaaccgcctaaatttttgaggatcacatcaccggaacagctgatctccgccttgccattaattgctacaatagcttcttctgcagcatcgtcacctttaagcttggtcactttcacatcctttgcgccgtttacggtcaggtcaccgttcacaacgtgggacgcatccgcttccagatcaatggaaacatcctccggtgccttgatggtcaggtcgccttcaaaggattttccctctttcagcttcagggtcttttcctcaatgtcatagcagagggcaccgtcttcaaggatgtcgttgtagttcttgctgttgac

SEQ ID NO: 1257 - DNA, 608 bp, Unknown
  gut microbiota DNA sequence
atcgtgccaaacagcttgctggggtcgatttcagcttcctcttgaccattgccgatataaatgtcatcgtcatctacagttttcagcgtaacattgccgccggtgatcttgatgttttcgccttcgccagtccatcgtccgccgccgattgccgcagcagggccgtttccgccgccggactctgcatatacagtgccgccctcaatggtaatgttcttaccgtcacctcgactgccgccgccaataccagctgcttctctgccgggtatcgccgttacattaccatcgcgaatcgtaatattttgacccgctgcgagttgacctccgccaatgcctgcacccaagtcaccgcccttggcggtgatggtgccgctttcgatcacaatattgctgcagcctttctcggaaccactgccaatgcctgcaccccagtaaccgccgtaagccttcagctcaccggagccgctgatggtcagggtcccgttgtcgtcggccttttccacaccggcgtggccccagccgctttgcagggtattcgtgccgctgatgatcagctccacatcaccgctgaccgagactgccgcaccggaagcatcgatattgacatt

SEQ ID NO: 1258 - DNA, 1091 bp, Unknown
  gut microbiota DNA sequence
cagaagcgcaccgcaaaaaagtgcagcggtgcagacaagaaaagttcgacgtttcaaaaatggtcacctcgttgtgtttttcggaaaatttctttgagtgccggagtctccaccataggcgaagatagcaacgccgttggtctcgtaacgaatggtatcacagataaacaaagaaaatcaatgacttctgtcgtatttgaccatatataatgttgaagtatccatatcccatacggctaacgcccatttggggaaagacaatgcggcagttttctgaacgattttcttcatgtcggacacaacaggagtatacccaagttggaataagaattttccgttttttctgaatggaaggttcaaatcgctttccagatagacggaggataccaacttgcgaagcgcggcacggcgatttcggccaacctcgtttccgccgccttgatggaatcgcccatggcatgatagcgttctgtcgccgccgttgctcgttcccgcagttcgtcggcactgctgatcttctgctccttgcccttcgccgccgtgtgcttgccacgcttcacctcgtagcccctgctgtatcagcttttgaagaaaaacttcaaagtccttcggctgctctgcaaggatggtgtcgatgattccgcacaggcggtcacggttgctttctctcggcgggtaaacgatcgagttgcgccgagcacacaaagtaatctctccaaccctacagctcagtttccaccgcaagctgctcctgcttttctttttcgtcagcgatttggacatcaacatcttcgcgcatctttttcagaagtgcaaggactcgcttgatttgatccttggtgttttccaccctgctctgtgcttgattgatgtgatccagaaccgcccagtctgcaaagaggccgtcaaagaagaaatctgcaaatttcagaaagctgtccaccgtaacctgaaggtctgcggtgatctcaacatcggcaagctcagttttgaaccgccgcagttccacttggagctgttcgatttgttcctgtgcatcgtccagttcctcatacttggcaagatcggccatcaaaccgccgcccattacg

SEQ ID NO: 1259 - DNA, 613 bp, Unknown
  gut microbiota DNA sequence
cagcctgtcctgacttctaccaccgatgaagaagatgtagtcaccgtgaccgatgaggaaaccggtgccctgaccccggagggcaacctgacgctggtggacgactaccacaccaactattctgatggcagcggtcagcagtttatcacgctggtgtcgaagtcgggtgcgactttctatctggtgatagaccgcaacgccaaagggcagcagaccgtccactttatgaatctggtggacgaagcggaccttttgacactgatggaagaggatgccgccgatgcctacaccgctgaaaaagaagcagcggcgcaggcggaacaggataagctgaaagccgaggaagaagcgaaaaaagccgccgaagaagcggcagcatccggcgaggaacagcccaaggaaaacaaggtcacaaagatcgcatccggctttctgggtgtggtcgtgctgattgcgctggcggcaggcggcggcttctacgctttcacaaagcagaagcagaaaaagcaggccgaaaaagaagccctcgaccccgatgcaaactacaccgaggacaagggcgattttgagattcctgtggaggatgaaccggaagaacccggcgaggaagata

SEQ ID NO: 1260 - DNA, 429 bp, Unknown
  gut microbiota DNA sequence
ggaacggctgtaaaggattcgctgcacgttctcccaacggtcttgtgggatgattgcttcatgtgtattcggaacgatagcgcgttcttcaaacggaatataacgccgctttttggatttcatggacacggtgggcttggcttcgtagatgatgtgtccggcgtagactgggctgtgcagaacctgactgatataggcactgtcccaatcatacatcttttcatcatcaataaagcggccaaacatctctttcttgtagtaacacggcttcaagactttttcatcgtggagccgcttggcgatgcggtgaagccccagcccttcctctgccattgaatagatatactcaacaacgggggcggtgttcgggtcgatcacaaggtgattgtggtcggcagggtctttctggtagccaaacggtgcgccgct

SEQ ID NO: 1261 - DNA, 316 bp, Unknown
  gut microbiota DNA sequence
cggagtccggaaaaaaggcaagccctccttcataaattacagtaaccgtttatgatactatggggaggggtcggcatgtttttatctcttctgcaattttttgccacaaagtttctggttctggcgcttcatctggaaagcggcagctttccgcggcccctctctgcccgggaggaaaccgaagccttttccgcactgcgtgccggtgaccctgccgcacgggaaaaactgatccggcacaatctgcgtctggtggcacacatcgtaaaaaaatactacgccctgcccggcgatcaggacgaccttatttccatcg

SEQ ID NO: 1262 - DNA, 217 bp, Unknown
  gut microbiota DNA sequence
atgaaaaaggccatttcgtagcattgcaagcaattttgtaaacaaaacgtcataatagtccgagaatggtcttgaaaaagatgccctacacttggtaggcatcgagaatgcctgtttcgtagcattggtgagaaacttgtaattgaattgtaattcttgagaccaaatctccgcttttgaaaaaatcctctcaataggtaggcaacgaaaacagccc

SEQ ID NO: 1263 - DNA, 280 bp, Unknown
  gut microbiota DNA sequence
actgcgttaataagttaaggtctcccatattggtcctcgacttccctaggagtggggaatcgtccggcggcgggcttgcaccgcaccattggcatttcagccaccccgtcttcgttatgaccgggctgcgagttacagaagtaccttttgtgaagtaccggacgattgaacgattcacttgtcaaggaacatatggaagatttctggactttgacggacgaaaaacatccttctacttggtagccgatgaaaaaggccatttcgtagcattgcaagcaat

SEQ ID NO: 1264 - DNA, 955 bp, Unknown
  gut microbiota DNA sequence
tattcacttgtcaaggaacatatggaagatttctggactttgacggacgaaaaacatccttctacttggtagccgatgaaaaaggccatttcgtagcattgcaagcaattttgtaaacaaaacgtcataatagtccgagaatggtcttgaaaaagatgccctacacttggtaggcatcgagaacgcctgtttcgtagcattggtgagaaacttgtaattgaattgtaattcttgagaccaaatctccgcttttgaaaaaatcctctcaataggtaggcaacgaaaacagcccaaagacaaccatctttttgagaattaacaaaaaggtcacaaatgactggtcttcaaagaaacacttctactattaacagaaaaagtggcctaaaatggggggtgttggagaaaatttctgccttaaaagtacgcctctacttactagccagcgagaatagccaaaagccagcaaaaaacaaatgaattatgtatttctgccactgattgcaacggcatatcggtgacagaaagatcgtttagagcgattcttcgcggtttggggtggtggaaatcgttttgtggttggactttttctgctgaagctgctccagctgtttcagcaccgattccttctccgaggtcttgccgcccggtgcggaaagctgctgcttattcaataccatgtcgatatacttgcggatatttttcagagcagagatgtccggctgcaaggtttccagttgggtgtgcagctctgcgctgctggattgcagcgcagaaaattcggcatccaatgccgaaaaatccaccgctgtgctgccgttcagcttcatcagggtgcggacgactttgttgaaggtgtccagttcttccttgtgctgggcagcataagcgtccttggtcagcttaaagtttttcttaataaaggtgtcgtggatgggctttagcttgacatggatgg

SEQ ID NO: 1265 - DNA, 969 bp, Unknown
  gut microbiota DNA sequence
ggctagagtttgtcagaggagggtggaattccgcgtgtagcagtgaaatgcgtagatatgcggaagaacaccaatggcgaaggcagccctctgggacatgactgacgctcatgcacgaaagcgtggggagcaaacaggattagataccctggtagtccacgccctaaacgatgtcagctgattgttcgggaagcaattcctgggtaaccaagccaacgcgtgaagctgaccgcctgggaagtacggtcgcaagattaaaactcaaaggaattgacggggacccgcacaagcggtggatgatgtggattaattcgacgcaacgcgaaaaaccttacctagccttgacatgtcaggaatccggatgaaagtctggagtgcccgcaagggagcctgaacacaggtgctgcatggctgtcgtcagctcgtgtcgtgagatgttgggttaagtcccgcaacgagcgcaacccttgtcatcagttgctacgcaagagcactctgatgagaccgccggtgacaaaccggaggaagatggggatgacgtcaagtcctcatggcccttacggctagggcctcacacgtcatacaatggtcggaacagagggcagcgaagccgggaggcggagctaatcccagaaaaccgatcgtagtccggattgcagtctgcaactcgactgcatgaagtcggaatcgctagtaatcgcggatcagcatgccgcggtgaatacgttcccgggtcttgtacacaccgcccgtcacaccatgggagtggggtttgccagaaggcgtttgtccaaccgcaaggaggacggcgaccacggtgggttccatgactggggtgaagtcgtaacaaggtagcagtaccggaaggtgcggctggatcacctccttttaagagaacgaagttctcaagacaggtgctcatacttatcgttcgttgtcttctgagaaatggagactatgttcggttgt

SEQ ID NO: 1266 - DNA, 4254 bp, Unknown
  gut microbiota DNA sequence
gaaagcggttttaatcgttacgctttcgccgagtccaccatcatgcgggcgatgagttcaccctgcggtttcccgagtttcaggctctcgcggaccttttccacgaattccggggactgtcccttcacgcccaccgtgaggaagaattcaaggtacgcgatcgtgaattccgggtgcccctggaacgcgaggattttgtccccgatcgcgaaggcgtcgttcgcgcagaagtcgcttgtcgcgagaagctcagcgtcaggcggcagctccaccacctggtctccatggttaacggcgagaagcagggtgtcggacggcagatacttccggaggcggtcagagaccacgcggctctcgcggagcccgaggccccagccgttcgggtgcttgatcacgcggccgccaagagcctctccgatcgcctgagcgccgaagcagacgcccgaaagcgcgatcccggcctctttcgcgtcccggatccactgcagcagcgtcccgatccaggcgtccgtttcataagctccggcctggcttccggtgattacataaagcccgggttccgggttcgtgagatcagggagctcaccctccatcgcggcgtacaccttgtactcggcgtccggcaccacgggggcgaagaggttcttatagagatccgcgtgggtcggggtatccgcggggagcagacccttaaaccagtccgtaatcagaagatgaatgatcatgatcgatttctttttatcgggggagaaaagaaaaagtgtttcgcctcatcttagcttctgtgaggggcgagagtgaccgtgaggcgcgcctctcacggaaagacgtgagaggcggtctgaaagagaatggatgagggggaaggggagaagggaagatcggccccttaaggcaccctcacgcctttcgaggaatcaggcttcttccggaacggagtcgtaggggcgcgctttgaagtcaagcgagaaccagttagactccgcttcccgcgggcgggcggtcatctgctgcgcctcgcgcgtgtcaccgccttcctgctcagacttccaggccttcctgcacttcagcatgtagtccgcgtcgaaaatccattcgcccttcttattgatgccgaccgggcggcagaattcgtacttatggagtttctcgatttcttcgcgcggcatgtcgagccagttctcgaggtcgcttgccgcgacaagcggttccttccagaggaggactttgagggcctccaccgggtagtacttcttctcgacccacgtgccgttgtaatccaggaacttatccacgcgcaccggcaccggggcgttttcatcccccagccgatcggtgagattcgggaggtcgacgccgtcgacatacgcgtagtactccataacttcttccactgttgcaatatcccagtcgtagggaagtgccatttcaatagctccagcaaaaagtgaactgcaaaaggttttcaggcgggccgcggtttgatgagcggcctgcttaaattctctcggtagcaaaaagagggggctgccatagactggccgcttttcttcttcttttcctctgcgggtgaggcggatatatgagagggggatcggggaactcgtaaggccccgccttatccaatggaccgcctgctaaacatttttatctgccgggggattcacgggaaatgcgtgtttcttaagaaaaaccacagcgcttgggctttcccccgcggtcttccggagagaggtgtcttttgttcgcaataagacccgcgtccggaaccttcgaaatagtaccgcaaggagagcccttttggcgtcacccgttcgggtatttttgggggtcggatgggataccgggacattaaaaaaccggatcacggaaaaaattcccatgatccggcggctttagtctgcccccgctttttgattcacagaaggcggggtgaggcgaaggattcagaccgattacgcgagcttcactttctgccagaaggcgtcatgctcttcctttgtgatcaggccgcccgcggaccagatctgatagcggccgccgttccattcggaaacaaaaccgcaggaggtgaaaccgtttctcttatagaacccgagccggcggacacggatgtcgtccgcgggagcccccggctccggatcctcggcgtcaataaagaggcggcggccgtcgcgtttcgataggacccagcggaggagttcagagccggccccgtgattccgggcttccggcaccaccgcgaagtagacaagcgacatgatggtcttaccgaccgccatcgcggccatcgccttcacttccttcctttccgtaaagacatagaagcgcccgtccatcgtgcagcttcggatgagagcctcaaacggtacacgctccgactccgggaacgattcctcataaagcacgcgcaccgcaccgacgtattcgggatgcgacgagagcagaaccggtgtcagcatgggtgactccctccttctcttcaaaaaccttcaatccttcaataatagacttcgagaatcagagagttgcgttaatttgttaattcttcgggtaaagtctgtcacgtattcgggcgacccctgggagtctgtataaaaatgaggggatgctctattaaccataacgccgcgacataaaagagttatttggaacagcgcttatttccggatatcggcgacaaggaaatcaataaaggcgcggaccgccggaagctggtaccggcgggacgcgtagagagcgtaaatgccgaccgattccgttttccagtcggggaggagagtcgtcaattcccctttttccaccgggtccgaaatcgtgaggtccggaagcagcgcgatcccgagaccgtcgagcgccgcgcgaagaatcacctgcgtgtcgtttgttcggatccggcccttcacttccacttcagaactttccccctcccgctcaaacttccaccggctcccgaaccgggtgctgacgagcgtcgggaagcgcgcgagatccgccggggcggtaacaggcgggcggtccgcgagaaacgcgggcgcggcgcagaggagcgacccgcaggacgtgagacggcgcgcgatgagaccgggctccggggtgttcgtgacttcaagcgcgaggtcgatgttgtcggtcaataggtgcgccgggcggtcgaggagcgtgagttccatattgatcgaggggaactcggcgaggaaccgcttcagcgcgcccgcgagatacgtctggccaaaggacacactgcaggtgacgcggatcgtacccgtcggggcggaggactgatggagcgcctccgctttcagttgatcggcgagacctacgagctccttacacgtatccagcacctgggaaccaaacgcggtgagcgcgacgtgccgcgttgtccgcgtgaaaagcgcggcaccgagctcagactccagactcatcagggcgcggctcgccgcggcccgcgtgagcccaagcgactccgcggccttcgtgatgctcgaaagctccgcggtgcggataaatacacggtgtccggtcagttcttccataggtattcgctcaaaaaatgaaacaatgatggcggtttttacgtctttatcgctcgatattttgggtaaataatacacccatgaacgtaacgaaaaacgataaggagcaaaacacaatggatcgccgttctcttcttaaggccctcgcgctcacccccgtcgcgtcggttgctttccccgctttcgcgtctgacgccctgaagcccgcgtcggcccccgtctggaattcggaacacgtgaacgcgctcttctcgcagttcgggtcgaccgggaagatgccccccaaactcgggaagtggctctcggaccccaaggctcagaagatcgacccctatgaggcgtttgacggcgtctataacgtgggcgtgaactgggtgtccgcgtggctcatcaagacccccgcgggcccggtgctgattgacaccgtgcatgaaccgtttgtggatcagctgatcgcgaacatcaaggcgtgcggcgtgaaccccgcggacctcaagatggtctttgtgacgcacggtcacttcgaccactgcggcgggatgaagcgtctgaaggaaatcgccccgaaggcgcgctttgtgatgacaaagcgcgggtgggatgaggcgaacgtcgacgcgaagcggacgcaccagggcggccggaactcgttcacgatgattccgcaggatttggtggcgaaggacggggacacgtttacctttgggaacttcgt

SEQ ID NO: 1267 - DNA, 10559 bp, Unknown
  gut microbiota DNA sequence
attccctgagactaatttagacatccatggctggttcggtatcgcggggtcagtatccttcgcctctcgttctttcggactagccatatcggagactattctctgctcggatccgcaaaatcgatacggtaataaccctaggtaaatttacctatatttcaaatagagattatgaaagaaggctttgagtgaaggttttcagtacggggtgtgcagagggctggggactccggttccgggggcacttctttttctggctttgcgggagagaaagacggctccccggtctcacttcactagcttcaatccggatcgcaggaatgaagagaagagggcggagcggaggcttgagaacaaagcgtctgcggcgtcggttttcttttccgcggcccgacgcctcccccctctattaataaaagacggctctgtccggggttttgtcccgaacgaagccgtcccagatttcagcctaatccgccgctatcagaagttgacgcggagattcgcgaaaacgccgttcgatgtggcgtcgccgtcataggctcccgtataggaaatccctaacgtcgtcatcttcccgagtttcgcttcaagacccaggccgagagaagccatattgctgagcttcccgcccttgaggtgcgcgacaccggatcccgcgagattcatcacggccttcgcccggttatccccgaagaagtggtgccaggcgacatctcccttgagagacaccttcgcggccgcgagcggaagcgcgatcgacccccggacaccgagtgtcgtgacttcgagattctgatcctcggtcgtggtggagaaggtcatcccgctcaccttctcgctgaagctgtcacccgacgcatggatccagctgaggccggcgtacggttcaacgctgtacttctcggtgttaaagcccttatacgcgccttccgcgaacacctgcgtgatattggtgtcgcccgagaacgcgttcatcccgaggctcgatccgacctgcagcgtccggtgagcgtccgcggactgatgcgtgtggatgacgccataggtggccgccgcggtgttcccgaaattcgtcacaccgtaagcgccgacgtggatatcgtcactcttccacttgctacttcccgccttgtcgttcgttgtgccagcgccgaagaagagaccgagtttcgtgcccgtggtcacatcgacttccgctccgatgaggccggcatagaagtcgctatccatgtcggaaagcccgtagtcgaggctcgtcgtgctcccgattccggtcgcccagaggcgtgccgtgccgtccgccatttccgccttgcgtccttcaccgatcccggccgcctgatccttcaccgcgcgggagagtgtcatcccgttaatgatgccggcgttccgggtgttaaggaagaagtcatcaccaagcgaccggtaggtgttctgcacatcggttttcgacgcgccgatctgggagtcgaaaaggggacctgaggccgcgccttcaagcgcccccgcgatcgagcggccattcgcggtatcggcgtaagaggcgaaactctttgtgacgtcgcgcgacagcgtccccgtgagggtgttcccatccgccttcaattcggtcttaaagaacgcgtagtccgggttcgcgaccgcgagatccgcgccggtgagccccgtggtggtcacggtgccggtctgggcgttccccgcgtaggcttccttcagcacatcggtgtccgttgaccccacggtgtaccccgcgccgtccttgaattcgagggtacccatcgaaacactctgtcccgccgcgatctggaacgtgccgcccgggttcacggtgacatccaccgagtgatccgccgcgtcgttatgagtaagttcgcccttcatcgtgaactggtcgttgtacttctcaaggagcccgaacgtgccgccgttcacaacgaccttgccgttattactcgacgccgccgtgtcatccgccgctgcgggaaccgcggcgaggcgggtcacaaggacactcgtcttcacggcactcggggcagcggacgtcccgaacgactccgcgaaaccgaggagctttccgccctcaaccgtcgtgccgccgcggtacgtgttgttccccgtcatcacgagggtgccttcgccccgcttcacgagtgacccgtcgtacgcccgggcgttgatcgcgtcaatccgcttctggtaataggctttgcgccacgcgatcgcgtccgcttccggaatcgtctggttatcgatcccgatgatgtcgtccgtggtatccgtcatcacgtcgccaagcatcgtcttctcttccgccgtgtactcgtccccgagcgtcatcgtcggattcttcatccatttctcagccgcggttttccaggcgagatcctctcgcttccgctgatcaagcgccgtctgactgatgtcgttagaccacacgtcgaggctcccggctctcatgttgtagtcaaacttcccgaggaactgaccgataccgtacatgccttttttaagatccggcatgccccagccgtagcgggcatcgacttcgccatccgccgccgtccagccgtcgaaatccgtgtcgccgttcttatgcgttgccgtggtgagcatcacgtcccgcacctggagtgcgtccatctgatcgtatcgctgcatgagaacggtcagagcgccggtgacgtgcggcgcggccatcgaggtaccggagaggcgggcgtaggaggggttcccgtcgtcatcggtgatcgagctgtaaatcgcgcggcccggcgcggcaaccgtccaccacttggcttcgcctgcttcgttccaggtgctgtgaagcgtgtagctcccgtcatccgcctgctccatcgcggcgaccgcgacccagttctgttccgcttccgggttgaagtaggggtagagcgggcggtagaacggattcgcgaagtcgcggttacccgtcgtgaacacctgcacgaccttctcatccttcacggcttcgtacgccgcgtcaacaaacgaccgcccgttccagtgggagtcggtattcacgcgattcttcgcgtcctgctggaagaggaaatactcgtactccgtttctgacgcggtgttcgtcttgaagtggacaccggtgttcccgccatccggtccctttgagccgttatccttcacgcgcatgttggtgccaaacgagttattgataaacccgccgcgcgtcgtaccgtccgagaagcgattcgcgtccgacaccgctttcgcgatcgcgctccagccctgatagaaatactgcggatcttcgaaggggccgtaattcgtgtcatccgtcccgcccgtgttccccacgtaaacatcagcgccccaggcgacaccgtggaactcgcttccgtcccggttgccgcccactgtgcccgtcacgtgcgtgccatgcgtgtcattcacgcctttctgccactcgccgctctcaggcaccgcggcaccgggttcatagtggccgaggttcccgtcggtgtgctgcgggtaacggtcgcccgaggacccgtaactctgtcccggaactttcaccgcgtggaaacggtcacccgtgagatcaggatggatctgcatgagagcgccggaatccatgatcccgaccgcgatgcccttccccgtgtagccaagcgcgtaggcggttgaggcgttcagcgccgtgagaccccagtccttctgatactccggggtttcccaggatgtgaccgcttccgcgaactgcgagctgttcttcgcgacaaagcccggatccacgtacgccgcggacgccgcgcccgcgccaagcatcagggccgtgaccgccagggcgacagcgcttttggcggccttgccccggcttctgtgattttcgtccgtaacgacgtactcctggtgagccacgctccacttgctcttgaaaacgcgattcatggtgaaagttccttaaacgtgagttttaaagttcttgcagcaatccatgacaaatcctgaatatcgtaggcaataacgttcctactaatccataagaactagtcatatcggagataattctctgctctgatcccgtgtttcggtacagtatttaccctaggtaaatttacctagatttaaaataaatattaaaaaaacagcggtatgtgtggaggttttcggaacggtttcagtagaaaaaaagagcaccgatttggtgccctcgttcgttaagaaacgttaatgaaaaacaaagtgttaaaaacgtacccgctgcctcacggcttctgtccggatcgcgtcgatcacggggagaagggcgggccgggggtggatttcggtgatcaggccgtacggcaccgcgtcaccccattcccccgggagcgtcacgagaaatgggtgaatcgacttccagcaggagagcgtgatgagaaccgtttttccgtccgtcacccggttaaaggtttcgagatcgtaaaagggggagtttccgatcacccggatcccgcgcttcaaaaattcatttctcagacggtcattccggggcgagtccccgtggagcggcatgaggatcgtttcccccgcgagatcctcaaacgtcacgcgggttttcttcgcgagacggtgcgtacgcgccaccgcgacttcaagcctgacagacgtcaccgggatcaggttcacgcgattcagccagatcagcgaatcgcacggcccatagatgaaatcaaacttctccccgagttcccggattttccgaaggattccgttccgatcatcctcaaacggcacaatccggagtttccacccggggaagcggtctgagaccgcgtcccagaggggaaggaagggttcacaggaattgaggatcgagttcccgagccggatcgttttcgtttcggcgtccgcggcgttccggactttttccagagccttgagggagtccgcttccatcgcttcgcacgacctgaagaagagttccccggcgtctgtgagttccacgccggttttgaagcgccggaagagttccgccccgatccctttctcaagcttatcgatccgcttcatcaccgcggtcggcgtgataaaaagcgcgtccgcggccttcgtgaagctcccggcgcgcgataccgtgagaaacgtttcgacttcagggctgaggatagggaacatgattgaaactgaatactttctgagaattttggtatgaactcagagttcacactcgattaatctcatgttatctcaaagcggcacccattgccctaggatgaagtcactcagaaaaaagaccggccccctgtgtcatttcctattccgtctccggtctccccgccgcttttattcgtggtgcggcggggagaccgcgggagggatcagaggttaaagggggcggtgcctgaatgttcttgaaccgaggagcaagagatgaagaccattaagttaaataacggcgttgagatgccgatggtggggtttggcgtattccaggtgccggatctcgcggtgtgccagaaagcggtggaagacgcgatctcagtcggttaccggctgattgatacggcggccgcctataagaacgaagaggcggtcggggccgcgatccgcgcgtccggaattccgagaagcgaatttttcgtgacgacaaagctttggacgcaggaccacgggtacgacaacacgctccgcgcgtttgacacctcgatgaagaagctcgggctcgatcagttggatctctggctgatccataagccctacggcgatgtgtacggcgcgtggcgagccatggagcggctttataaagaaggccgcatccgcgcgatcggcgttacgagtttcccggatgaccggcttctcgacctcttccttcataacgacgtgaagcccgccgtgaaccaggtggaaacgaacccctggtgccagatgaaggaaaccggggcgttcctcgcgaaagaaggcatcgcgcatgaggcgtgggctccgttcgcggaggggcatgacgggctcttcacgaaccccgttctcgtgaaaatcgcggagaagcatgaccgtacggtgggtcaggtcgtgctccggtggctgcaccagagaaacgtcatcgtcattccgaagtccgttcataagagccggatgatcgagaacatctcgatctttgatttcgagctcgacgcctccgacatgaaggcgatcgcggaactcgataccggccgcagcagcttctacgacgaccgggcgcttgagaacgtccgctacatcggcacgatgaagattcacgattaacggtttggaggagttacggatatggactatctgacactggaaggcggcgtgaagatgccgatggtggggtatggcgtatttcagattgacgcgaaggagacggagcggtgtgtctcggacgcgctcgccgtcggttaccgcgcgatcgatacggcgcaggcctactacaacgaagagggcgtaggggccgcggtcgcgaagtccgggattccgagggatgagatcttcctcacgacgaaagtctggatctcgaacgccggtgacaagaaggcagcggcgtcgattgatgagagcctccggaaactcgggaccgactacattgacctccttctcattcaccagcactacggcgactactacggcacgtggcgcgcgatggaggatgccttgaaggccgggaaggtccgcgcgatcgggctctcgaactttgacccggcgcggatcaccgacctcatgctctcgaacaccgtgaaacccgcgatgctccaggtgcaggcgaacgtcttcacgcagcagaacgcgcttcagacgttctgcgactcggtctcgatcccgatcaccgcgtggagcccgctcgcgcagtcggtggacggtttcttcacgaacccgacactcgtctcaatcgccgaagcccacgggaagacggtcgcccaggtcgcgctccggtggcttctgcagcgagggattgccgtgatcccgaagtcaacgcaccgcgcccggatggaagagaatttccagcttttcgacttcacgctctcagaagatgacatgaaagcgatcgcggggctcaaccgaacggatgccggcaccgtcccgtttgatgatccgaaattcatcaagtggctgatcgagacctacagttaagcttcacttagggttcagccgttatagtcaaagcctcgcctcggatacgctcccggcggggctttgcgttaaacgcgatacaaacccaacctattaagattgatttaagatagcgttcaggtaaaagatgtattttgaatgcattttaaagctacttaaaatgccttagggctctcaaaaagacctgaagcgttgatttcaggtctcttttccccggagacgaataacaacatgctgcgcatcaatctctttgtttttattctcacggcaatcgcctacctgatcgggatttacttcttccccttcatgctgacgagccgcgacgttctgcaccaggtctgggtgatatcaggcgtcgtgacatggatcctgatgacggaagcgatcgtgatcgcggcgcgtccgtcctggatcgagcgtgtgtcaggagaaccgctcgggaaactgatgcaggcgcataagacgcttggctggtggatggtcgggttcgcgttcattcacttcctcgccccgtttgtccgcgacatcattacgtcgttctacccggtcgttgaagtgccgatgatggaagagcacgcgatccacgggttctggagcggggtctgggtgtattcgcacccgatcgcgggtctcacgggcattcttgtgtcgctctacatgctttccgtcatctggcgggacatcaagcacgcgaagaaaaagatttcgtggccgaagtgggaaaaggcgcatctgatgtgggcctggatgtatatcttcctcgcgttccacgcgctgcggacgcttaaggaaaccgaactcatgatgccgcttggctgggtcacgacgatcgccgcgatcctcggtatctgggcttcggtcaacatcatccgcggccggaaaggctccgcgatgcgttacgacggcgcgctcgactccattaaggcggacggcggtgtcctgcggcttgacgtgaagacggaactcgcggatacgatcggaccggggcgctttgtttacctctcccgcccgggtgataaagaagactctcacccgttcgcggtcgctggcgcggataagaagaccggcctcctcactttctggatcaaggaagcgggtgagtggacgaagaatctcgcgtcgatgaaggctggcgacacgatttatgtcgaaggcccgtggggcgctttcttcccgaagttcattccggggaagaccgccgcgtgggtcgcgggcggcgctggtatcgccccgttccttggctggatggaagagctgaagcgggataaggcggccgggaaacccgtcccctcgatcacgctctggtggtccgtgaagaaccgctctgaaggcggctttgaacgcgttgagacgctttgccgcgagctcgggattgatctccgagtccacgagacgggcgagaatcacgatcacctggaacccgaaaccgttctcgctgaacaccccgcgacgctcgcggtctgcggacgcccgggtctcacgaaggcctttaaggcggcgtggaagggagcccccgagaatctcacaagcgaagtctactgatccggttccgtttttataaacggtactcagccgcccgaagaagtcacgcttctccgggcggtttttttacgcctgcggttcgtcggaagcggcggtttgcggggcgctttctcctataaaatgatcaattagccatgctctgccgccaaaggagaaagttggaaatgactgaaaaagagaccccggacgcggtgtcacctgaaaacgccgcgaatctcctgaagctcgaagaagagctgaagcgttcgcgcgatcactggggtgtcacctataagatcctgaaacggatccgcgagggagaactctggcggaacggcgggtttcagaactacacgctgtggctcgcggaagccgcgaaaaaaagcggcatgcacgcgagtgagctctggaagcggttcggggccgggcgtcactatgaggaatatctgaagcgcgaggcgcaggtcggccgcagccacccgagtattgagaccgtggaggcgagtccgaacacgatcgcgctcgcctaccgccttgcaggcgacgggaactgggtgttcgcggacagcctgatgacggatatcctcgacgggaaaatccggcgcgccgatctgaacgacgcctggaaagccgtgaaagaggcaaagagcgaagcggtgcgcgagaaaaagcgccccgaggaaaagaagaaggggattccgcccgcgttctatcggaagaacagtttcaagcttgaggcggtgctcacgctctccgcggactcgggcgggtttcttgtcggagcgagccgcccgaagcggtcgcggttccgcgtgatttcgagtaccgagccggtgtcgaccgaaaccgccggatcagtggactgcgtgattatcgagaaccggagcacaaagaccggagccctgaggctccacgggatctccgttgagccgaagcgcccggacgggctttacctcgcgaaggaacccgaaaaggcgacgccgtacgactaccggtggctcgcggtgccgaccgggtttgaggacgcctatcgggactttgtgcgggactcgctccccggctgggggcttctcgtgatcaagagttcgacgcactcggtgcggaacgctctccaggcttcggaacagaccccggattcggagctgcggctatcggagcttgagaacctcattattgagacgcttgaaccggcaccgtagaaatttcgcgtctcaacggttctctgcataaagctctagaaacccgtccgaccattttctaccagctccgatagaacagtatgtcaaacccggtgatcaataactttaaagaactgaagaaagacctggttttaaaagactgtcgtttttctgagaggaatggaagatttgttttaacgacgcgaacttcgatggtattgcaaatcggaatccaacccctctttaagttcattcgaaacaagaggaaggaaggtacattcaagaaatacaggaagctttcagctgctatcccctcactgaaatcttttatggcacctgataactcctcccgtccgttgacatccggagaccacgaaacacctctgcgtaggcagagaaaagtcggtctacgggttaacgaaaatcggtttttaggaaacacctctgtgtaggcagagaaaagcccagacgtcgctctgctcggattgtgtcgatggaaacatctctgcgtaggcagagaaaaggatcggctggagaaaaagctgcttgatgtctgggaaacacctctgcgtaggcagagaaaagtaacaactcgatataatttctatcactatcacggaaacacctctgcgtaggcagagacaagcgaagtataaatgcttggttgtaccttctagtggaaacatctctgcgtaggcagagaaaagagcatttgacgatattgtaatcattttgctaatgaaaacacctctg

SEQ ID NO: 1268 - DNA, 22800 bp, Unknown
  gut microbiota DNA sequence
gatgatcccagattgggctgaaaaataaccgaaactatcgactacgtatttttccagcccaatttagaatctcagaatcgacgacccgcagctttgctggcgattctcgtttggttccaaagtgcggtttcatgtcacgctcaaaaacctttccggcacaacgctgctctatctcaaagcaactgaccttgagtacatcacggtcaacatgaaaatcgaagccgttcagccgaaaacgcagacgattacgcataaggtttattcctctccgatctcctctgttcagtccgcgattctgcgtgagcagccgcacagcacccactcgccttccgaaaacgcctatgccaaaccctttggcaactacggtatccgccaggagctgctgaaagaattcagccggaaggagtctgaggaaaaggaggaacaggcaaagctctcttccgcgccgaaatccgccgcgccagttacctcgacaaaaccggaagaaaagccttccagagctgaaagcacaatcaccgttaaaaaaggatggaagaaagaacggaaccagcacgttgaacacatcacacagaccgttcatacgcgcacggaagaacagcctcttcctttcgaaatcaatgatcctgaggaactaccgctccctacggggccgaagcctgaggagatcaaggtctcccctgctgttcataaagaagtacctgaaccacaggaactgccgccggaagaccctgtcactgaagatgaaacacctgaggtgtctgacacctattcagaagaagagacatctgatgtgtctctcactgagcccacagcatcggaaatggctgaagagtccgagatcgaagaggatgattcggatttcgcggaggatcctgcaagcgaaacggagcctgctgaagtggcggctgacgatgagaattccgattcatctgtggaggatgcgtctgatcgcgaagtacgggacattctgaccaaggagcagatgctcgacgctcttgcttcaatggggttctataccgacccggacgcgcctgacgaagagactgacgaagaactctctgttcacggcgaacagattgaaggcgaaaaagcctgggacgctgaaatccggcgtattgaaggctttatcgctgaacgcggcgggttatacccgaagaaactcattgagaccttcacggcactcatgcagactcacgacatggtggtgcttggaggccgctccggtaccggcaaaacgagtttctgccagcgttacgctgaggcaatcggggcggacgtcacgatcgttcctgtgaaaccgaactggatgagcacggaggatcttctcgggtacttcaatccggtgaacggcacctatgtgtcgaccctcttccgtgacgatctcctccaggccgctgcgcatccggaaaagatgcatctcgttgtgctcgacgaaatgaacatcgcgattcccgaacactacttcgcggatttcctcagccgccttgaagaccgaacggttccggaacctgaaatcgtgctccctgggattccgaagaaaaaggatccagccccccgcaaagcgcagtacgcggtctgcaaagtgatcctctcgttcctaggcgacaaagggtcagacgtcacacttcaggatgtgctcggggaccccgattaccgggggcttctcgccggcgctctgaaggaattcggcgaagcgccgcttctcacgaaactcgttgaaatcgcggaaggtgccgcagatgacgggaaatccggccgaacgcttaagattccgcagaatgtccgcttcatcggcacaatcaatgtggatgagacaacgaactcgttctcaccgaaggtgcttgaccgagttcacgttctgaagatggatgacgacccgttcgcgatgaaggatgatgagaggtgctccggcaccggggacgcaaagtggattgatccggcgtcctttggcatccggggaccgtatgaagatctcgacagcgcggcgatgcgggatccgatcatccagaagctgattgggctgcgggagtacacgaaccctctcaatatcgacctcagcatgcgtctcatcaagcaggcgctgcatctgaagaactcgatgatgaaggtgggacttgatccgaacggcgtgatcagcgccgtgatccgctcgaagattctcccccgcatggtgtttgacgcggattcgggatcttcccgcggctaccccggaacgaagggcgaagcgcttcagaagttccacgcgtaccttgagaaatcggtgctcgatgaccggcagtgcaatgtagaggcatctgacctgctgaaacagagccggaacggcgataaccaggtcaactactgggcgctctgatgttccacgcgtgctacatccgttttgtcagacgggaaaacaacgctccccggattacggaaaagatcggctcgtttgagaccgaactcgttgtgaccgcgtttaatcggaacgagtacgggtccttgattctcccggccttccggtccgataacgcggccgcatccccggttccgctcgagaatacgagcgaagcctgggactcgtttacggattgggatggaaaccgctggtggttcctctcctgcttctatacgaacaggaaccgtcagaccggagagaccgagacgctccgcagctccgcgatctataactcggtcggattcctccccgtcgcgtggactgacggctcggaatttgtccttcacgtggaatgcgagccatttgatcaggcgtcgcttgaccggatgctccgtgacttccgggacgggctctatgagatcattctcgcgggaaaaaatcccctcaccgcgtccgctgccgtgagcacagagtcaagcggaacaccgaaagaaggcagcctctaccagtttgagtctctcgtcgatctggtgaactccatcgaatccgtgatggcgtcgcttcgctcgaaaatcggtctccgggaagatctcctccccgcgcggcgtgcccggcagtcctccgccacgctgatccggaagtatctcaaccccaacgcccggacgcttctctcccgcgagcttcatcacgactggaacagcggcgtgaatcagttcgtgcattctgtcgtcgaacggacgctcgaattcgtggaactcgtgctcgatcagccgcagtccgtaaaagaccggtactttgatcacgaggacaccgagacgctcaaactcatgcgggagaagctccgccggagccgcgaccgcctgatcaagctcggaatcgggaccgaagcgctgaactttaacatggtggtgttccagcaggatacgaagtattcgcacctctaccgagcccagaaagcgttcttctcgaaccgcgtcgactttgaatccgtggaaagtctccactatgcgttccagcattcgcgccacttcagaatcacgcgcctcgcggaactctatgaacgctgggtgctcgtgacgctcgtccgggttctgcagacccggttcaagctgacgctgccgaccggctgggtgagcgactttatccgcagggtgatccgggacgaacataacatccgtctcgaattcacgcatccttcctggcgctatcggatccgtcttacctacgagtacgagctcccgaaacaagggacgcagcgttacgccttccgcccggactttgtgcttgagctgatcgatgagtcgcggcttgaaaaacgtttcccgaaactcattctcgacgccaaattccgcacggtctttaatgccgcggactgccggcagctgcttgaggaactcgcgtaccgcaaggactacctgcaggaggctcagaagacctccgacactccctatattccgccgcggggccggtctgaatttatggagtaggcagccgcccgcttagcgcgtgaccgtcagattaccgatggccgcaacatgctcttcctcgtatacccaacgcctgaaaccgagcgtcctagctactttggcctcatggatcacggccggggctgggtacacgcgttcgcggacttcggaacccttctccggaataacgggctcgcgaaagcggtgctcgagtggcttcaggcgctggagcatgattacgaggcggatttctctcaccccgatgagctcctctgtccggtctgcggcgcgagcggcgatcatcttgtgctcagagctcccgatttcgatcatgacggccacccgatcgaatggaacaccctgtactgcaaggactacgggaacgtcgtgaggcggaagctcacgtgccagtgctgcggtcggacctcgctcttcgggaatgcgctgaagtctgactactaccggcgtcgggagggaaaactcgtctgtcctgagtgcggcgaaaccgtggaataacggcgtaaaccgattaatagtttctgatagatcctgagagttactatcaggatatattcgtatctatcagatcttcacagaggaggcgccttgctgctaagatcggacagcggctctgctctctatacacataaaaaaacctgagctcgaagcccaggtatgaaagatctctgttctagctatacagagaaaaagaaaaagagggatgtcttggatatcgctgccctgacatccctaaaaatttcccgtgctttggcggacgggaaatcaaagactgcaagttacttcgcagccctaggagacggattcttctgcgggacgccggaacgtacgctcggcgaccgaatcgataacaacgccacgctgcgcgggaagtccggcgttcgtgagacgctcgggatgcgtgaggaccgtcgcgcggcccgggcggcagaacgccgccagcgtgagccccgccttttccgccgtttcgacggcaagcccagtcgccgcggacaccgcgagcagcacttcaacgccgcagctcgccgctttctgaaccatttcgtaggaagcgcgggacgagatcagcaccacgcggctgttccactcaggagccgtgggagcgcgcatgccgcgggctccaaggagcttatcgagcgccacgtggcggccgacgtcttccatgcagccgatcgtgccgccatggtcatcgagaaggcacgccgcgtgcgtgcagcccgtaacgtcgcccacaagctggcaggccttcatcgcggcgagcgcccgatcgagatgctggagatcaaaggtcgcggtgcggggaagcggcttcaccgggcggatcacgtcattaatctgctcaagaccgcagacaccgcagcccgtgcggccggcgagtgaccggcggcgttccttcagcttcatgaagctttcgctcgacacctcgagctccacccgaacgccgcggcaggccggaaccacatccatcccgtagatctcggagcgattctggatgatgccttcagagagtgagaaaccgaccgcgaactcctcaaggtcagaggggagcgccatcatcacgacgtggctgatcccgttataaacgagcgccacgggaacttcctcagccacgacatccggcaccgctccgaacgtgtcgaagctgcgcttatacgcggttaccggtcttgcacactgattgagatccatggcgcttcctttataaaaaccctgacactcactgcggtcagtctttccgttcctttaagctgctttgccgccccttagttgaggggcttctcctgaccggcttcgtaagccatctggagatcaccgagcttcacgagctcaagctcgtccggagtccggttaaattcatcctcgtgctcgaacacggtcgggaggatctcaccgcagtggtcgcacacgtagaggcggtgatccaggtcgtccttatcgtggacataacggaggtcacgcgtcgcgttcgtttcgcagtacgggcagccgatgcggttccagtaccaggaagcgccgcaggtgccgcagacgaggctgcgaaccgagccattgaaattcgtttcagaaatacgggccatcacaggatcaccgccgcagatcgggcagtgaggcttgtagccgtatttgcggtcctcaagcgaatcctggtcaagagacgcggccttcgatttcgccgcgttcccaatgaagacgcggagagcccaggagagaaccgggaagatgaagcgcgagagcgtatccggatccgccccattcgcgttgtcatagatgtaattcaggaactcctgcggacgggtgccggcaagcgtcgccgcgtggtcatccacgagcgcgtcccagtcaatgccctcaagcatcttgaggacctcgggatccatatccttgccgacctttccgaggagcgtggagagaatctcgcggcacaccgcggcgaggctcgcgcggtcgatcgcgaccggcgactcctggagcaccgtgctttcacccttcttcacgcgttcaacggattcaggggtgagatcaacgatttcgagcgaatagctatccgagagctcgcgggtcttctcaagcgtctcagccgtcagccaaagcacgtgaacggtctccggggcaacgcccttcgaaagctgctcaactgcctgttcaagattcttatccatggtttgaaactctttttaagttattggatttgatgtttttaaaccgggtactgctttaggggtccctgggaggaggggcgctcggccccccgcatcccaggtactgccgctctgatcaaactagagctttactgcatgctgcttcttacttcttttcggtggtcacgccttcaccggtgccgaggcgggtgttagcccagtagccccagtggtaggcggcgtcagcctcagagaccttgccgtcaccccacatgaggttggcagtgcccttgtacggctggaagatgccggcaccaaggtagatgtggccaagaccgaagacgatgatcacgaggaacccgatgtcgtggatgatgtgagcggcccagatgagggaagccgacatcgcgataccggtggaaccagggatccagccagcttcagcccacatcacgaggccggagagagccatcaggatgcccatgatcacgagaccgccgtcagccatacgctgcgcgcccttcacttcgtgctgcggaggcatatgaaccttctgcgggttgaagaggtaaggcacgaacttgcgggcgaattcccagtcgtccttatcccacttgccgaagatgttgttcttgaagaggtgcgcggcacccttcggagaacgaacgagagcgatcagcgggaagaggatgaacggcaccgcggcgatacggtgcagcatgcgcatccagtagacgaacgttccgccaagagcctcggagatcgccggcgtgaaaaccgcgacgccggtgagagcgaggaaaatgcaggacaccgcagcgacaccgtgggtcacacgggcgagacgggagtggcgctggatatagcgagtcatttatttttcctccttttcttcgagggcagccttcagttcagcgtcggccttggcctgctgttccggagtccaggtcttcttcgcttcgtcgatcgtcagatcatcgcggtgatacttgcgagccgagatccaggagagcgcgagaccggcaacggtcgcggccgcggcaatgccgccgagcggacggaagagcttgtgggagtcgtacacagccttcttctgcgggttggtcgggagaccataggcctcgtgaccgtgcttgcagacgtagatcacgtgcagaccgcccatttcggtttcaccgtagacctcagccttgctgaagcccttagccttcaggacttcaacgcgggccttcgccttcgcgatcatttcatcgcggttgccgaagcggagcgcttcaggctggcaggtcttcacgcaggccgggataccgcccttctcaagacggtccatgcaggccgtgcacttgtcgatcttgtgatcgccaggacggaagcgcggcacgtcgaacgggcaggccgtacggcagtactggcagccgttgcacttctcggtgtcgaagttcacgatgccgttcttgtcgtggaacagcgcgtggctcgagcacacctcgacgcaggcagcgtccgtgcagtgcatgcaggagcggcggccgatagcccagttgatcggctggaacttgttgccggactcttcctcgtggaaggtctggataagacgcgtatcgccattcagatccatcgggctctggagggagccagagaattccgtgacgttgtgaccgagcggagcgggaagttcgttccactgcttgcacgccacctggcagcccttgcagccagtgcaaaggctcgagtcaaagtagatggcgacatcattaggttttgccattatttatctcctagtctctctgatcaggccttttcgacgttaacgaggaagccgcggtattccggaatctgggaattcgggtctccgacgttcggcgttaggtcgttcattgtccagcggtcgctcgcgtagcggccgatgaaggagaagtggtgcgggcagcccaggatgtgatgcggcttgccgtcaaccatgaccggcttcagacgcttcgtcaccatggcctggacgcggacttcgccacgattgttccagacacggaccaggtccttgttcttgatgcccttttccttcgcgagttcttcagacatctcgacgaacggacgcgggctgatttcaacgagccacgggcagttacgggtctgaccgccagcctgccagtgttcaaccacggagtaagtcgtggcgacgatcgggaacttatccggatcagcgcgcttcacggacgggtcgttcgtgtagatcgcgcacggattgttctgagaaccgttgatctggttcttcaccggggattcccacggctcatagtgctcggggagcggaccgtcggccatgccgtgattcgggaagagacgggagtactgttcccaggtcatcatgaaggccttgttgttcggcggaacacccttgccgtccttggcagccacgaaatccggcacgtcgtagcagacccacttctgagccttttcgtcccagtgcaggaggtcacgcttcgggttccatggctggcccttcatgtcggcagcgccgcggttatacagaatgcggcggttggccggccacacccaggcccagttcgggaacacgccgagaccagagggatcctcggtaccgcggcggtaaaccggctgcttcgtgtgatcgagcggagcgtcgtcgttattccagtaacccacatagatccagcagccgcaggcggaggtgccatcagcctggaggtcaccgtaggtcttcaggaacttgccggtcacggtgttgtagccattcagagcgcgggcaacgcgttccatgctccacttgccgtcaaccttgtagtcccagttcaccttcgtcacggcctcggggcacttgccgccttccttgcggtagaggtcctgaacgcgggtgaagatttcggacatcatctcaaggtcccacttcgcctggccgagcggcggcacagcctgttcacgccactgcagcatacggccggagttcacgatggaaccggggcgttcgtagatcagggctgccggcagacgatagatttcggtcttgcaggacttgacgtcgaacccgggttccttccagaagtcggaggtttccgtcgggacgatatcggagacaaccatccagtcgagcttcgcgagaccgcggcgggcattcgacgcgttcggagcgaagtgagcggggttcatgccccagacgaagtagcccttcaccttgccgtcgcgcatacggttccaggtcggaatcatggaggcgtcacggtattcgtgcgggagcttcggcatccagtcatagccatagtcgttctcgaccgtggcgttttcgccgtaccactctttcaggatggagaccatgaacttcggcttattcgtgtagtagccgtcagcataggtttccttcgcgagccagtcagcgagcttcgcgtgcttgtcctgacgcgggtagttgaggtagccggggaggccgtcagaggtagccgcgatgtcggtggaaccctgaacgttcggttcgccgcggagcgcgttcacgccgccgccggggacgccgacgttaccgaggagcagctgaatcacagccatcgagcggcagttctgggaaccaaaggtgtgctgcgtttcgccgagcgcgtagaggatcgtgccgacgcgttcacgcttgccggtggacgtgtagacctgatagaccttctcgaggacttccttatcgataccggtaacggaagaaaccttatcgagcgtgtagcgggagtagtggcgcttcatgatctggaacacgcagttcggatcctgcagcgtcatgtccttcttcggctcatggacggtcgggtacttgaacttcgggacaccgggcttcgtcacccagttcatcgcgcccttcgtatcccactcgcggtcagaggcggtctgataggaccaggtctcgtcgtcatacttgtgggtgtcggggttgtagcccgtgaagtggccggattccggatcaaacttgaagtccgggttgatcaggcacggggcgttcgtgtagttcttgacgtactcatcctgccagaggttgttggagaggatgtagttcatcatgccgccgaagaaggcgatgtcggtacccgggcggatgcaggcgtaaaggtcagcctgagcggcggaacgggtgtagcgcgggtcaaccacaatccaggtgccgcccttacgctgagcgcgttcgatgtagcgggaggaaagcgggtgggactcaacgctgttcgagccgatcgacatgacgacatcggcgttttcgatgtcgcaccagtgggaggtcatggagccgcggccaaaggtcggggcaaaaccggccggcgtggaggagtggcaggggcgggtctggttatcgatctgcacggagccaagcgagcggcagaacttctgcacgagccaagcttcttccgtctgcagctgggcagcgccgatggaggccatgccgtcgttgcggttcacgaggacgccgtcttcgtactcaacgaagttttcgtcacgggtcttcttcacgtgacgggcgatttcgttaaaggcgtcttcccaggagatgtcttcccacttgtcggagccggggcggcgaacctgcggcttcaggaggcgggactcgttatgcttcaccttgcggtccggcgtaacgacgttgcggaggttgaacatggtcgcgcccttcgggcagagaccgcctttgttcaccggatgatccggatcgccttcgaggttcacgagttcgccgttgcgaacggagcagatcacaccgcagccgccagcgcagtagcagcagatgttcgtgaattcctgggttgaaacgagcttgtatggcttcttagccgtgtcggcggcagcgtgcgcgagggacggggcagcagcgacaaagccgctggtgccaagagccatgctgcgtttgaaaaaacttctacgggagatccccataaaaagcctcctatttgctttgtttttgtaaatcccgttcgggccgggcatgtcacgcattctagggatcagttttttcagatccaatagggaggcgggactaagcaaaggaggatttagcactacataccgtgcatgagggatacaagaaaacgctatgagatcaatgcggtattcattttaggaataacggtaaggccccacagtgcacacataaaatctttaatgttttcggggaattctttcagtttcgcttcagtttcgtaacacgccatatattggggatgcgtgttttggctacgtcagaaggcctagttccttggccggtaccggcgtagataccggtataccgttagatgaaaatgattctcgttacagaaattagtttagcataaaactttttgaaaagggtacttttcgcgcctgaaatggaccttaagaaaggaaaaaatggggcgtgaaaattaagaatccctgaaacaccgcgttcatctccaggaaaagcccgttttccccaccatcttccgacccgaaacgcgttaaagtgcgggatagataacctattcactgaatttcggattttcccatgcaccagcttcagtttttcagagcctcagggcggctcccgcggcggttcttctggatcggcgtcctgcttctcctgatcctcctctcctgcgcggtctttgtttccgtgcttctcgcgggggtagcgcggagcgcgacaggctcggaaaccgtgagtttcgcggtgttcgcggtgctcggcgggctctctattctcgctggtctttattcgcttacctgcctcatgagtcagaggctgcatgattttggaaggcccggtatttgggcgctcgggttctacgcgctcctcgcggtcggtatcgctgggatccggattggaggaatcgcaggggcattgatgatcctccccttcgcgggcctcgtcttcttcggcacccggccaagcgacccggcacacaatatctatggtgatccgatatcagcaccgcttccgactgacccgcagctctgaccctttagcccccaggcacacggaaatcgaaatcataaaaaacctctatatatatagaggagaatattcagtagacgaaaatcacttgaaggacgacgcaaaatgacaactcaggctcctgatctgaatagtcccgcagctgcccgcgccggcatcgcggccggtgtcctcgcctatatcatctggggcctgatgccgatctactggcggctcctcggggaagcgtcgtcgcttgagattctctgcctccgaattatcgggagtctcgtctttatcttcgggtaccttgcggcaaaaggccggctcggtgagctttccggtgtggtccggggacttcgctcggataggccgctcgccctccttctcgtcggggccgcgtttttctcaagcgcgaactggctcgtgaatatcgtgggagtgaacaccgggcacgtggtggagcttgggatcgggatgttcctcacgcctcttatgtcggtcgctctcggcgtcgtgtttttccgcgagaaactgacacccattcaatggatttccgtgctcctcccgctcgttggggttctcatcatgatctggggcctcggcagaattccgtggatcgcgattctggtttcgagcacctgggctgtctactccgcgatcaagaagaaagtgccgctttccgcctggatcagcctcgcggtcgagcacgctctgatgcttattcccgccgcgctttacctcatgtatctcgagcgcgccggcgggatgtacttccttcatgggcacggtgtggagctcgatctcgcgcttctctttgtcggctttgtgaccgcaatcccgatgatcgccttctcctacgccgctccgcgcctcccgatgctgattctcgggttcattcagtacctgaacccgattcttgtcacgtcgctcggggtcctcttcttcggtgagtcgctcacacggactgaactcattccgctcctctttatctggtccgggatcgcgatttatctcgcctcttccattgtccggaaccgcagggcactccgtctgaggcccccaaaactcgggtaaaacccccagagacacaaaaattcctgcctcacccggatacaaatggaaacgtatcatctagactgtaaggctcaaaggaattgaagcggcggaacgtcacttttccgccgctttttaaagcaattttttctggtctcacccccgcgagcgccagaaattcataaaagaaaaagaatcatgtctatccgttgcttacacccctcaggccgcgtccgccggaagcccttctggctctgggttattaccttctgggtacttggcggcatcgtcaccgcggtgttttctgacaccatcacggagatttcgtccggtctcgcgtattcccaggtaaatggcggcttcagtttcctcatctgctacgcgctgctctatatcgcgaatttcttcattcatatccagcgcctgcatgacgcgggacactcgggctggtggatgcttttcttcttccttttcatgatgcttttcacggtcatcatcgggctccttccctccgagcatcaggataaccactacggtcctgacaccgacgcgaacggccggtatctcggctgatcgcggatctggatcccaggcgaagcgccttctctcctgaaggcgcttttttgttgccggtcatccgccttcccttccgcccttccctatccagccaaagcgattatttttgtaaaactcattatctggatgctatatacccggcttctcgcgttatcattctttatgtaatggagataagaacttaaacgggaattcagtatccggattgccgccctggttctgcgaatcacgcttttttaaggaaacgcgccatggctaaaacaagcatcactcagaaaatccgctgcttcacgcctcggggccgcatgagacgggccccctactggctctggaacatctgcgtcggcgcgtactacggtctcatgacctttatctggctcgcgtatctctattggctgaataacggcgtgccggcggggtctgagaatatggacgcggggctcgtctggtggcttctcgttctgatcccaggcgtcgtctgctcggtcttccttctgatccagcgcgtgcacgatatcgggatttccggctggtggctccttccgatctggatcgcggtcgcggtgatcggctgcgtcattccgctctggattccgagcaccatcggaacgcttgcgatcggcttctggccgccgcaggccaaagataacaagttcggaccgaattcgaacgcgaatggagcgtttatctaccggttgccggacgacgggaagcccgacccttccaaagccgccgcctgatccgctacactgcctgagagaccccgtctttcaggcattttttctttttggcttaaggagttaaccatggcttccgaccgccgtatcagagatttccgctgtttcacgtttaagggccgcatgagacggaagcccttctggttctggctccttccgtatttccttacgtgctgcgtcctcggggcgctgctcgcgctgacattcatcgcggcggattccagcgcggcgctcagcatctttttactgatcgtcttcttcgcgggactcgtcggaaccgtaatcgcctgctacgcaattttctttcagcggctgcatgacattgggctctccggctggtgggcgatcgccatgatggttttcggcgtgatctgcgctgttgtggattcagtcttcgacaccggcgttttctcggcgcttgactcaatcgtgaatctgatcttcctcctcgcgcttggaattctgccttctcagcctgaagaaaataaatacgggccgaacagcgaggcgaacggcgtctttctctatcagccaaaagccccggcaccggcggatgaagtggcgatcactcattaaccggagatcgatttcgtcgtcattactatttttccaaaaatcgttcgttactcaaagcggaacgccttctcgataaagaaggcgtttttgtttacctattgtttttattcagtttcagcgttatctgaaaaattgcgtattgattctcttataagttatttatataattacaaaaataacactataaagttatgcaaaaagaattgttgcacctagtgtcttcacatttacttcatagttctttagagagattaaaaccatgactgataagaaaaattttcgcaacctccgttgcttcacctggcgaggacggatgagacgtctcccttattttatatgggggatctgcctcaccgctctgatgttcgccattggttatatccttcctctcgctatcattgttggcttaaatcttgatgctggttcagggagaactgcccagttaatgctctgcttcagcttaccggtaaccattctcttttctatatttacatttttcactctcattcaaaggctgcacgatattggtatctctgggtggtggattttattaatcctttttgtttacagcttgatttccgtcggtttccgggacgtcggcgaaattgtggtcgcagtaattggtctcgtgatcatgctttggccttctgactctaaggacaacaagttcgggatcaacgttcctgaaaacggggcttttttctttaagccggaaccgaagcccatgggccagccttaaggaaatctcattcaaccgtcggctgatatccgcaattcaaaattcggcattgaaaaacaagctgaaagacgcctttcccgatccagcaaatgcggattctcagccgacatctcccacggctcaatatcccccctgataagccgcgggagattcacggatccggtctaaacttcaccctgatatgcccctgaagtcagcgggaagcgctggtagcttcccaatcaaggtttcaggaatacataaacgcttaactcctggaggagactctcgaatgaagaagcttggcctcatcggcggcgtcggaccggaatccaccgttccttattacaaaggcattgttttcggcgtgaaggaccgcgtcggacacgactttttcccgcggatcacgattgaaagcatgagctgctttgatgtcgtgccgatgagtgtcgcggggaagaagcaggaactcgtggactatttccttgacgggatcaaatcgcttgccgccgcgggatgcgacttcgcggcgctctcctgctacaccgggcacatggtgtttgaggaacttgagaaagtgtccccgattccgcttgtcagcatcgtcgaagcgacgctcgatgaagcgaagaagcgcggctacaagcgggttctgctcctcggcaccaaggcgacgatggaggatgggttcttccagaaaccgttccttcgggatggggttgacgtggtgacgccggacgccgcgacccgcgactgggtggcggaccacatcatgaatgagctcgagcaggggattgtgaaggacgacaccgcggccgcgttccgtgagattgccctctctcttatgcgtcagcatgacgcggacgctctggttctcggttgcacggaactcccgatggtgttctcaaagtaccccgacattccgcagctcgacggggtccagatccacgtgaacgcccttgttgaccggatcctttctgactaagagttatctctcttttaacacgcttttcagcaggttaccgaggcctgaagaacccgtttcttcaggccttttcttcgactgtttaccgtaacagacataaagcgctgcccccggtaattgcacagaatccggttttccttatatttttcagggtacttgcgcactaactaactgttcaatagaataattaccggactttcgggcggttttccgttctccgccactctccctcatccgaatgggggaaatatccacatttcctgtgaagaagtgtaatttttatttttccaaaccattggaaacattgaactttcgcacagtgcctaatttttaggcagaacccctatggcatttttcgcaattcgggttatgctgttcaaagacttgggtatttcataacagacatatacccggcgctggaagccctaaagacagattcgcgcttatacaccaaaacggcattcattgacgagcataaaaaaggggatttatccctattttccgctgccattttccgcttccccgctttttaagatactcaggtatctgcttctcttgcatttatagaaacttcacggaaaacatgaaactcgaagacttctcctttcgccttggcaataaggaacttaagccgctcatcatcggcggcatgggcgtgaacatttcgacccgcgaaatggcccttgaagcggcgagactcggcggcatcggacacatctccgacgctatgctcccctctgtctgcgacaagatcctcgggacgaacttcacctcgaagaaggcgaaggctcagcggatctatatgaattcgatcgataagagccaggacgtcatttcaagcgagatgctgcgcgaagcggctctcctctacacgcgtccgatcatggaacagaagaagggtgacggcctcgtctttgtgaactgcatggagaagctcacgatgaacgatcccctccgcaccctgaaggctcgtctgaacgccctgatggatgccggtatcgacggcattacgctcggtgcggggcttcatatggcgtccctctccctcatggaagataacccccgcttccgcgacgtgaagatcggtatcatggtgtcttcggtccgcgctctgaagctcttccttcgccgcgcgacgaagcataaccgcatgccggattatgtgatcgtggaaggtccgctcgcgggcggccacctgggctttggcatggactgggcgaactattccctcatgccgatcttcaaggaagtgaaggaattcctcgcgaacgaaggtcacccggatatccccgtgatcgcggcgggcggcatcttcacaggaagcgacgccgttgaattcatgaaggccggcgctgccgccgttcaggtggcgacccgcttcaccgtggctcaggaatccggtctcccgcatgacgtgaagcaggcttacttcaacgcgaagcctgaggatatcgaagtgaacaccatttcgaccaccggctacccgatgcgcatgctgaagtactcgcccgcgatcggctccgccgtccgtccgaactgcgaaacctacggctaccttcttgaagaaggcaagtgctcttacctcaccgcgtggctcgacgccgcgggcggcacctttgacggtcccaccccgaagtgcgttcagagcaagacctgcctctgcacccagatgcgtaacttcaaggtctggacctgcggcgcgaaggcgagccggctgcacgagacgtcggtccgcggttctgatggtctctgggtcgaaccctccaccgaacacatcttcaatgactatatgaagagcgagaacggtgagatcgcggtcccgtccctgaaggaccaagcggttcccgcctaatcgactgaaaccccgggcagcgtcaccgcggcccggcgtatttccagaatccaaaaagcatcgccagaaggaaaaaccttctggcgacttttttatgtgtgttccgaaagatccccggaaggagatctttaccccctctcaggcgcgttccggctcatcgagaatccaccggccgtacttcccgcccaccttccggatccagtgcgtcacgccgagatagaggcagaaagacgcgaaaatcgcgagcgcgcagacgaggaacgcgagcaccacgccctgagtccccgcgacccagtccttcggcacatactgaagcggaccatccggcgcgaagaggtagtgaaggacaaagcgccacacggcgacaataatgagaaccgcgacgatcgatgccccgtaatccagaaatttcttcataggaatcactcctatatcaacctgctgttatctcaatggtagttccggaagagagaacacgggagactgaagagaggatcggacctcagtgcttcttatcgtccttctttccatccttatcttttttgtcaccctttttgctgtcgtccttcttttcttccttctggacttcctcgatctccttcaccgcctccacgagcgcatgcgcctcagccggcgcggcatccttcgcgatcacctgtgagatcactttcttttcgaccgtcttgctgtcgagattcaggtctttcgcaagcgtgaggaggttgcggagttcgccgagcttcgccttcgtttcgtctgaaagcggcgggaacttcgggttcatcgcttcaagcgtctgttcaacgatcgtcccgaccacgtagcggagataccacttgttatccgccggcacgatgtaccagggggaatgttccgtcgtggtttcttcgatcgtttccgcgtagagcttctgatactcaggccagtagcggcgttcctcgaggtcagaaagcgagaacttgtagtgcttctcttcgttaaagagccggtccgtgagccgcttctgctgctcatccttcgacacgtgaaggaagatcttcaccatgcggaaggcgttctgccggagatacttttcccagttccggatctgatcgaagcgttcgtcccagaggtgctcgtcgtttttgatttcgtcgggcagctggcggtctttgatgtagttgtggagccttacagtgacgacgtcctcatagtgagaccggttgaagaccccgatcatgccgcggggcgggagcgcacggttcacacgccagaggtaatcgtgatccttctcgatcacggtcggagccttgaaggacgcgatccacatgccagcggggtcgacttccgtaaagacgtgacgcacggtgctgtctttccccgccgcgtccattccctgcaggacgaggatgattgactgcttattctcagcccagagcttttcctgcagcgactccaggtgactcttcagagccgggaaaagcgtgttttccacttcgttcttatccgcctttggatccgccttggtgctgatcgcggcaagatccactttgtcgcctggcttcacccggaatttctcgatatctagcttcatgctttgactccaatagcggtgcggaaaaaaatatcctgattcctataggttaccgccgcccgggcggcgctgcgtacctttccgccatacgttcacaaaaaatttccttttcttttgaatcggatttcctgtcggacggaaaatctttcgccagcatccccaaaaaataggaccaaagtccttccagactctccaaatctttctatactgcaagcccactcaatgatttctacaaagcgtaatggccgtgagtctcatccggcctcagataatggatacagaaaataaaaattccggcggcatccgtccctggctgccgcttctatcgcttgcgtgcgcggtattcgcttttaattcctctgaactgatgccgatcggtcttctgatcgacatcgcgaaggactttgagatcccggtcgcgaaggcggggcttctcatcacgttctatgcctgggtggtggcgctgatgtcgctgcctctcatggtgctctgctcccggatggcttatcggaaactgcttctaggcgtactgctcctcttcgcggtgagccacgtgggaagcgcgctttcgacccaatactggatgctgatggcaagccgaatcggtgttgcctgcgcgcattcggtcttctgggcgatcgcgcctccgatggcggtgaagattgtgccggaaggaaagcgcgctctcgcgctctctgtcgtcgccgcgagcacctcaaccgccctcatctgcggcctgccgctaggccgcgcggtgggactcctgcttggctggcggtggaccttcgggatcgtcgcggttctcgctttcctcattttcgcgttccagctgagagtcatgccgaacgtcccgaacacgagctacatcgcgccgcagaagattccgggcgtcctgaagcagcccgtgctgatcgcgactttcgcggtcaccgcgctcaccgtcacggcgcagttctgcggctacagctacgtggagccgttcctcaagatcaaggccgggatgccggactcgatggtgacctgggtgcttgtgctttatggcgtcgccggcattctctcgagcatcctttatacgaagctctacgataagcaccataagccgttcctctacttcgcggtctgcggcatcggcgcggcgctctttatgctttaccccgcctcctggttcattccggcgacgatcgcggtctgcgctttctggggtatcgcgattatgaccttcaacctcgtgctgcagtcgctcgtgattgaagtggcgccgcccgcggcggtcacgatcgctatggcgacctattccgggatctataacctcgggattgggtcgggagcctttatcggcggccttgtggagcgctcaatcggcgtgcagttcacgacgctcgccgggttcctcgtgtcgcttgtcgcggcagcggtgttctttaagaagctccttccgaatgtcatggggctgctgaagaaagaagcctgatcggaatccccggattccccaaaacaaacgcctgaggtctccaaagatctcaggcgttttcgtttggatggatggaggaacagcgtcctccagatccagatctttttaggcgaggctctccagcatcgaggcggcgtcatcagaccccaggtccgcggccttcttcacgagcgccttccccttctcgcggtccagcgcgatcacggtgcctgagagataagcgagcccgaagttcagcgtcccgtaggggtcgttcgcctcagcggctttctcgaggaacgggataccgtccttcttcatctcgtccccaagcttcccgttcacaaggaggctatcggaaattcgcgcaagaaaactacgagaccacaatcgtgccccaaaacaaaggaggaagtgattcctataccaaaatagatgtaatgaaatttccgttacctgtaatttctatagatgtctatgttattacaagtaattcatcacaaaaaaacttatcgtcttattttgagtattacaaatacgtatcaataaaatttgcttcctctagacgggaaattaacgttctaggttaaatatttcaaattgatcaaataatttgcaatatttaaaaaaagcggttcactgtctttagtgaaccgccaagaagagagaaagcaatgcccgaaaaaataattagattagaagtagtgagtcatgccagaatagactgaagtagtgcgatacttaagacttccctcatcggcaccctcaaatttaattgaactggctttagcctgggagaaatctgcgcccacatagagatccgttctcttacctgaattcccgatttactt

SEQ ID NO: 1269 - DNA, 5332 bp, Unknown
  gut microbiota DNA sequence
gtgataattcgccttacaacaaatcacacatcaatcgataatcgtgagtttatgtaatagcaaatacaaccgataagaatagcgctacttttcagaacgcctttcacgcacagtctccgcgcgaatccatacatcactcaaacaaaaacccaggcggttttttagaaccgtctgggttttaagaaaagcgaaactatctgcgattaagcttccgcggcttccggattcttaatgaagtcgagaaccgcctgggcgtggccagccgccttcactttccgccattccttcacgaggttcccgtctttgtcgatcaggaatgtgctccgaacaacacccatcaccttctttccgtacatattcttctctttgatcacgtcgtacgccttgcaggccttttcttccgggtcagagaggagcgtgatcgcgagggtgtagcggcagatgaagttctggtggctcttttcggagtcgcgcgagacaccgaccacgtcgtacccgagcttctggaactccggaatcagagcggtgaattccttcgcttctgtagtacagccggaggtgctgtccttcggatagaagtagagcaccatcggaaagtgatcttccatcttgaagggcttgccgtctgaatcattgatctcgaaaatcggggctttcgtcatgtctgactcctgtaatttgtgagttttgtgccccgaaagagagaagccttccggggcgctctgtgtctcaaccattatggcgcagaggcggggagtctgagagcttcagttcgggtctttatttttatttattttcaatagcatatctttttattatcgcattcttatccgagtcttaaaagcggattttccttgatgcggttttcttcgaaaagagcgatacttttcttgcgatcggaagaatctccagtcgggccggtaaagcctcgaactgcgagcatctcttccagcaacagccccaggaaaagtccgcctatatggcctatgacatctaccccctggggctttttcgttgcccgcgtttttcagtgtttccgcttttttgtagtctgaaattcatccggcactttcccggaacttccgcaattccccctcggttctaccccttgaggagggtgagaaacggtgtcagttgtgaagagaatgtcttttgagatgtcgccctgggaaagtctcgtctcggactgcatcccgctgtttttccgtcccttatccggtcacacaggcgatctctgatccgtagtgaaaaacggctcttccgtcccttttcagttggtgttcgctctgcccccataagcactagatctaggttttattaagcgcggattaacattccctagtaaaatgctcactcacacacagctgaaaagccaattctcatcctaaccactctgacagtaggttactcaatgctgataactaaaagaagcggtcaaaccgaagagtacgatcgcaaaaaaatcgcccttgctattacgaaagcgtttaagagcacaggcattgaacaacccgacgatctcgacgagctgcttgatctcgtggaaaagcagattctcgtgacaccgggctgctccgttgaaactattcaggaccgtgtcgaagaagctctgatgcagcgcggccactaccaggtcgcgaagaacttcattctgtaccgcgagaagcggacggaactccgtacctgccgcctcgcgctttctgtcgcgacgggtgacagcgacctcgatggctgcctcttcgagatccagaatgacttcaaagcgcctgagtattcgcttgaagtcctcaccgcgaagttcaattcccaggtgtcgcccaccgcgagtgtcgacgagaagctcgacaccctgatccgttccgccgtggaactcacgacgcagaacgcgccgcgctacgagcagatcgccgggcggctgctctgccacagcttcaagcggaagctcgcgcagcgtgagcagaacctcggtctcacggacttctatacgaagctcatgttcctcacggagcacggcctctacgggaagtacatcctcgagaactacacgaaggaagagattgatgaggccgcgggcctgatcgatgagaaccggaataagctcttcaactactccggccttcagctcgtgctcgagcgctacgtgatcaagagccacaataacgagatcctcgagagcccgcaggagctgttcctcggcgtggcgcttcacctcgcgatgccggaaaagaaagatgtccggatgcagtacgtgaagcggttctacgacatgctctcgaaactcgaagtgacgatggcgacgccaaccctcgcgaacgcccgtaagccgtaccaccagctctcgtcctgcttcatcgataccgtgcctgacagccttgccggcatctaccggagcctcgataacttcgctcaggtgagcaagttcggcggcggcatggggctttacttcggcaaggtccgtgcccgcggaagcgacatccgcggtttcaagggggcggcgggcggcgtctcccgctggatcaagctcgtgaatgacacggcggttgcggtggatcagctcggtgtccgtcagggcgccgtggcggtttacctcgatatctggcaccgcgatatccccgaattccttcagatgcggacgaataacggcgatgaccgtctgaaggcgcacgacaccttccccgcgctctgcatcccggattacttctggcagcaggtccgcgacaacttcaacggtgtctggtacctgatgtgtccgcatgagatcagccaggtccgcggctacaaccttgaggacagctttggagaggagtggacgaagcgttacctcgagtgcgtgcacgataatcgcatcacgaagcgtgagatcagcctgaaggatctggtgcgtctgttcctgaagtccgtggtggaaacgggtaccccgtttatcttcaaccgcgacctcgtgaacgcgatgaacccgaacgcccactgcggtcacatctattcctcgaacctctgcacggaaatcgcgcagaacacggctccgattcagagcgtgagccgcgagatcaagacctctgaaggcacggttgaagtggtcaccacgacgaaaccgggtgacttcgtggtctgcaacctcgcgagccttaacctcggccgcattccggtggatgagccggggtacctcgagcacctgacgtcaagcgtcgtccgcgcgctcgataacgtgatagacctcaatttctacccgaccccgtacgccgagatcacgtcgaagcgttaccgcgcgatcgggcttggcgtgagcggctatcaccacatgctcgcgaagcacggcatccgctgggagagcgaggagcatctcgcctttgtcgacaaggtgtttgagcgcatcgcgcactccgcgatcgagacgagcgctctcaacgcgaaggacaagggcacgtacggcatgtataagggaagcgactgggacaccggcgcgttcttcgagaagcgcggctacaacaccccgtactgggatgacgtgaaggcggatgtcgcgaagtacggcatgcgaaacggttacctcatggcgatcgcgccaaccggaagcacgagcattattgccgggacgacgcctggcatcgacccgatcatgaaccgctacttcctcgaagagaagaagaacgggctgctcccgcgcgtagcgccggatctgtcgtccgacacctggtggctctacaagaacgcgcacctcatcgatcagaactggtcgatccgggcctgcggcgtccgtcagcgtcacattgaccaggcgcagagtatcaatctctacatcacgaacgactttacgatgagaaaggtccttaacctctacctcgaagcgtggaagtgcggcgtgaagacgatctattacatccgcagcaagtcgcttgaagttgaagagtgcgagtcctgctcgtcctgatggagtgaagtaaagaaatgttcaagaaaaaaccgttgttcaacccccagggggatactgatatcggcgcgattcagatcgtgggcggaaacccgacgaacctgaacgacttcaataaccataagtacccgtgggtctccgactggtaccgccaggcgatgaataacttctgggtgccggaggaaatcaatctcgcgcaggacgtgaaggactacccgaatctcgaggagccggagcggaacgcgtataacaagattctgagcttcctcgtgttccttgattcgctgcagtccgcgaatctcccgaacatctcgagctacatcacatcgagcgaagtgaacctctgcctcaacatccagacgttccaggagtgcatccactcgcagagctacagctatatgctggacacgatctgctcgcctgaagagcggaactcgattctctaccagtggaaggaagataagcatctcttgaagcggaacaccttcatcggcgagcaatataacgagttcctgaatcacccggatgagcacaacttcatccgcgtcgtgatggcgaactatatcctcgaaggcatctacttctactccggcttctcgttcttctataacctgagccgaaatgagaagatgccggggtccgcgcaggaaatccgctacatcaaccgcgatgagaatacgcacctctggctcttccggaatatcttccgtgagctgcaaaaggagcatccggaatggtttacggacgacctgaaggccgagcttctcgagatgctgaaggaaggcgtccgtcaggaaatcgaatggggtcactatgtgatcggcgacaaggtccgcggcctcacgcccggcatgatcaccgactacatcaactacctcggcaatctccgctggatgacgctcggctacgagccctacgatccgagccacgctcaggaaccggcttccatgcagtgggtcagccagtatgcgaatgcgaacatggtgaagaccgacttctttgaagcccgagtcaccgcttacgcgaagagctcagctctggtggatgacctgtaaggcatccgcttagagcgagacggcgctgtcttcctccctggagacagcgccttttttattgcaccgacgggaagcgccagcccattgagtcagaaccgtgaggagcgaaggcagatccgtttcatcaaacgtttgtgctcatattgtttacaaagtgagcacaatcgtttattgtctttgatgtttgtgctcatattgaatacaatatgagcacaaacgtatggaggatggcatgcaaacattggataaattgaagaaaaagcacgaatacctgactcccgaaatcgcagaacaggcgggcgtttcaagatcccttttttataaatggtgaattatcaaatcaagtgca

SEQ ID NO: 1270 - DNA, 689 bp, Unknown
  gut microbiota DNA sequence
ccaaaatcatgtagtgtttgggtgtacatctattacagtcttgcagttgcaaataatgagcaggataaatttttatctgatttggtaacctttgaagaagactggattaacgggttagccagccctgattccaaacttttgagattctatgaaacacctgatagtgaacccggtaaaaagcctctgatcagaaacaatgatgctgtcaatgaaaaggtcagatacatgggattcttttcaatgatcagcgatcgaaaacttgagtcgaaagaaatcctggagatctacagaacgcgcgactgcatcgagaaatgctttggggttatcaagactgatgttggttttacaactacaaggggacactccgacgtttctgttaatggacgtctcttgttagccttcatcgctgccacaattgtttcctggctcatcaaagccatgagtgttgaagtgaaaatagggaagaaatcctatgcacctctgcttgacgaatattctctcatggagctgctggaagatgtggggcagatccgtttctatagctcatcaacaggaaaagtttggctcggggaaattttaggtcgccacagactcgtttttgagcgactcggactggaaaactgcctcctgaatcccgctatgtataagtaaatcgggaattcaggtaagagaacggatctctatgtggg

SEQ ID NO: 1271 - DNA, 34391 bp, Unknown
  gut microbiota DNA sequence
gtatcgttatcaagattcttgtgggtataggcgaggcccgtatccacgcggccgtacagcgtgacggacggagcagcgaaagcggatgccgcaaaagtgccaagcagagcagcggcaatgagagacttcttcatgaaattttctccagtagtttgaatgtgtgtattgctaactacagttttaagggcttttggagtcaccccaagtgcatgatgcaaaaatatttcccggacgttcatacgggtaaaccctttatgatttatgtccgacagaaattttttatttactttcaataactaagacaacgttacaactatttttcgtatttctttaattcaccgttttctgttgcttttatgcaacaaactggcaaaaaacagcttcagaagagcttccctgaaaataaaaaacaatatccgagagtgagttacaaagtgtaaacagtacaggatattgacttgtccgaaaatctgggagcaagtttttatctatttacttttgtgatccatatatcaggaattcacgtcacctttctctttctcccgttatgtcgaagccgccggcttttcagaggcgcaaaaaaaccgcatccctcacggaatgcggtttttcagttctcagcagaatggcgaacttctgccggtctcttttaagagatcagaacttgtgaacgaggccgaaaccaacctgggcaccgctcgccttgcggtcaagagcgttcgccttttcctgggcgtagccagcgagaccgtagacgttcgtgcgcttgctgaaggcataggtgtaaccgacagccgcgttccagcgcttgaacttgtaggagccgtcatcgacgtccttggcatcacgatagccgacagcagcaaggaagttgccgccgaaggccggaacgttcgtgccgagttcagcaccccagcccttcagagcctcagccttcttcagatcgcgggaatcgctgatcagatcgaaggagtcgagaacgttcacctggttatcaaagtaggtgaccttcgcgaaagccttcgcaacgccgaagtcgtagttgccgccgaggatgaagctgtagccgttatcgacattgccatagttggcagcgtcgttgccgtacatcgtcatgtcaccggtgaggacaacagcggccttgccagccttgtagcggaggccagcggcgaggtagcggtcagcatcgccggaattctcacgggcattggcaacattcgtgtcagaagccttggtgtcgcccttgaaggaatacatgatggcaccctgcaggccgccgaacgtcggggtctcataggcgagggtgttgtcatagcggccataagccgtgccggtggagccctgctggttgccgacaaagccgtaggcagacgggaaggcggagacgtcaccaaggtagccgatcgagccggaatcagaagcgatggaggcgagacggccggcgtacagagtaccgtaggcaccggagatgttcacctgagcttcacggccgaagagacggttattctggccggaggtgccgtcatcagaattgaagccggattcgaggacgaagccaaccttcgcgttgccgatgtcttcagaacccttcagaccccagcgggagccggtggtcacaccggaatccatggagaacgtgtcggtggaaccggcagtgttatccagattcttgtgggtgtagacaagacccgtatcaatgcggccgtacagcgtgacggacggttcagcaaaagcagaagccgtgaaagcgccgagaagggcgagagcaagtagagatttcttcattatgtgtgactccaaaaaatatatctgaagggaaatgcatctgagtgaatctcccctctgacttcagagatgcggccggaaaaaaaggagtcttatggtacaaaccctgattgtaaaacactacgaaaaataacattttgaaggaattcagattgctggctaagtttatgtaactagttgatacatttgtgtaaattgtagccgttgtcaaaaagcaacagatttccctcagatacacatttaattacagtcaccggcctttcctttacagggtgagagacctgaaaaaaagaaatccccgcctcatttctgaagcagggattctgtacagaagccatcggccgccgcctcaggaaagaagcagcggaagatgaatttccgcagtgtcaggcgggattacttgccggcgatcgcgcgcttctcacggagccgctcgataccgagttcgtcataagcctcgaacggctggtggatccaggggttcccttcgaggtaagagacgaaataatccggctggaagatggagcgttccttccaccagagcacagcgatacggatctcggtgatttccggaaagtcgctcttcaggtgcttcaccaccttttcaagcgtgatgccggagtccaccatgtcatcgaccagaaggacctttcccttcagagcctcggtgccggtgatgcagctgctgatattcagctcgccctgcaccgtgccggacatcgcgcggtaagagctcgtcgacagcacggagagcggcttcgagtagacgcgcgagaaaatatccccggggcgcatgccgccgcgagcgagacaaaggagagaatcaaatttccagccgctgtccgcaaccttgaggacgagctgttcattcaggtcgatgtaatcctgccaagatacaaagagatccgccatggcttttcaaatccaacaaaaaaaggaaggcagcgctgcgttttttactgcagtgccgcctgtgtgatgcttataggctgtcggtctgatccgcttgcccgcggatcagactttcccctgtttatggggctcaggcttcaaacggatcgctgagcagaatggtctgttcacgatccggaccagtggacactgccgcgatcgggcagccagccacttcagaaaggcgcttcagatagctgcgcgccgcagcggggagtttatcccattctttgatgccataggtactggtcttccagccggggaagtcttcatagatcacttcgcagcccgcgacctcttccgcgccgtaaggcatcacttcgagttcaacgccgtccttcttgtagccaacgcccagacgcacgacatcgcactcatcgagcacgtcgagcttcatcacggcaagaccggtgaggccgttgatctcaaccgcgcggcggagcgccgcgccgtcgaaccagccgcagcggcgcggacggcccgtcacggcgccgaactcgccgccgcgctgacggatgcgttcaccctcttcatcgaggagttcggtcgggaaggggcccgcgccgacacgcgtgcagtacgccttcgtgatgccgaggacgtagttgaggtgatgggggccgacacccgcgcccgccgtggcgtaacccgcgacggtgttggaggacgtgacaaacggataggtgccgtggtcaatatcgagcatcgaaccctgggcgccttcgaagaggaactgcttgccttcggccatcagcttattgagcgtatgggagacgtccatcacgcgcggcttcagacgatccgcgaagccgagcacttcgtcgatcaccttctgagggtcgagggcctcagcgtggaggaagtgcgtcagttcgaagttgtggtactcgagagccgtgcggacgcgctcttcgaagaacgggacgttgtagaggtcagcgacgcgcaccgtacggcgggccaccttgtcttcgtaggccggaccgatgccgcggccggtcgtgccgatcttcttcttgccgaggttattttcacgggcatggtcaagagccacgtggtacggcatcagaagcgcgcaattgccggacacgtggaggcgggactccgcgtccattccgtgttccttcagctgatcgagttcggagaaaaaggcggacggcgaaaagacaacaccgttgccgaggtagcactgcatcgtcggatgcatgacgccggacggaatgaggcgaagcacggtcttgttgccgttcacgacgatcgtatggccggcgttgttgcccccgttgaagcgcacgacgccgtcgaccttggaggtgagccagtcgacgatcttgcccttgccttcgtcaccccactgggcgccgacgaccactacattttttgccatctttttctcctaaatggacttggcggagacaggaaccacctgccactcacccttttcgaaaacaatacgctccgttacctggaagctctcagcgagcccggcagggtcttctcccggcagcagctgcacgacgattctgccggcatgacggagtttgcgcacgagactctcaagcttcggatcttctgacgccgggggcgcaataaccgcgaagggaagttcgggcgttctgagcacagcaagctcacgtagatagagtgtaaatccaactgccggtctaaagcgtccgaacgctaatccaattccgtcatagcggccgccccggaggagcggttcgggcagatcttcaacaagaccggcaaaggaaatacccgtgtagtaatcaaatcctgtcaccgaggcaccgtcaatcgtgacgtcgtcggctccgcagcgctccgcgatccaccgaagctcatccacggccttctcggcgtccgggttccccttgcagagcgcgagaacgcggtccagcgcgtcgtcgccgccataaatgaggcagagtccggagagcgcttcaacggtcttcgcggagaggggcgccgcggcaacagcgagtcccgccggatccttatcggaaagcgccgcgacaacggcgtcctggatcgcgggggtaagcgccggggccgatttcaggatggaacgcacaatcccggtgtagccgattgcgagatgtacgcgccggataccgacttcgcgctgcatatccacggcgagccgcaccatttcaagatcggcctcccgccctgtcgcaccgaacatttcggcgccggccacatacggctgacgcgtagcgagcgggtgacgaggccgagcgtggagcaccgaccccgcgtagcaaagccgtgtgatcccggtgcggttcagaatgtgggcatcgatacgcgccacctgaggcgtgatatcggcgcggaacccggcctgacggccgctcgcctcatcgacaaacttgatcgtcgtgcgatcgagccggttgccggtaccggtgagaagagaatccaggaactcgaacatgggcggacggatagcttcaaatccgtgagacctcatcacttcgagggtgcgcgtacgcagggtttcaagttcccgcgtctgccggggcagcatgtcggcaatatgatccggtaatacccagttcgtcatttggaaaaaatcctatcaaagcgaagcaatatcggtttgcagcagccagataaccgcgaggccgcaaagcacgccgacgatcccaagcttctggatcgctgagtcaggcacctgctgcagaagcgacagtgcccgcttccagcggcggggcgagatcatcggcatcaggctttcgaaaatcatcatgaacccgaaggcgaccagaagctccttcagtcccatcatggctttgtgcctccaggaagtccccggaagtcgggcatcggggcgagcttttcaccaggcttctcttcagaacgggccttttcaagcgccgaggagaaatcccggattccagtcacacggtctattttctgataattcgcgttcgccgcggcatcggcttcagacttcatctgagcggcgcggctgagcgccgcggaaagcgtctgacgggccttcgcgtcggccgcggcgcggatctctgacgcgctctcctcgacgaggcggcccgaggcctgcacctggccattcagaatcttcgcagtggcgtcaagggccgaagcctggctcttcgcgttgaggcgcacttcagcgactcgcacggattcaatccgcacgccgcgcttcaggaattcaggcgccactttcgccatcacctgggacgagatccagacgccgccccgcgtgatgagagacgcgtcattcagcccggcggtttcgccggctgacgcggtctgcacggcctgcgtgatttcgcgcgccgtctgatcgccgcttcccttgaattccttccaccagacttcaggcttcacgacacgccacaccacatcgtagccaagcgtcggaatgctgccttcacccttcggctcaagcgccgacacctgaagcgactgcccgcggcagtcaatcatcgcggtccgctcaatggggtccgggagtttcacatgaagcccaggctccgtcacctcagcagacacggatttgttccatccaagcacgagcgccgcccttccctcttcaaccgtgaagaaggaaagtctcgcggcgagaatcgctgccagggcgatcacaaaggctgctatcaatttcttcatgatcatcgtctcctagcgtccgcggttacggaggtaatcgcggcggtccgtggtgctttcacgctcattcgcgggatcctcgcccggggttgtcacgttcgaagccgcggcctccgcggctgcctcagcggcgggtgacgacgcgggaatggaagacgcggcggcaggagctgccttcttctccgcgtcaagcttcttctgggcaatgatctgggcttccgtcaccaccggaaccgcggattcctcacccggcttcccttcaggagccttcggtttcgcggcgcggatcaccgccatcaggtcatcaagcttcgcgttcgcgatcgatcccttgttcggaagggctgctgcgagcccggcggtccaggcctgctcaatcgcgtcgcgcttcgcggcgtcagaagccttttcgccatagaggtagctgatatagcggctgtccatttcggaaacccgcacaacgcgctcccgataggattcagcattttctaagatggcgcgcgacgtgttgacagacatcgcacccgcgagttcagcccacctctgagcattcccgaacgcgttttcacccgcgttctgcgcctcaagcgccacgcgtgaggcctcacggacttcagtcgggataccggcgttcgtgaccgacacggattcgatatggacaccgagaccgaggctgtccgcttccttctggacccgcttcgcgagatcgtccttcaggagcgccgcccggccgctcagcacgtcatgcaccgtcatatcggtgaactcctgacggagcgcgcggcgaagcgccgcgtcgatcacttccgagggattcaccatatgttcgagataattccggacaccgtcagacgcgacctgccactttacggtggcggtggcggaaacaaagctgccgtcagcggtaaggagataaccttcgcccgctttccccgagaaactcacgtcctggctgtgcacgagacgcgtatccaccatgcggactttctcaaagggccacggaaagtgccagtgcgtgccagggccgaccagttccttgaactgacctgtcgcgtaaagcgcggcggtttcgccggacggcacggagtagaagccggcgccgaggtacgcgccgaccgagaaaatggcaacgatcgcgaccagcgccgcgatgcggctcgaacgcctgctgcgatcaatctgggggatatcatccgggcgcggggaatccggggttccgggcttctttccagtctgctgggcaccggatgcctgggggccgttctttccaccgtttgcccagatggactgcaggaggtcattaaacgccttccactcagcgtcaaggtcctttccgctcttcttcgcggaggattcctcagtgtcttcggggcggccggagtgagagtcactgttcgggattcccggattgcggatttcgggcttctcgggctgcggctgcgcgcgacggggctcctcaggcttctgaggaggctccggcgttccggtaggttccgaaccggttccgctcactttcggcgttcccggctcattcttacctgaagaagattccttctccggatctttcttttccggttccgggtgtcttccccagcggtaatcatcaatagacataaagaaaaaatcctgagggggatgtccccgaaattcctgcgcgcaagcgcacccctgccgtgccccgaagggtacagcctgcaagtctttcagtctaacacctgatccgccccgggcaccccctttggggatcccgctgggacgggaaaaggcgcatgaatcaagccgtcggttttcccgcgcggcgggcttcggcttcgagcttcgcctgttcccagggctcaagctcacgggccttcaccgggtgatccttatgccagtgctcggcaaactccagaatggcggcccggagctcatcaagcccctcgcccgtcacggcgctcacgcccacggaacggacacgtcccttctcatcccgaacaacaccggccgcggccggagcccggtcgatcttgttatagacaaggatcgtcggaatcgtatcggcatcaatctgggaaagcacctgattcacggagtcaatctgatcctcgcggacttcgcttgaagcgtcgaccacgtgaaggagcagatccgcgtgcacggtttcctcaagcgttgacttgaaggcctcgacgagctgcgtcggaaggtcacggataaagccgacggtgtcagaaagcaccaccatctcgcttccgcccacccagcagcgtctcgctgtcgtgtcgagtgtcgcgaaaagctgattcgcgacataggcgtcagaccgtgtcaggcggttgaagagcgtgctcttccccgcgtttgtatagccgacaagcgacaccgtcatctgatcgccgcgtgttctcgagcgacgctgcgtgtcacgctgccgctccagcttcttcagctggaccttcagctgcttcacgcgctcagaaagcattcggcggtcgagctcgatctgcttttcgcccgggccgccggtcttcgaaagaccgccgcgctgacgctcaaggtgggtccatccgcggacaagacgggtcgacaggtgctcgagcttcgcgagctccacctgcagacggccttcacggctctttgcgcgcttctggaaaatttcgagaataagctcggtgcggtcgagaacggcgatatgagccgccttctcgatattgcgctcctgggctgccgagagcggcgtgtcgaatatcagcacgtctgctccagcctcccgggccgcggtcgcgatttcttcaatctttccgctgccgagatatgtagcaggatcgggcttgtcgcggtgagcctccgtgaggcccaccgggatcaaggcatccgaggtgacgagaagcgaaagctcctcgcttgcatccggccggaaatcccggccgaggcttacgcagacaagccaagcctttccggggcggtcatcccgctcccggtctacctgaaatactgtcagatcaagactccggagtgttcgtgatagtgacggagcgggtcggcacgaccgtgctgatcgcgtgcttgtagaccatctgcgtcacggtgttgcgaagcagcacgacgtactggtcgaaagattccacctgaccctgcagcttgatgccgttgatcagatagatattgaccgggatatgttctttgcgaagtgcgttaaggaaaggatcctgaagaagctgtcccttgttattgttggccataatgtttttcccagcgcttctgcgcttgttctttgtttgctacacccgccaataaaaaagcgggtgacgaagtgtgtgtgctgacaaataaagacctgtctgcacccaattatcatacgtctttatgaggagccttgccggacccgagaatttcaatccggcggcggagaccgtcacggatcgtgtcaagcgacgccgtcgccttcccgagttccccctcagagacaaacccctgcagctcgcggaccgcacgggtgatttcctcatccagctccgcggtcttctgcgaggtctcggcggtcaccttgggctgactcgcgcagagcgcctggacttcagagagacgctcctgaaagggttcattcatctctttcccggcaacctcggcgagccccaccttccagatcgtgcagacactcgggcggttcttgatcggcgcgccccagtagagacgcgtgaggaaccgcgtgagcagcgtccggaaaacgatcgccacagcggcaatcccggcaagccacgccgcaaccatcggatgacggagtcccacgaacgccgcggccaggcccgcgatcgcaagcgtcaccacagccaccgtgaaggaaacggagggagcgccgagccccgtttgatccccgatccggctctgcggataagcgatagcgttcacaaacatcgcgaacgccgcggcaagcaccacctcaaccgcgagcagcacattcgcgtcggggttaccgagcggcacgccgacccagtagatcaccccgagcgaaatgaggaagacgaccacagtcagcagccaggctgacagcttggttcttttcatagtgctgccttctttttactttttcttgccgtttgcgggcttcggatccgcgtacgggttgcggccggtacggaattcaatcttgagaggcgtacccgcgagattgaacttatcacggaaccagctttcgagatagcggcggtagctgtcgccgatctgctggagcgaattgccgtggatcacgatcaccggcggattcgtgccgccctggtgggcgtaacgcatcttcgggcggaccttgccggcacgcggcggctgctgacgctcaacagcctcaatcagggcgcgcgtgagcttcggagtcggcagcttcgcgatagcggcctgataggcttcctgaaccgccttcatgaggtggttgaggccgttatgcttcagggcggagatatgcacgaacttcgcccagtgcaggaaccggagcttcatatcgagctgctgatcaagctgcgagcggtcgtaggcgctcatgccatcccacttgttcacggcgacgacgagcgcgcggcccgagtcgagcgcgtattcggcgatgtgggcatcgtgctcagcgacaccgctccgggcgtcaatcacgagcaccacaacgttcgaatcggcgatcgcctggagggtcttcacgatcgaaaacttctcgatcgcctcgaaaacacggcccttcttgcggagaccggccgtatccacgagcgtgaacggatgaccgtcgtactcgaagtcgatattgatcgcgtcgcgggtcgtgccgggcatatcgaacgcgatgacgcgctcttcaccgagcagcgcgttcacgagcgtcgacttgccgacattcgggcgtccggcgatcgcgacacggatccggtgttcgccctcttcctcctcggcgggcttctcttcctcctcatcctcagggaagggggaaagcacggtttccatcaggctcgcgataccctgaccgtgagcggctgacaccataaacggctcgacaccgagaccgagttcatagaattcagagcccgcgatcgcgctgaggccttcagccttattgacggcaagatagatcttgcggcccgattcgcgcagcgtctgcgcgatacggtgatcctggggcgtaacgcccgttctcgcgtcgacaataaagataacggcatccgcttcttcaatcgccagctcggcctgagacgccatgtggctcaccacgccctcgggtctctggggctcaaaaccgcccgtgtcgaccacgatgtaggggcgcgggcccaccttgccgtcgccgtagtggcgatcacgcgtcaggccggcaaagtccgcgacaatggcatcccgagtcttggtgagccggttgtagagtgtggatttcccgacattcggacgaccgacaagcgcaataaccggaagcatgagagaaatttcctaaaaaataaaatccgctgtgctgtctttagcggctggttgaccggatgaacgccagttctccgtcaaccgtttgaaaaatggctccgtcgccataggcaatcggagtggtgtaaatagcgcccgagaggcggccgcggcccatctcacgcccggtgatcgggtcaaggagatgcacgtaaccgtcatagtcgccgctcgccacataggagccgacggcaaccggggcggagttctgacggtacttcatggtgtcgttcttccagagctcgccgcccgtcgcaagcgaataggcgtgaatcgtgctcttctcgtccaccacgtagacggtcttcaggtcagccgtcggaccggtgacggcgtcaaccttttcggtccagcggacagagccgttctgggcgctcatgcaggtgacacggccctgataggaggccgcgcagagaacgccggacgtgacgagaggcgctcccacgacgtcattcagacgctcaacctcggtgatgccggaaggcatcgagatcgacgcttcgaacgccaccttgccggtgagcgaaatgccgatcagcttgccgttcgcctggccgacaagaatgccgtcagcgaagaaaatcatctggcgcggcgcgcgcaccgagaggatcggcacctgcccctggtagtaccaggcctgttcacccgtgcgggcattgaacgccgtcacgcgggtatccgacgtgtgcacgatcacgagatcgtggccgacaagcggcggcatatcgacttctgacggcatcttgcggcgccagagttccttgccttcggcggagagcgccacgacgttcccctgatccgtgccgaccgcgacaaagtagccgtcggagccgacgcctgccaccaccttctccttcagagaggcggtccagaccttggcaccgttcgacggatcaatacggaagacttcgttcgagcccgccgcatagagtccgttgccggcgagagccggcgtaaggaaggagtgctcagaactgccgagcttcgtcgaccagaccgtattcacggtcgcggactgctgaatctcggtgagtttcaccggggcccgggggctatcggatgagaagagggaacagccgcccagcgcgagcgcaaggcctgcggcaattgcggtgcgaagtaatttctgactcatgtgctctcacactccaaaaatgttgattgatcagccggcagcggaagacttggcagccgggggagaagccggagcggaggcagcggcagaagaggcggcagcagaagccgcggcgggagccggggcagccgtgccgtcttcaggaagcgaatccagcttcagacggatcagattctgcagcggatcaccgtcgcgggccgcggagatgccatcctgccaggccttgcgggcctcggcgttcttgcccatcgcctgatacacgtcacccaggcggtcatcgatcacgagacgctccgtgtcggtcgcgggagtgaagcccgtgagaagggaaaccgccttgtcgtacgacttctcgtccatcaggagaccggcgagacggacacgcgcgatcgcctcaaactccttgcggtcaccgtgatccaccacccactgaagcttctgcttcgcggtggcgatatcgccgttatcggccgcatagcgggcggcgacaaaagccgccatcggaccgtagaccgtggagccgtactgatcgatcaggccgtcggaaatcgacttgatgttcttgccgtcctgattgttcacagccgtttcaagcgccacataggcaacagaagccttggcggtctggcggtggttccaccacttccagccgttatagccggcgacgccgacgcaggcgagcgtgatgacgaccagaacgggcgtgccccacttttcccaccagcccttcaggttgtcgatcgactcctgttcctcgaggttgtatgccatgtcaaaggtccttcgtttcgagtgctaaaagttcgctaaaaatcgtatcgcaggcgtcgtcggccgggagcgtttcctgatgcgcaaaccgggcatcctcgccgcggtcgcggagacgcttcacggacaccgtgccgttcgcggcttcagtatcgccgataatcacggcaaattcagctccggaggcatccgccttcttcatctggctcttcatgctcgcctcgccgccgtgaacaatcgtgctcacgtcgaagtcgcggagcgactcagccacggtgaccgcggggtcaagcgtgtcttcgcccgcgtggatcacgtaaaccgagcagtcaggggtttccggcttcacgccgaattccttcatgagctcgagaacgcgttccgctcccatcgcgaaaccgacgcagggcgcgggctttccgccgaggatctccatcaggccatcgtagcggccgccgccgcagatcgtcgcctgggagccgagacggtccgtcgtccactcaaacaccgtgtgactgtagtagtcgaggcctcggacgagacgcgggttcaccgtgtactcgatcccggcgcgttccagctgatgctcgatcccggcgagaaacgcacgggacttttcgccaaggtaatcgatcagacggggagcgttattcgcgagctcctgcatgtccggatccttcgtatcgagaatacggagcggattgaggtaaagacggtgcttcgccgtttcgttcagctgatcctgatgcgcctcaaagtacttgaggagcgcctcgcggtgcgcggcgcgttccgcaggctcaccgagagaattgatttcaagcttcacttcctgaatgcccagcgccttccagaggcgggaggtcatgaggatcatttccgcgtcgacatcaggacccgcgaagccgagagcctcgcagccgaactgatagaactgacgatagcggccgcgctgcggacgctcgtggcggaacatcggaccgaagtaccagacacggcgcggggcgtcgtaaagcatgttgtgctcgatcgccgcgcggacaatgcccgcggtgttctcaggacgcagcgacagccgctcaccgttcagggagtcttcgaaggaatacatttccttctccacgacgtcagtcgcttcaccgataccgtgcgtgaagaggtccgtcgactcaagcaccggggtccgcatcgggcggtagccgtactcggtcgcgatgtcgcgggccgtatcctcaaagaattcccaaatggcgctgtccatcggcagcatgtcattcatgccggttacagccctgatttttgcttttgaagccatcccaagtaatcctttcttgcttcagtaaatggtccgctactcgcccttcgggccgtaagtccggcggacatagtcggttaggagctttttgaactccgtatcaatatcctgccctttaagggtgccccagcgctttccgtccatgtagacaggcgccacggggttttcgccgcttccggggagcgaaatgccgatatcggcgtgagcggattcgccggggccattcaccacgcagcccatcacggcgaccttcatccgttcaactcccgggaattcgctcttccagacgggcatctgctcacagataaattcctcgatgctcttcgcgagacgctggaagagatcgcttgaggtccggccgcagcccgggcacgccgtcacttcaggcgtaaagctgcggagttcaagcgactggagaatctgctgcgcgacacgcacttcctcagcacgcgattcgccgggcttcggcgtgagcgacacgcggatcgtgtcaccgatcccctcgttcagcagaatggagagcgccgcggcgctcgacaccatgcctttcatccccatgccagcctcggtgaggccgagatgcagacagcagcggctgcggcgcgcgagttcttcataaacatgcacgagatcagggacgccggaaaccttcgcggaaagcacgatcttttcagcgggaagccccacatccatcgcgcgcttcgcgctcgccaccgcgctttccaccagagcctcacgcagcacgtcagagggcggcagcggcacgggccgcttcgcgttctcatccatcatgcgggcgaagagctcctgatcgagcgacccccagttcacgccgatccggacaggcttatcctctcggatcgccacttccaccatctggcagaaatgctcgtccttcgcgtcccccttgccaacgtttcccggattgatccggtatttcgagagcgcgcgggcgcattccggcacatcgcgcaggagtttatgcccgttgtagtggaagtcgccgataagaggcacgctgcagcccgcctgatcgagccggtcgcggatcaccgcgaccgccttcgccgcttccggcgtattcaccgtcagacgcaccagctcggatcccgcgcgggcgagttccagcacctgggccaccgtctgctcgacatccgcggtcggcgtattcgccatcgactgaaccacgatcgggtggcccgagcccatagcgatatccgtgttcccccacttcacatggacggtcggcgtcacacgccggccggggagcgaaatcgtcgcaatctgtgccatctttccgtttctcactgaaggatgaagcgggcgaccgatcccttcgtgtagccggagagatcaaagggcgtgccgttgagagacactgcgcactgagtcgaattgccgaccgtcgcgcggatcgggagcttgccggtaaaggacttctcgtcccctgccttgatgttcccctggaaaatggtcttgccatccgcgtcgatcagcttcacccaggagctgccgatcgtacggatcgtcacgttgccggtgccggcgggagcagctgccgtgtcagcagtcttcgcggacgccgcggcggtctgagccgtggcagccgggctcgaagccacgggagaagaagccgcagcgtcaggcgaggacgccgtgccatccgggttcgccgtaagaggcgcgttcgccggcatcgcgttcgagggagaacgcgggcgctgaagcgccgcggttctgccggacgcttcctgcatctgaacctgagcggcttcggtgttgtcaccgccaagcttcgagagaatcccttcacgccatccgccccagaccgcgccgatcagaacgatcaccacggcgaaagcgaggaacacgcggaaccccttctttctcgggctcgcatggaattccacttccttctccatcttccgcgcggggactgcatccgcagccgccggagcctgcgccgcgggggcctcaggcgcgaagtcacgcgcaaaagcgtctgtcaccggcttcgggtccgcgcccatcacgcggcagatgtcgcggataaaggcccggacgtagacaggttccggaagaagccgcatctcttcgcgttccatcgcttcgagctgtccgcggctgatcttcgtgcggttggcgacatcgtcaagcgacagtccggccttctcgcgcaggctgcgcagcagcttgccgaatccaggctgagcgccggccgccggttccttcgccgtctgttctttctgttcttccatcatttctcctcggctttattgagaatcgaggccgcctcttccttctggcggaccagccgtatcgcacgatgggtgcggtccttcacctggcctgcgagctgaccgcaggccgcgtcaatatcatcaccccgggtcttgcggatcgtggtcacgatgcccgcgtcattcatccggcgctcgaaggcaagcaccgtatcgcggtctgacttgaagagaccggatcccgggaacgggttgaacggaatgagattcaccttgcaggggacgttccgcacgaggcggatcagcttatccgccatctcgagcgaatcattcacgccgtccagcatcaggtattcaaaagtaatgtaatcgcggggcgcgtaccggaggtagcggcggcaggccgccatcagatcctcaagcgaatgcttgcggttcaccggcatgatcttgtcgcgcagctcgtccgtcggcgcgtgaagcgacacggcgagagccaccggagccagctccgcgagcttatccatctggttcgtgaggccgctcgtcgacaccgtgacgcggcggcgcgaaatgccataggcgtgatcgtcgaggaacagacggatcgcgggcaccacagcttccagattctggaggggttcgcccatgcccatcagcacgacgttcgtgatcacgcgctcattcggattatcggttcccgcttcgcgcctcagttcgcgttcagcccagaagagctggcccacgatttcggaggtcttcaggttgcgggcaaaaccctgtttgccggtcgagcagaagaggcagcccatcgcgcagcccgcctgcgtcgaaatgcagagcgtaccgcggtccacttcagggatatacaccgcctcaacggcgttgccgttgccgacatcgaaggcccacttgcgggtgccgtcggaggaaatctgttcacgcatcggttccggaggacggacttcagccatcgcctccagcttctcgcggaaggacttcgcgagattcgtcatcttgctgaagtcactttcaaggttgcggtggatccatcgtgtgagctggactgcccggaaaggtttttccccgaggctgtcacaccacctggtgagttgctcccgatcaaaatcaaggagattcactcgctctgccgccattagacacctgcctccacggcccgtcgggcccatgaatcaatgaaacttcaaaaaactgcaatcccctcccttcacccgcgggcgaagggagggggtactagctaactgcgcctgactgccgccggattagcgggagtgaatcgcgagagccgggaagaagtaggcgatctcgcgggcagcggtctcgggagcatcagagccgtgcacggcgttggcgtcgatcgactcagcgaagtcgtgacggatcgtgccgggagcagccttcttcgggtcggtggcgcccatcagttcgcggttcttcagaatcgcatcttcgccttcgagcacctggatcatgacggggccggagatcatgaaggaaacgagatccttgaagaagggacgatccttatgaacttcgtagaagccttcggcttcagcctgggagagctgacgcatctgggcagccacgatcttgaggcccgcgtcttcgaaacgggtgtagatcttgccgatcacattcttggcgacggcatcgggcttcacgatggaaagagtacgctgaacagtcatttttagtccaattgaaaaacaaagaaacaccgccggggcacctgacgagaggctgcccggaggcaaaaaagaattcttccgacaggcagccagccctcagttatcccgaaggggctgccggatgaaaggtgcttattttagcatgtgttaggagcagactcaggcagcttccgcgggacgggaatcccctgattccgccttatcttccgccttttcagagggaatcggcttgggtcccggcacaagcaccgccatgctttcgacgtgccccgtgtgcgggaacatattcatcacgccggcctcaagcagccgccatccgccctgatgctgcagaatcgcgcagtcacgggcaagcgtcgccggattgcaggaaacatacaccacgcgttccggacgcttatcggtcgcggcaagcacctggcagaccgcctgagcgccttcgcgcggcggatcaagaagcaggcggtcgattccgcccatctttttccagatcgcgtcccagtcctgctcaaaccaggtgaagaggttacgggcaacgaaatccgttttatccgcgagaccgttttccgcggcgccggccttcgcgcgcgacacgagtccctcgcttccctcaagaccgatcacgcgggcgctgcgtcgggcgagcggaagcgtgaagttgccgaggccgcagaagaagtccaccacgcgggattcaggcgtaagcctgaggagtctcaccgcgcggctcaccatggtttcgttaagggcgtagttcacctgcgtgaagtccgtgggcttgaaggcaatgcggacatcgaattcggaaagataaaggccgagcgcgttttcaagctccggacggatcggggcagccgaatccggccccttcgcctgaagccagatatccgcgccgtactggtcgccgaacgcgaggagcttctcctcgtccccttcaccgagcggctcaaggttacggaaaaccagcgccgtgcggccgtgaccgtccaccgccacttcaatctgcggcagacgctgacggatcgtgagcgtcgacacgagttcgcgcagcggatcaatcatgtcggaaacatgcttcgggaggatcgcgcagctatgcatatcggcaacgtaggacgagctccgctcatggaagccgaccagcaccccgcctttcttcgtcacgtcgcgcaccgtaaagcgggcgcggtggcggtagccccagaagggaccgtagatcgggggaaggatgttttcaggcttcgttttaccgatatgccagagggcatcaagcagcacccgctgcttgatcgctacctgagcgaagggatcgagatgctgcatcgcgcagccgccgcagcaccccggctccagaccgaaatgcgggcagcggggcttcacgcgcagcggcccctcgttatgcagttccacaaggcgtccgatctcaaacgacgtcttattgcggatccgctcgtaagtcactacttcgtgaggcagagccccttcgacgaagaccgctttaccttcgcgatgcgctacgccgcggccgtcctgatccaggctctcaatctcgaccgtaaaacggtcgcgtggttttttgtttttatgaaaagaacgcgccattatcgcttttcctcaatcgtcatacatccgggggtctgcttccagaaaatcagaagcccggaacttcctgataaaaatggaagtaccgggcgcgccatattagcggatttcagaaattaccgcagatagggagaaggatcgacgggcttgccgccaatacgcacttcgaagtgaagcacaggcttcgaggcatcgaatccgcccactgtgccgatcttctggccggccttcacgtgttcacccttcttcacgttgatcgtctgcagctgaccgtaggtcgtcacaaacgtaccgtcgccgtggcggagaatcacgagattgccgtatcccttgaaggcggttgaggtgaggagcacttcgccgttcgcggcggccttcacggccgtgccgcggcggctcgaaatatcaataccgcgggtcgcgggggtgaaatggctcacaacgtcacccgtcacaggccaggagagcgtctcctgagtgccgggaatcggggtcggtgcatgagccgtggctgccggcaccgccgcaggggccgcagcaccagcgggagccgccggctgcttcacgcctaccgcctgagaggcgggagcggttgtcggctgagcctgatgagcggcgaccggggctgtcgccacgcggaccgccgggcgcccagcgcccggaatctgcagcgtacggccgaccgcgagctggcgcggatccgaaatgccattcacgcgcatcagctcattcacgttcacgccgtggttcttcgcgatgcggtaaagcgtatcgcccgccttcacggtgtaggtgttcccggatgcggcaggagccgcggacgacatagcggaacctccggagaagccgctgccgcctgaaagcggcaccacctgagcgccggaagaggacgccgcgggcgcggccggcacggaggcgggaccggacttgatcgtgcccgtggtgctgttatccgacaccggagcaatctgagtcgacgtacaggccgtggcgaaaacggcggcaagcgcgctggcgattaaaagcttacctgctgaagacatgaaactctcccctaaagactgttacggatggcctttccccggaagcgcctcatcaaaccaggatgaagtcgccgacagccggccgtaatgcgttaaatcaatctgcagcggcgacacggagacaaagccgtgctgcgttgcgtagaaatcagttcccggtccctggtcacggggcttgccggcccgtccaagccagtacacctgctctcccctcgggtcgagctccggtacagcatgatccgcgctgtgacggcggccaagcctcgtcacgctgatgccggagagcacgctgtaaggcatgttcggaatattgacattgagaagcacgggatcggaggactgcttcttattcagaaactgttctaccacagtctgagcgacttccgcggcagactcaagttccatccagccgcggtcaatctgcgaaaaagcgatcgaatcgacgccgaactggtagccttcgatcgccgctgcgacggtgcccgaatacattgtgtcgtcgcccatgttggcgccggaattgatcccggacaccacgaggtccggacggtcgttcagaatcccggtgaaggcgaggtgcacgcagtcagacggggtgccgctcaccgcgtagacatcccgcgccacctcggtcacccggagcggcagctgaagcgtgagggagttgctcgctcccgactggttatgctcgggcgcgcagaccgtcacgcggccgaacttcgccatcgctttcgcaagcgcctgaatgccgcgggcggagtagccgtcgtcgtttgaaatcagaatgtgcatcaaatccctcgtgcagcccctgcgttcagcgttcttctgcagaagccgttttcaatcagtaattggttaatgataatggcataggaacagccggtcacgcaaaagcacaattattccggggttctttctcacgccgaatggcgtctgagtctatactttcagccattgactgattagttgttcagattttttctctccctatccatgaagctatccgcctgggcccatcaaaggggcatttgctatcagactgcctggagaatgtggaagaccggaaaactcccggttcccgcctgccagcttccgtccggcaccatcgttgttgacgatgtgccggctgccggcggcgtggggctctacgcccgtgtctcctcggcagccgaaaaggaccgtctgaagcgtcagatgagacggctcgaagtctatgcggccagcatgggctggagcgtcattgataaggcttctgaaatcgcgaccgtgacgaacgaaaaccgccgcggtcttcagaagctcctgaagaaccgccagatccgaacgatcgtggttgaaaccccggatcggattctcccgtccggctttgattacctcgaccttgcgctgcagtctgacggacggcgcatcatcgcccttgatgaacagttctcagggcacgatgacgaaacgacgcttgaggaactcctcgacacgtactgcgcgaagatctacggacggaaaggagccgccgcgaaagcgaaggccctgatcgcgctgctgcacgaaggcgacctcgatatgctgaaggcgtccgaacgggcgtctgaacgcgcggccgagcgggccgctgccgccgcagaaccgaaggaagaagagacggaagtgacgctctgattccgagcggccgctttcccgcaaaaaaatatccgcggtatcgctcatcagcgaccgcggattttttgtgccttcatcacgcagacaaaggaaaagggaggtaacttccgttacctcccttcctggaattggtcggggtggtgggactcgaactcacgaccccttgcaccccatgcaagtgcgctaccaggctgcgccacaccccgagagagatgaactataccacaaaatcttcataaaagaaaatttttgatggaatccctgatattccggagttcctcgaccacattcgggctcacggcggctctgccttcagtcgcctgagcgactgctgtcttccggtgcttcagatgcttcttcgcgccggccagcgtatagccctgatcatagaggagcgagcggatctcacgcgccgtgagaatatccttcttctcatagcggcggcgcgaaccgtgacggcccggcgaaagctgcttgaactcatcctcccagaaccggagaaccgaagtcgcgactccgaccagctcagccgcttcgccgatcgtgaaaaagcgtttctccggaatcggcggaaaagctccgatttctttctctgacatgcccttttccttctctagctgaccttccgattctaaccgctaaaaggacgggcttaaagaaaagcggcagaaccgttttaccggttctgccgctctcaaacactcggattacaaagcgattttaattcgcagacttcgccgggaagccggcaaggactgcatcgcggagcttagccgatgcgtggaacgtaacgacacggcgggccgtgatcgcgatttcctcacccgtcttcgggttgcgtccggggcgctggggcttgtcgcgcagctggaagttgccgaaaccggaaagcttcacggggctgccatgctccaggcgggagcgaatctcgtcgaaaaacacatcgacaagcagcttcgcttcgcgcttcgaaagacccatccggtcaaacagaatatcgaccagatcggctttcgtcatcgtcgtcccgacggtgggggaaaaatcattctcttcaatagccatttcaaaggttacctaattaagcacgaagtttaatgccaaggggttcaagtccagcgatcaccgcttcagtcgcgccttcgatctgggcttcagtcacagcctcttcaccgaaggactccagcacgaggcggaaggccatcgacttatcggcggaaggctgattttccggatggtacacgtcgaagagacggaagtcggtgagacaggcgagtctcacatccgttctccgggcggcgcgcaccgcgtcgaagatctgcttcgaagtcacagaggccggcactgcgagcgaaatatcgcgcagcgacttctggaacttggaaacgggcttatgctcggggaccggcacgctgagcagcggctctacatcgatctcgaacaccacagggcagagggggagatcatacgcctgctgaagcctcgggtgcaattcgccgatgagaccgatccgttttccgtcaagatacaccccggcgctgcggcccgggtgaagcgacgggaagacttccggaacaaaatcaagcgtgagcgggaaggcgaggcgttcgaggtcacccttcacatcgaagaagtccacgcggcgggacttgatgccccactgcggagcgtccgcggtgccgtaggcgagaccggcgaggtgctcgggctgacggacgcccttcacggacgtgtcagaaggctcaatcgtcggatcctggaagaacacgcggccgagctcaaacacgcgcacacggtcttccttgcggttcaggttgtagcgcagaatgtcgacaaggccgccgatcagctgcgtacgcatcacggagagctgcgaggcgatcgggttcagcagacggatcggggcagcttcgccgccgaaatccttctcccacttctcttcgacaaacgagaagttcacgagttcctgatagccgcggccggcaagcttcagacgcaggtcatgctgcgtgcggcgatcctcgcgggacggcagcatcacagcgcgctcaagcggcggattttccggcagcttgtcgtaaccccagagacgggccacttcttccacgaggtcctcttcgatttcgatatcgaagcggtacgtgggagaggtcaccgtgaagaggtcaccgtcacgcgtgtactcaaacccgagacgcttgaaggcttcttccatgaagtcggtcggaatgtccacaccgacgagcttgcggcagcgtgcagcgcggaacttcacgacgcggcgctccgggagatcggactcaatgtcgctcaccgggccgacgcgcgtggcgtcggttccgcagatcgagagaacgagcgccgtgatgtactcgagatgctcacgggtcgttccatagtcgacaccgcgctcgaaacggaacgaggagtcagacgagaagttgagcttacgggcgcggccctggatcgcggccggacggaagaacgcggactcgatgaagaggttcaccgtgtcatccgacacagagtccgccgagccgcccatgatgccggcgatcgcctgcgaaccgttatcatccgcgatcacgccgtagtacggggtcaggtcaacggtcttgccgttcaggagctcaatcttctcgccttccttcgcccagcgcgccgtcacggtgccggagagcttatcgaggtcaaagaagtgagtcggacggccgagctcgaggagcacgtaattcgaaatatcgacgagagccgaaatcggacgctgaccgcagcgctcaagccgctccgccatccattcaggcgtcttcgccttggcgttcagccccgtgatcacgcggctcgtataacgggcgcagaggtcagaggcctcaatcttcacggcatgagccgcgtcagtcgtcacagcggcttcatggatttccgggagcttcagctcagcccccgtcacggcgtggacttcacgcgcgataccggtgagagaaagcgcgtcaccgcggttcggcgtgacgttcagatccaccacgacgtcgtcgaggtgagcgtacttgcggatatcttcgccgatcggggcgtcttccggcagaagccagagaccgtcatgatcctcggacacgccgagctcacgggccgagcagagcatgccgttcgagggcacgccgcgcagcttcgccttcttgatcttgaacccgccggggagctcagctcccaccatcgcgcagggcacacgcaccccagctcggacgttcggcgcgccgcagacgatctggatcagttcgccagtgccggcgttcacctggcagacatgcaggtgatcggaattctcatggtcgcggcattcaacgacttcagcaatcacgacacccgtgaaatcgggggccgccttacgggcttcgtccacttcgaggccgtgcatcgtgagcgcgtcctggagctcctcgctcgaaatcgcgggattcacatacgtacgaagccagctttcagaaaacagcatttttcttccccattactcgttgaactggcgaaggaaccggaggtcgccttcaaagaagagccgcaggtcgtcgatgccgtagcgcagcatcgtgagacgctcaagacccgagccgaaagcgaagccgcagtactgctcgggatcgagcccgtagttgcggaccacaatcgggtgcacttcgccggcgccggaaatctcaagccacttgcccttgcgggagccggtggtgaacatcatgtccacttcaacagacggctcggtgaacgggaagtagctcggacggaagcgcacgatgaggtcgtcggtttcgaagaaccggcgcaggaacatggagtacacgcccttcagatccgcgaagctgatgttttcgccgagccacagtccttcgacctgatggaacatcggggagtgcgtggcgtcggagtcaacgcggtaggtacgtcccggagcaatcaccttgatcggcggcttgtgggtgcgggagtaacggacctgcatcggggaggtgtgcgggcgcagcggcagcagcagccccttctcatccttcatgtcgacgtagaacgtatcctgcatcgagcgggccggatggttgagggggttattgagcgccgtgaacgtgtaccagtcgttctcgatttcggggccggaggccacgtcgaaaccgatcgaacggaaaatctcttcaatacgcatccaggtgcggatcacggggtggatgccgccggcgggagacgtacgtcccggcagcgtcacatcgatcgcttcctcggcaagcttcttctcgagagcggcctgcgcgagcgcttcgcggcgggcgttcagcgcctcttccacagcacgcttcgcggcattgatctcagcaccggccgccttccgctggtcggctgcgagatcccgcagacccttcatcattgtcgtgagggtgccggacttcccaaggaatttcgccttggcatcttccagcgctgcaggctgcgtcgcttcagcgaaagcctgccgggcggattcaatcagtttggataaatcttccattttttgattccgatacggaaaacgtgggcagcagcggtctgctttcttgcccgcaatacagaagaagataacgaaaaaaggggcggcccggtactgctggcccgccccttttaaagctggagcacctcagccgaggcttcagcgctcctgtgctttgacaagtggattcaccaattaagcacgagctgccttggccttttcgaccagagcaacaaagccttccttgtcaaacacagccatatcagcgagcaccttgcgatcaaggaggatgttcgccttgtgaaggccgttgatgaaggcgctgtaggtcattccgttctgacgggtagccgcattgatacgggcaatccacagacggcggaagacgcgcttcttcgcacggcggtcacgataggcgtactgggcgccgcgcatgacggcttccttggccacacggaacacattgttggcacgaaggctgtagcccttcgacagggcgagcagcttcttatgacgggcacgagcggttacaccacgcttaactcgaggcatctttttattctcctatccagatcaggaagcgatggcaagcatgcgcttgacgttgagctcattgcacttcgcaaccgtcaccatgccgcgcaggtgacgcttgttcttggtcgtgcgatgggacaggatgtgacgcttggtcgagtggccaaacttgatggaaccgccggagcgcactttaaagcgcttggcagcagcccgcttggttttcatcttcggcatttgccgtttcctctttattgatgactcaaaggcgccttccggaaaaagtttggatggtcttgaactgcccttgaatcacttcttctaactccgacacttcccgggttgggagaagtttcggaggtactgcaaaactggtcagaaatgccggaggagagaaacgcatctcccccggacgatttcgtctgattacttcttgcgcttcggcccgagcaccatgatcatctggcgcccttcgagcttcggattctgctcaacctgagcgatatcacccagctcggtcttcacgcggtccataagttccacgccgaattcctgatgggccatttcgcggccgcgatagcggagcgtaattttagccttatctccgccttcaaggaagcggcggacagcacggatcttcgtctgaaaatcgttttcgtcggtcgcggggcggaacttcacttccttcacctgcgtgaccttctgcttggccttggcttcctgagcgcgcttctgttcctggtacttgaacttgccgtagtcaatcagcttgcaaaccggcggacgcgccttcggcgcgacttcgaccagatccacgccgagctcttcagccttgtgaagagcgtcgtacgtgttcatgatgacgctggttccgtccggcatcgtgactcggacctcggggacccggatttcacgattcagacgatgacgattttcctcttttgcagggttatccctactatttgttatcacttattaacctcaatgttggtgtgatcggcgacctgagccgcgagcagcgcagcaaagtcgtcaaaactcatagcaccgatattccggccgccgcgctcacggacagccactgtacctgcctgcttttccttctcacccacaaccaggatgtaaggaactttcgtcagactaagttcgcgaattttatagttgattttctcactgcgcaaatcctcttctactcgataacccgcattgaagagtttctgataaacctcgtgagcgtagtctgcctgggaatccgtaatggaggcaaccgctacctgagtcggtgcgagccacggcggaagggctccggcgtagttctcaagcagcataccaatccagcgttccagagaaccgaggatagcacgatggagcataaccgggacctttctctggtcatcggcatcaacatattccgctccgagacggcccggcatctggaagtcaacctgaaccgtaccgcactgccagctgcggccgaggcagtcacggaggtggtactcaaccttcgggccgtagaaagcgccttcacccggcagcaccttgtacttcacaccggcgcggtcgagagcgatcatcagatccttctcagccttgtcccaggtcgcgtcgtcaccgatacgcatttcaggacgcgtcgcgacgaagtactcaatatcgtcgaatccgaagtccttgtagaccttcttcacgatcgcggtgaaattcacgcattcgtcgagaatctgatcttccgtgcagaagatgtggccgtcgtcctgcgtgaaaccgcggacgcgcatcaggccgtgcagagagccggacggctcgttgcggtggcactgaccgaattcaccgtagcggatcggcagatcgcggtaagagcggagcgcgctcttgaagatctggatgtggcccgggcagttcatcggcttcagagcgtagatgcggttctcagactccgtcgtgaacatgttggagcggtacttcgcccagtggccggacttctcccagagggagcggtcgagaagctgcggagccttcacttcctggtagccgttgtcgcggtagatgcggcgcatgtactgctcgatcacctgccagagggcccagcccttcgcgtgccagaaaatcatgcccggggcttcttcctggaggtggaagaggtccatgtccttgccaagcttgcggtggtcgcggcgggcggcctcttcgagcatgtgcagataagccttcagctcatccttcgtcgcgaacgcggtgccgtagatacgctgcagcatctcattcttcgagtcgccgcgccagtaagcgccggccaccttcatcagcttatgcaccttcagcacaccggtgctcggcacgtgaggcccgcggcacagatccgtgaagtcgccctgcgtgtagagcgtgatcttctggtcttccggaatcgccttcacgagttcgaccttatagtgctcgccgagcttatcgaagaaggagatcgcctcgtcgcgcgtcacttcgcggtgcgtgatcgggaggttctccgccacgatctcgtccatgcgcttttcgatcttcgcgaggtcttcttccgagaagggcttcttgcaggagaagtcgtagtagaaaccgttttcgatcgacggtccgatcgtcacttcggcttccggatagagctgcttcactgcctgagccatcaggtgagcggtggagtggcgaatgatgtcaagaccttcctcatccttaccggtgatgatcgcgacagaggcgtcgtgatccacggtctcggagagatccacaagctttccgtccacgcggccggcaagcgccgcacgggcgagtccggcaccgatcgaagcggcaatctgcgccactgtcacggggccttcaaactcgcgctttgaaccatccggcaaagtaatttccaacatttgacactcccttttcaaccccttcagacagggacttctctttcaaaagatttcttgcccagactgtttgccgcctgaagagcggcaactctgaccgcccgtcaggcggttctgccggccggtccgcccaggtaaaggatatcggccgccggctcgggctgcaaagaataaaaaaaaagtgcggcccgagccgcactttcttttttaaagcaacagaactgctgtgtgactcaccatcggttttagatgatggtcagtgtagttcgattcatcagagaaaaatctaacaacacagcactcccagaaaaatttggtaggcacgattggactcgaaccaacgacccccaccatgtcaaggtgatgctctaaccagctgagctacgtgcctgagagaattagaattctacggatccaaaataaaaaagcaagagttccccctaaaaatattttattttaggggttttcactagcttctatgggccgaaatgacccctttcacctcaagaatctccttcagggcctgctgcatcagcgcggcaccggccacttccaccccgaatttcaggcgcgcgacgttcttcacagtctgcgtgttgacgttcgtgatgttgatcttcaggcggatgaagacatcggtcacatctttcagaagaccgatacggtcgcgggcgagaacgaggatctccatcgggtagagagtgtcctcgggcgcttcaccccaggagacctcaatcagacgttccttcgactgctccatcaggttcttcacgttcgggcagtcagcgcggtgcacaacgacaccgcggccgcgggacacaaagcccacgatctcgtcaggcggcaccggatggcagcacttcgcgagctgcgtgagaagcgatccgacaccagcaacaagaatctgtccgttatcgtgatgggcacgcggctgcgcgggcttcaccgggatcaccggctcatcggccgcctttttctgcgtctgaggcaccacgaccgcttcgatcgcgcggttcgaaatctcgtccttcgcgatggtgaggcagagatcatccacggactcaaaaccaagcgtcttcgcgagcgactcaaggttataagtcgacttcccgaggcgcgcgagttcggtatcgagctcatcacgcccgcgtgcgatctgctcctggaggtgcagctggttgaaccacgttctcaccttgccgcgggtccgggccatggcggcgaacccaagctccggattcatccagtcctgcgacgggccgccggacttcgccgcgatgatttccaccgtgtcgccggtcttcagcttatgcgtgagcggcacgatcgcgccgttcaccttcgcgcctcggcagcggtggccgagctgcgtgtggaccatataggcaaagtccaccggtgtgctgttcgccgcgagttccacaacgcgccccatcggggtgagcgcgtagatcagatcgtcctcgacacccggcgcgcgcggcggctcaacgtccgagtgccacgcgagcagctgacggagccagacaactttctgctcttcagcggaattcacgccaagcgaattgcccgcttccttatagcgccagtgggccgcgaaaccgagttccgcgaactcatgcatctcgcgcgtacggatctggatttcgaccggaagcccgtttgaagccttcacaaccgtgtgcagcgaccgatagccgttcggcttcggatgcgcgatatagtcgtcgtactctgactgaatcgcggtgaaattttcattcaggatcgagagcacctcgtagcactgttcgaccgtatccacgatgacgcggagcgcccggaggtcgaagagccgctcaaacggcaggtgcttacgctccatcttgagccagatcgagtagatatgcttcgagcggccggagacctcgccccggatatggtgcgcggcgagcagcgaccggatcttcgtcacggcctgctgcacgaaggcgaggcgctcggcgcggctcgcgtcgaggtgccgcacgatctcctgatagacctcaggccgcgtgaagcggagcgacaggtcctcgagctcccacttcatctgccagataccgaggcggttcgcgagcggcgagtagagctggagcgtttccgcggcgtagatcttcgcgtcatccgacgggtgcatcacaaaccagcgcagcgtctgcagacggctcgcgagacgaaggagcacgacccggaggtcgccgcacatcgcgagcagcatctttctcagcttctcgggctgggacgcggcattcgcttccttgttgctcgaacgggcctgttcggagagcttcatcagacgctgcagatcggtgcagagctcgagcaccttgccgccgaaactcttctcaatccactcctcaggattcttcagataatcctgcacggaggagagataggccgcggcaatcagttcatcatcatcccggatgccccgcagaatgctggccatgccgtctgcgtgcgacatacggggttcgcctgtctcaaggcattgccccgcgtagagcggttccaccatcgaacgggcaagctgccagttcactttaaccggcgcttcggttttcttgttatctggtgccatcggacaaatcttctctgcggttaatgaggaataaacgccttcagacaggcctcgcgtgggaatccccttgcgacagcccattctatggcggcgtgcttatatcagtagaaatcccgaatccggttttgcaaattaatacaaattcagattctaggcgagactgcggacggattaggccgcagaaatattcaattcatgacgccgatgcggcgaagcagcgtggcaatgtcaacgccattacggacgttcagcttccgggtggcggagccgcggtgcaccttgacggtcttctcggcgatattcagtttctcggcgatttctttgttctggagcccctcggcaacaagcttcaccacttctttttcgcgcgcggtcagcgtctcaaaggccgcccggtccgcgttatcgcgctcatccgcctcaacccgctcgaggtcgcgcttcacggcggcctccaccacggcgatcagccggtcgccgtccaccggtttctggaggaaatccgcggcgccctgcttcagcacgtgcaccgccat

SEQ ID NO: 1272 - DNA, 176232 bp, Unknown
  gut microbiota DNA sequence
cccggtgacaaagatcaccggaatcctgaaacccctggagtcgagcagatcctgcagttcaaggcctgtcatgcccggcattcgggcgtcgagcaggaggcagcctggacgggccggatcatcatgcttcagaaagtcgtcagcgctctcgtagcatgcggtctcgtagcctgcggccccgagcaggaaggcgctcgactgcctcacgccttcgtcgtcatccacgattctcaccagcggcgatttactttccgaccccatttttctctccaacccgaagtcaaccaaaacccgcccccgcttctccaggcagaggcatccccacttttgtattgtgaacctatgcggggatgaatttcaaaaaattaagaaaaaaggccagggactgagtccccggccttattccggaacacggataaaaccgggagaatcccggtctcttatccgttagttcttcaggctgtgaatcggagccgggatacggccgccgaggttcacgaagcctgcggagtcaccgccaggaacgcggatgacggccgcttcgccgagcagtccgccgaagaccgccacgtcgcccaccgtcttgccggggaccggaatcacgcggacagcggtcgccttgttgttgatcatgccgatcgcggcttcgtcagcaatgatgccgccgatcgtcgaggccggggtgtcacccgggatcgcgatcatgtcgagaccgaccgagcagaccgaggtcatcgcctcgagcttctcgaacgtgagcgcgccgctgcgggcagcggcttcaatcgccgcgtcctcggacactgggatgaaggcgccggagaggccgccgacgtgagaggaagcgaaaacgccgcccttcttcaccgcgtcattcagcatcgcgagaatcgcggtcgtgccgggagcgccgatcgaggagagaccgagagcctggaagatttcaccgacggagtcaccgatcgccggggtcggagcgagcgacagatcggccacgccaaacgggatgccgagttccttcgccacgtcgcggccgatgatttcaccgacgcgcgtcaccttgaaggccgtgaacttgatcgtttcggcaacatcgtccaccgtgatatggcggccgttgttcttctcttcgatcaggcggtcaagcgccttcttcacaacgcccggaccggaaacaccgacgtcgatcacgacgtcaggctcaccgacaccgaggtaggcgccggccatgaagggcacgtcctggggaatgttgcagaagacaacgagcttcgccgcgccgataccgtcgcggtccgaggtcgcctgggcgacatcaagcacgcgctggcccatcagggcaaccgcgtccatgttgataccggccttcgtgctgcccacgttgatcgaggagcagacgcggtccgtggtcgcgagggcttcaggcagcgagtcgatcaggttacgctcaccgggggtgatgcccttctcaacgagagcgccgaaaccgcccacaaagtcgacaccgacttccttcgcggcagcgtcaagctcgcggcagacggcggcaagctgatcgcgcgtgaaggaggagcagaccgtaccgatcggagaaaccgaaatacgcttgttcacaaccggaatgccgtagcggtcgccgaccatgttgcaggtctcaacgaggcgcttcgcatacttgctgatcttcgcgcggagacgataggcaaacgtgtcgtagtcggtgctcgcgcagtcgaacaggctgacaccgagcgtcaccgtacgcacgtcaaggtgctcggcccgggtcatgttgatggtggaaaggatctcgttttcagaaatcattgttgtttttcaccctaaaagagtcttctgccgctcttgcagccgaaatggaattaatgaatttcgatgtgatgcatcgcatcaaaaatgaggtgatgctgcatcgtgagcgagaggcccatggccttggcgcgttccgacatcacgcggtgcagcgcgcgggcgtcaaccgccttcggcacgctcacttcaaaaatctgaacggactcaccctcaccgagcggcttcgcgcgcagatcgtgaatgttcacgcgctgctcactcatgatgcgggagaaggtcgacacgatatcgttgccgtctttgccccagatcgtcaccacgtaggattcggactccggcacggaatccttcggcagttcttcaaagtcgcggatcacaagggagaggtggaatttgcgggcttcgagcgccttgctgatttcctcgttgagcgtctcgttggacaggccttcaggcttattcagcagataaatgcccgaaaactggtcgtgcagcgtggactgggtcatttcttcgatattgcagcccagacgggtaagggcggaagaaacggtggcaacaataccgggctgatcaagaccgatgacggcgacaagcgcgctgttatttttcgtatactgggtcattttccttaagactttgcaggtcaaagtattagaacgtgagtgtaactctatatggcgtttcagttcttctgacgctccgggagaaactcacgcattcccgggaatgccgcaagagaattcgcctggagggctgaaagaagctcgtcgcggggcatgccccggagctgagcgagttcatcgagataccccgcgatatcagcgggttcagtccggaggttgccgctgtcgcgcctcgcgcctgaaggcatatccggagcgtcggtttcaagcacgatgctttcaagaggaagcgtagccgcaagacgcctgatccggcggctgccgctatacatcatcgcgccgccgaatccgagtttgagtccaagcgaaatcagaatcctcgcctgctcctcggagccattaaacgcgtgcgcgacaccgcctgaaaccggaatccgacgaagccacttggtgacccagtcgacagaccgcctcacgtgaagcgagaccggcatgccggtatcccgcgccaccttcagctgggcgacaaacaccgcttcctgtttcgcgcggtccagatccggcacaaaaccatccagcccgatctccgcgaccgccaccacgcggctcgcgggatccgccatttcgcgcctgagcgcgtcacgcagctcgtccgccacttcaggggtcaccgtgggacgggcggtcgcgagcggatgaaccccaagcccgacgcaccacccggactctgcccccacccggaggcatttcgtccagtcgcctgaaattcccgccgcgatgagcgcgcagccgacacccgactctttcgcccgccggaagacatccggacggtcatgatcgaactgctcagactgcatgtggttatgcgtatcgataagacaggccacggctcaccctcctcccggtcactcctcaaagggctcaatcgaaccgcccttcagcctcagaatccggccgcagcgcttcgcgagtcccaggtcatgcgtcacgatgatgatcgcggtgttcttttcgctcgcgagactgaggaaccggtcccagaccgcctgcgcggtgtcctgatcgaggttccccgtcggttcgtccgcgagaatgcaggcgggagaggtcacaacggcgcgggcaatcgcggttcgctgccgctcgccccctgaaagctgggacggcaggtgatcaagccgctccccgagcccgatttcctccagcaccgccttcgcggcagcgttggcttccgcctcgggtgtcctccggatatagagcggcatcgccacgttttcgagcgccgtgaattccggaagcaggtgatggaactgatagacaaagccgagacgccggtttctcaggtcaccgcgcgccttctcatccatccctccgatatcgacaccatccaccaccacgcgcccggcgtcggcgtcatccagcccgccgatacagtgaaggagcgtcgacttgccggcgcctgacgccccgacaatcgcgaccgtttccccaggcctcacgcggagcgacacattcttcagcaccggtgtttcacggtctccctcacggtacgccttggcgagaccctcaacctcaatcgcaaactcactcatatctcagagcctcagcaggccggatgcgggacgcacgccagctcggataaacggtcgcggcaagcgacaggaaaagagaaaaaacggcaatcggaataatgtcggacgcccggggttcggacggcatgccggaaatcaggtaaatcgactgcgggaggaattccacatggaaaaccgcctcaatcgcggacacgatggaaccgagattgcacgcgatgagtagcccgatcgcgacaccggatgccacaccgatcacgccgatcaccgcgccctggatcatgaagatcttcatgatggagccaggcgaagcgccaagcgtccggagaatcgcgatgtctgactgcttctcggtcacggtcatcacgagagtcgacaccagcccgaacgcgcccacgagcacgatgagaaagagaatgatcgacatcatccgcttctccacctgcactgcggcgaaccatgtcttgttttccacggtccagtcgcgggcgaagtacccgggcggcagcgacttcatgagactctcagcgacagcgggggcttcctgcatatccgccacgcggacacggacgcccatcgggcccccggtgcggaagagcgccgcggcgtcctcaatattcatgaagagcatcgtcgaatcgtattcgaagtgcccagccgtaaagatccctgacaccgtgagcgtccggacccgcgggatcatgccggcgggtgtcgtggtgccctgagggacgacgagcgcaatcttatctccgggcgccacgccaagccgtgcggcgagcaccgacccgatcaccgcgtggaagctccccggcgtaagtgagtcaagcgttccggcgggcatcgtggaagcgacttcactcgccttcacctcttccttcggatcgaccccttccaccatggtgccgatcacgcggtcaccagtcgaaatcagcccctgcccttcaacgaagggtgcggctccccgcacttcggagttcttttccgcgaccgcggcaagcgacctccagtccgacacgggacccgtgccgcttgaaatctggatatgcggaatgacagacagcatccggtcacgaacctgggtctggaacccgttcatcacggaaagcacaatgatcagcgccatcacgccgagcgcgattgacacgacagacgtcgctgagatgaaggaaacaaaccggtccttccgtccggttcgccggccggaacgcgtatagcggaggccgatcagaaattcaaaaggcagagacacggagctcaaatcctgaagtgttgactgttgactccgggcggatcccggagctgtgcacacattctaagcaagagcggacctaacccgggaccgtcttccgtctaaaataggatccctatgtccactgcctattacctgctccccggtgcccgtctgccgaaggacgtcgcccccgctgtcattcctcgaatcgaccggtcacttctcgaccccatcctggaaggtcttggcacccctgtctgccagaggcttgccgaggggctgacgctgccctttgcgcgctgcacccatcacctctggttctggggcgtggtgccgcgtgggaaaacgactccggctcacgcggcctacgtgtggcttgaggatcacggtccgacgctcgcgacggaaatctggtccgtgacgccgtgcgttgaggagaacggcgtttaccgctcgctcggaagcgatcctctcaccgcggaagaaatcgaccgctgctcggaaccgctccggaagacgctcgcgaaattcggtttcgtcctccagcagtgggatacgctctggtacgccacccgcatgaaggactgggaggccgtgctccgcccctgggagtgccaggacggcatggggctggatgaaggcgcgatcgcgggggaccgcgatatggcgcttgagtgcctcagggcgtgtgctgagacaatggctggcaccgagattaccgcgggccggaaggccgctggccgccccgctccgaacgccgtatggatcgcgggaggcgggcgtcagatccgcttctatccgccgaccctgatccgcgccgtgatgtccgacgagccggtcctccgcagctgggcgatggaggccgggatgctctgccagttcgtgagccgcacgacaggaaaaacgtggcctgaggaagcggcccccggtgacatgatcgccgtgatcagtgacctctgggaaccgtggctgcggggtgactgggacgcgtggctcgccgcgctccccggtgttgcttccaaaatcgcggaactgaaggccgccgcgattgagcggaagactgaaagcactgctatcgtagcctgcggcctcggcaccaccgcgacgctcctccccaaaaccgaaggactgaagagccgattcctcagccggtttgccaaaaaaacgccccccgactactcctggctcacggattcagactgaaaacactatgaagacccgctttattacccgacactacgatccggccgccgccgcaaggctgcagtcggaaggtttctcccgtcctctcgctcaggtgcttgccgggaggcggattgtcgggaaaagcgaaatggatacggggctcgccggactgattccgcccaccgcgctcccgcacgccgcggaagccgcctcgatgctcgcggacgctcttgagaaaggggaatcggttgccgttgtcggcgactatgactgcgacggggcaacagcgagcacggtggcttatcagggactgcggcttctcgggttccggcctgagcaagtgtcctggttcattccggaccgcatgtcgatggggtacggcctttcccccgtggtggtcgacgcgctcaccgaaaaatacggccgccctgacatcattctcaccgtggataacggcatgggaagcgtggaaggcgtggcgcgcgcaaaccagctcggtatccgcgtgatcgtgacagatcaccatctcccgggcgaatacctgccggccgcggcctgcatcgtgaatccgaacggtcctgacggcgccggtgcgccggggaacctcgccggtgtcggtgtgatcttctacgtcctgatcgcgctccgcgcggagctccgggcccgcggcgcctttgcggccgggcagcagccgaagctctccaagctccttgacctcgtcgcgctcggaaccgtggcggacgttgtgccgcttgaccgcaataaccgcattcttgtggctcagggactgaagcgtctccggagcggcaggggaagcgcggggctcaccgcgctttacacgctcgcgaatcagaataagcgcgatatttcccagatctcggtccgtgacctcggcttcacgctcgcgccccggatcaacgccgccggccgtatcgccaatatggagatcgggatccagtgcctcctcgcgggagaggcgaacgccactgaactcgcctcacagcttgaggacatcaatgatcagcggaaggcgctcgaacgcagcatgcaggaagaggcgctggattcgctctccgacgccgatatcgagcaccgcatgagcctcgtgctcagccacccggactggcatcaggggcttgtcggcctcgtcgcgagccgcgtgaaggaacggactcaccgcccggtgatcgctttcgcgccgaccaaaaatggccttctccgcggctccggccgctccatcccggggcttcacctccggtactgcctctcgcggattgacacaatgtttccggggctgatccttcgctacggcggccacgcgctcgccgcgggtctcacgatccggggggacggccttgagcagttccgcgacgcgtttgaaaaggtggtgtcggaaaatatttctcccgagcttctcacggaagacatcgttgtggacggcgcgctcgcgcctgaagagatttccttcggtctcatccgggaaattgattctgtcgtctgggggcagtccttcgaggcgccgcttttcgcgaacgaattcgatatcgtccgccagaccccgcttcggggcggcgagcatctcaaagcgaccgtgtcgaccgcgggtcagcatttcgacgccattttcttccgccacagcacgccgcttccgggacgcgtgaagctcgcctatcggctggacgtgaatgagtggatgggccggaagtcgctccagctcatgattgaaaacgctgaggagtaggcgcctcgcctccgtcctcagactgacacggggtcagggtatttcacccctatccggaaagcccccgcgcggctttgcggcgccccgttctactttataattttcctttttcgtttctgtacagtaagagatataaatggaagctgaacagcttaatcagatcgggaacagcatcaccgatctgggagaccgactttccggtctcagggggtatctttgacatcgacctcaaagcccgacgtcttgaagaactgaaccgcgagatcgagaaccccgatctctggaatgacccgaagcatgccgaacaggtgtccaaggagaaaaagctccttgaggatacggtcggaacctaccgccagcttgaatccggcatccgcgacgcgggcgaactcttcgagatgagccgcgaggaagaagactgggatgcggtcgcgagcgtcggtgaagacgtgaagtcgatcgaaaagaaggttgagcagcttgagttcaagcgcatgttcaataatccgatggattcttcgaactgctaccttgaaattcaggcgggcgcaggcggcacggaagcccaggactgggcctcgatgcttgagcgcatgtatctgaaatacacggaaagcaagggcttcagcgtgaagctcacgagcgaaaccgcgggcgacgtcgccggtatcaagaactgctccatttatattcagggtgactgggcctacggcacgctccgcaccgagaccggcattcaccgtctcgtgcgtaagagcccgttcgactcgaacgcccgccgtcacacgtcctttgcttctgtctacgtgtaccccgaagtggatgactcgattgagatcgaaatcaatccggccgacctccgtatcgacgtgtaccgtgcctccggtgccggcggccagcacgttcagaagacggaatccgctgtccgaatcacgcatatcccgaccggtatcgtgacggagtgccaggacgaacgctcgcagcatcagaacaaagaccgcgccatgcagcagctgcgcgcgaaactctatgagttcgagatgaataagcgccgcgccgagcagcagaagctggaagacgctaaggacgacatcggctggggtcaccagatccgcagctacgtgctcgatcagagccgcatcaaggatctgcgcacgaacgttgaaaacacgaacaccaccgctgtgctgaacggcgacctcgatcagttcatcgaggcgagcctgaagcagggcgtctgacgcctggcgctcacggaataatttttaaatcaggaactgaaatggctgaagaacagaagattgcgccggaagcggattccgccgcagaagagaatcacatcatcgctgagcgccgcgccaagctgcagctgctccgcgacgcgaacgccgcctacccgaacgatttccgccgcaaggactactttgccgatctgcacgcgaagtacgacgccgaagaccgcgaaacgtttgaggcttccgaaaaggttgaggttcagaccgccggccgcatcatgctgaagcgcgtgatgggcaaggtctccttcctcaccgtgaaggacatgaccggcacgatccagtacttcgtcacgcgcgacgcgctcggcgaagaggcgtacaagaacttcaagacctgggacgtgggtgatatcgtcggctccaccggctatctcttcaagacgaagacgggtgaactctccgttcacgtcgagacgcttcgtctcctcacgaagtcgatccgtccgcttcccgacaagcataagggcatcacggatccggaactgatctaccgccagcgttacgtcgatctgatgacgaatgacgtgtcgcgcaaccgcttcatcacgcgttccaagatgatcacggcgatccgcgacttcatgacgcagcaccgcttcctcgaagtcgaaaccccgatgctgcacccgatcccgggcggcgcgaacgcgaagcccttcatcacgcatcacaacgcgcttgacgttgatctctacctccgaatcgctccggaactctatctgaagcgtctcgtggtgggcggcatggaacgtgtctatgacatgaaccgctgcttccgtaacgaaggcatggacgtccgtcacaacccggaattcacgacgatcgagtggtacgccgcgtactgggattaccgcatccagatggacttcaccgaagaactgatccgctacgccgcgatcaaggcaaccggttccgccgttgtccagtatcagggcgtcacggtggatctctcgcagccttttgaccgtctcacgccgaaggaagcgatcatgaagtactcggactacacgtccgagcagattgatgatgaggcattcctccgcgctgaactcgcccgccgcggcgagccgcagaaggatttcgtcggctacggcacgctcctcatggcgatgtttgaccttgtcgccgaagcgaagctgatccgcccgactttcctcatcaacttcccgaccgaagtgtcgccgctcgcccgcgcctcagacagcgatccgagcatctgcgagcgcttcgagctctatatcgtcggccgcgagcacgcgaacggcttctctgagctcaatgacccggacgatcaggcccgccgcttcaaggctcaggctgacgcgaagagcaagggcgacgatgaagcgatgtactacgacgcggactacatccgcgccctggagtacggcctcgccccgacctccggctgcggcatcggtattgaccgtctcgccatgctcctcacggacgctccgagcatccgtgacgtgctcctcttcccgcagatgcgtcccgaagcggatcttctgaagtaagagcgccatgaccgataccaagtggcggattgggaaatccttcgcgaagtattcgaagcaggcttccgcctcactcgatccttcgcggaagagccttgtgatcggcggcagagcagccgggtcggtgtctgaggacgacgcccggctgatcgcggaacggatcgagggtgcggccttcgacggcgcgtcgctttcgatcggcgccgcgtctgacagcgaggaaacgctctccgcgatcctcgcgctcgccgcggctctcctccgggacgaaggccggattcaccgctggcgcggcgaactcgtggacgttcagatgccggaaggcggtccccgcatcgcggtgcttgagcggagcgcgttccgtcttctcggtcttcttacggtcgccgttcatatgaacggtgtcacgccggacggccgtatctggacctcgcagcgctcagacacgaaggacatcaatcctggcaaatgggataacctcgcggccggcatggtggcagcaggcgaaaccccgcttgacgctatgaagcgcgaagccgcggaagaggccgggcttacgcctgaggactatgagctcgtccccgagaccgtgttcctcacgagccgcccgaccgagtccggctggatgctggaacgcgcctactgctacaccgcacggctccgtgacggcgtgacgcctcataacgtcgacggagaagtgcaggcgacggaactcctcgacgcggacgccatggcggaactcatcgcccgcggcaaggtgacaagcgaagcgtcgctcgccgccctccactggctcgcggcgaagactgggaaaacgcttcccgaaggtttctatcaggcgtttgtctgagcgaattccttcatctgcggttaaaaaaatgagcgccggaatcctttccggcgctcattttcttttatctcactcgggtgtcagtctcagcaggcaagcgctgccaccatcacggccttgatcgtatggagacggttgccggcctggtcaaagacgatagaggccggggactcaaacacctcttccgtcacctcgacaccggtcgcgagttccggatgcgcggcgatcacggcctgacccacctttgtttccgcgttgtggtacgcggggaggcagtgcatgaatttcacgcgcgggttgcccgaagccttcaggagcgcggcgttcacctgatagggcatcaggtcatgaatacgctgatcccaaacgtccgcgggttcacccatcgaaacccagatgtcggtgtggatgaaatcgacgcccttcacggcttcttccgcgttttccgtcagcgtgatcttcgcgccgctctcgcgggcaaaggcctcgcacatatcgagcaccgacttctcgggccagtaggccttcggggcaccgatgcggacatccatgcccatcttcgcgccgatcatgagaagcgaattcccggtgttgaaacgggcgtcacccatgtaggcgaagctgatctggttaaagggcttgtggcagtgctcacgcatcgtaaggaggtcacagagcatctgcgtcggatgccattcatcggtgaggccgttgaagaccggaacgccggcgtacttcgcgagctcttccacggtcttctgggcaaagccgcggtactcgatcgcgtcatagatctgcccgagcacccgggccgaatccttcacgctctccttgtggccgaactgagaggccgacgggtcaaagaatgtcgtatgcgcgccctgatcggccgctgccacttcaaaggcgctccgcgtacgggttgaggtcttctcaaaaatcagggcgatattttttcccttcagacgcggcacttcgtagccgcctcgcttcgcccgcttcaggtcttccgcgaggtcgacgagatacgtgatttcagcaggagtgtggtgacagaggctaagcaggctgcgattccgaagattgaacggcattttttgatccttataagaaaagcctcgcaggaggggctgcgaggctttcaataataacgcagagcggctgtcgggaaatcagaccgaggccgcttcagcgcctagcgcggcaggcgttactcacgctcatcgagccacgcctgcaggatcgcttcgagaatcgcttcagaggatttctcgggatcatccgagaagccggggagcgcgcacaccatatcgtgcagttccgtgaagcgaagcgtcgtcggatcgagatcgggatcgttgtcgtagagggtctccgcaatggtccctgtgtccttccaggtgagcgccatatcagtcgtcctcggaaacctggttacgggtgtacttcgggacttcgatcgtgagatcctcgtccgccaccttcacctggcaggagagacgggacagagcgccgacgccccaggccttatcgaggcagtcgtattctttatcagacggctcctcgagcgaatcaaaacccttgcggatgatcacgtggcaggtggagcaggcgcaggacatttcgcaggcatgctcaatcttcacaccgtgcgagagaagcccgcggatcaggttctcacccgtcgccatttcaaactccgcgccctcaggacagtatttcgggttcggcaggacagtaatcttcggcatcagatgcctcctattcgttaaatgtcattcacgttctggcccgcgagcgccttctgaatgctgcggtccatacggagttcggcaaaatgctcggtacccttggcgagcgcgtccatcgcgtccttgatcgcctgggtgtcatctgcttcagaaagcgtaagcgtgtggcgcacgaggtcaagaatcttcgcttcttcttccttcgaaagcagatcgcggtcagcggcaagcgcggagaccgttgattcaacaatacgcttcgcttcgacctgtgcttcacgcagatcacgcgcggccttgtcttcctcagcgttctggttgccttcgcggagcatcttcacgatgtcgtcatcggtgagaccgtaggacggcttcacttcaacggagctctcaaccccggtcgtctgctcacgggcgctgacagaaagcagtccgtccgcatccacctggaacgtcacgcggatacgcgcggcgcccgccaccatcggagggatgcctcggagctcaaacctcgcgagcgaccggcagttatcaacgagctcgcgctcgccctgcagtacgtggatcgccatcgcggtctgaccgtccttgaacgtcgtgaagtcctgggcgcgggccaccggaatcggggtgttcttcgggatcaccttctcaacgagaccgcccatcgtctcaagaccaagagaaagcggagtgacatcgagaaggaggaaatcgttttccacttcgttgccagcgagcttattcgcctggatcgcggcgccgatcgccaccaccttatcgggatcgatgccggcgagcggctctttcccaaagtaatcgcggatcagacgcggcaccatcggcatgcgggtcgcgccgccgacaagcacaacgcccttcacatcagcggcattgagctttgcgtcagcgagcgtcgcgcggaccgcgtcaagcgtcttctgaagcagcgccttcgtggcgtcctcaaattcagcgcggctgagcggaagtgacacctcgcgcccatcctcaagcttcacgtggaattcagtcgattcggcatcagtcagacgctctttcgcggcgcggctttctgcgagcagccggcgcttatccgcgggagtgaggctggtatccgaaacgcccgtctttgcgatagcccaggagaaaaccgcgcggtcaaagtcgtcgccgccaagcgccgaattgccgcccgtcgcgagcacctggaaaacaccccggtcaagcttcagaatcgacacgtcaaacgtgccgccgccgaggtcatagacgatgtaaattccttccgctgccttatcgaggccataggccagagcagcggccgtcggctcattcagcagacggagaacattgaggccggcaaggcgccccgcgtccttcgtcgcctgacgctgcgcgtcatcaaagtacgccgggcacgtaatcacggcgcccacaagttccccttcgagatccgcctcagcccgggcgcggagcaccttcaggacttctgaggaaacctcttcaggcgtcttcacgccggccgcggtttcaatcttcaccatgccggggttatcaagcagacggaacggaagatgcgaaggatccgcaatttccgaaagggtccgcccgatcagccgcttcgcgctggaaatcgtattctgcgggtcttcggccgcgcgctgaagcgcctcgcgtccgacctgcaccgtgccgtccgggagatatcggacaacggacggaagaagagccgagcccttctcgtcctcgagcacgaccgcttcgccgttcttcacggtcgcaacgagagaattcgtggttccaagatcgattccgaccgccagatggacggagtgcggaacctcagacattccgggttctgcgatctgaagcaaaggcatggattttttccttattcttttttcttactgatggatggcggcggcaatgtcgcgggccatcttgtcgacgaacatcaggcggcggacttcaggaaccgctttttcggggctctgctcatcatcgagaagggctgcgagacggtccacgagcgctgtcttctcctcctgcacaacggaggcgagtttcgcgagagcttcaggggaattcttccccgcctcaaacttttcgcgccactccatctgctgcatgaggaagtcgactggcatgcgggtgttgttctcggcgttcacggggaagcccgcggactcacagagatagaccgcccgcttcaggggatctgaaagtgtggaaagcgcttcgttcgcgcgctgagaccactgctcggccacgcgcttcatcgcgggagtggccgaagcgaagcggtcggggtgaacctggagctcgacccggcggtagccttcatcgagcgccttctgatccacccggaattttctcggcacgccgagaagctggaacatatcaagcttatccgccatgaccggggcgaccttcttcagacgctgaaggacttgccgcagccgcagtggtctttttcgttcgggttattgaacttgaagccttcctgaatgccctcgcgggtgtagtcgagctgggtgccgtcgatgtagacgaggctcttcggatccacgatcaccttgatgccgtgggaatcgaacacctgatcatccggttcgagaacgtcagcgaactcgagcttgtaggccatgccggaacagcccgaggtcttcacgccgacacgcaggccgatgcccttgccgcgcttctccaggaactgggaaacgtgcttggcggcggcttcagtcatagaaacggtcattcttctgctcctttgcctggtaatcaggccttcttcgcctgcttcgcgcggtaatcggcgatagcagccttaacggcgtcttcggcaagaatcgaacagtgaatcttcaccggcgggagcgcgagctcttcggcgatttcggagttcttcagggcggccgcctcgtcgagcgtcttgcccttcacccactcggttacaagcgagctcgaggcaatggcggaaccgcagccgtaggtcttgaatttcgcgtcttcaatgatgccggtcttgtcgtccaccttgatctgaaggcgcatcacgtcgccgcaggccggggcgccgaccatgccggtgccgacgtcattcgcgtcggaatcgagcgtgccgacattgcggggatgttcgtagtggtcgatgactttttcgctatagggcactttagtgtcctcctttcaacgctccgggcggtttcttccgcccggataccggttaattactgaatctgttccgaaggaaatccggccttacatcttggcccactgaaccttcgtcgtatcgatgcccttctggtgcatttcccagagcggggagagttcgcgaagccgcgtcacggcctccgtgagctccttgatcgtgtagtcgatctcttcctcagtcgtgaagcggccgagcgtgaagcggatcgagctgtgagcgagttcatccgggcggccgagagccttcagcacgaaggacggctcaagcgacgcggaggtgcaggcggagcccgacgacacagcgagattcttgcaggccatcatgagggattcaccctcgatgtactcgaaggaaacgttcaggttgaagcccacgcggtgttcccaggagccgttcagcacgacgcacgggatgttcttctggatgccttcccagaggcggtcgcggagcttgcggatgcgttcattctcctcgtccatctcctccttcaggatgcgataggcttcgcccatgccgacgatctgctgcgtcgcgagcgtgccggaacgcatgccgcgttcgtgtccgccgccgtcgatctggcattcaatacgaacgcggggcttgcggcggacgtaaagagcgcccatgcccttcgggccgtacaccttgtggctcgacatgctcatgaggtcgatcggttggttcttcatatcgaagtggagctttccgatagcctgcgtagcgtcgacgtggaaaagcacgccgtgcttgtggcagatctcaccgatttcgaaaatcggctgaatcgtgccgatttcgttattcacgcccatgatggaaacgagcgtcgtatccgggcggatggcggcttcaacagcggccggatccacgagaccgtcaccgtcgacatcgaggtaagtcacctcgtagccttcggattcgagacggcgcatcgagtcgagaacagccttatgttccgtcttctgcgtgatgagatgcttgcccttatccttatagaagtgagcagcgcccttcagagcgaggttgtcagcttccgtggcgcctgaggtccagacgatttcacgcggatcggcgttgatcagcgctgcgacctgaccgcgggcctcttcgaccgccttttccgcttcccagccgtaagcatggctacggctcgccggattgccgaagatctccgtgaggtacggaatcattttctttgcaacccgcggatcaaccggagtcgtcgcggaataatccaggtaaacaggcaatttaagcatttaaaagtttctcctcgctgtaaggacgctcagttacttctgagtttccttttgggccgtattcttatggctccgccgcatagcagccgggtcaattttcacgtaggcaatgccggactgggcaagcttctgccgctctttgttctgctcgacgagtttcgcgagcgtcgcctcagaaagcacatcttcgagtttctgattgagcgacgcccaaagctcgtgcgtcatacattcagcgccgtcgtggtgacagcttgatttgccgccgcactgcgtcgcgtccagattgtcctcaacaacattgatgatgtcggcagccgaaatctcgcaggcaccgcgggcaaggcggtagccaccgccaggtccccggacgctgacaacgagtccggcgcgacgcagctttccgaagagctgctcgaggtaagcaaccgaaatcgattgccgctcggcgatctccgtcagcgaaacggggttctcgccggcatggatagccatatcgagaagagccgttacagcaaagcgtcctttggtcgtcagtctcattatttttcggttccctattcaatcccacctagatgaaacacagagatcatacaccaatacccgacaatttaactcaggattaagaacgacgtgagccttattcgtatgggtgaaaaaaaaggccgtcaggagacggcctctaaataaggggaaaaaataaaacctctgaaactagtgctccgcttctcccttctgaggctggggagccggggcatacatcgatacacggcgcttcacgatttcaagcagcccctggcaggcatcctcacagtagtcgagcacaaggttaaagccattcgtaccgccatagtaggggtcaggaatgaccgcggcatcgtactcgctcgcgtagcgcatcagcaggtgcagcttatggcggaataccggggggcactggcgctgaagctctgagagattctcccagtccatcgccagaataaagtccgcgctggaatagtcatcaagcgtgatctggcgcgcccggtgagcggacagatcgtagccgcgcttgcgtccggccagctgagaacggacgtcaggcgcttcgccgacgtgataaccatgggtgccagcggaatccactgcgacttcggaacctatgccggcgtctgtcaccattttgcgaaaaacagcttcggcagtgggggaccggcagatgttgcccatgcagacaaaaaggactttgatcatatattccgagagtaaaaaagtagctgtccgccgccaaggcgggcaattatccgctctatcgtaccgcttttatttacgaattcaagagtaggaatgatacggattgttgcaaacgccgttcttttccgtgtttcaggccttttcaggcaggtccggaaccgatgcgccgaagagccttttcttaagcgcatcaagctgatcacggactgccgcagccttctcaaattcgagatcacgggcataggccgccatctgcttctccagctgcttcacgcgctgagacaccgccttttcgtccgagagatccgttgtatcctcctccgccttcacttcgggcgcccggtagacgccgtcaatgatgtcgcggacttccttcttgatgcccttcgggacaatatggtgctcttcattaaacgccatctgcttcgcgcggcggcggttcgtttccgtgatagcggccttcatggagtccgtcatctgatccgcgtagagaatcgccttgccttccagattccgggccgcgcggccgatcgtctgcacgagactccgctcgcttcggaggaagccctccttatccgcgtccagaatggcgacgagtgacacctcaggaatatcgaggccctcgcgaagcagattgatgccgaccagaacgtcaaatacgccctgacggagatcccggatgatttcgacacgctccaccgtatcgatttcagagtgaaggtatcgcaccttcactttgttctcggcgaggaactccgtgaggtcctcggccatcttcttcgtgagcgtcgtgatcaggacacgctcccccttggcggtgcgctcatagatttcagaaagcacatcatccacctgggtcttcgcgggccgcacttcaacctccggatccagaagcccagtcggacgcaccacctgctccaccacctgagccgagtgctcgagctcccactgcgcgggagtggccgagacaaagatcgaacggcgcatcttatgctcaaactcatcaaaccggagcggccggttatcgagtgctgagggaaggcggaagccgtattcaacgagcgtcgttttccgtgagaggttcccgcggtacatgccgccgatctgccccatcgtcacatggctctcgtcaaaaaacatgatggagtccgcggggaaatagtcgagcaggcacgcgggcggctccccgggcttcagccctgagagatgccgcgtgtagttctcaatgcccttgcagaaccccacttcctgcagcatctcgaggtcaaaaagcgtccgctgctgaaggcgctgcgcctcgacgacctttccctccttctggaaaaattcgacgcggtcccgcagttcctccttgatggactcaatcgcccgcatcacgtcatccttcggcgtcacgtagttcgaagccgggtagaccacgaagcgcggcaccttctgaatcacgtgcccggtgagcggatcgaagagactcacctcatccacttcgtcatcaaagagctcaatccggaccgctgtttccgagtgttccgaggggaagatatcgatcgtgtcgccccggacgcggaacgtgccgcggcggaactccatatcgcttcgcttgtactgcatgccaaccagctgccgcacgaagtcctcacgggtctttgtgtcaccgcgccggatgatgagacgcatcttcgtgtagctctccggctccccgatgccgtagatcgcggacaccgtcgccacgatgatcacgtcacgccgctcaaggatcgatttcgacgcggatagccgcatctgctcaatgtggtcattgatcgcggagtctttctctatatagagatcccgcgacggcacgtacgcctccggctggtagtagtcgtagtacgacacgaagtactccaccgcgttttccgggaagaaatcccggaattcggagtagagctgcgccgcgagcgttttattcggcgccatcacgagcgtcggcaccccggtgcgcgcaatgatgttcgccatcgtgaaggtctttccggaccccgtgacaccaagaagcgtctgccccatcagtccgtcatcgagcccctcacagagttttctgattgcctcaggctgatcgccgctcggctcataaggcgcatgaagaatgaaaggggaatggggaaatgaaatgactttatccacggaacctcacttttttaacgcatttgtttggcattacccggcgtgccataaggagaaaatcgtagcacctgacgctcttttgggaacggccggggcatacactctgtatatacttttattcacggcttttttccataacccactccgaagcactccttcccgactgcttgtgacgccgggacgccgatgcttctcttttattgctggaatcacatcaatatgacagataagctctttgcagaagttgctggtgcccctgaagaccccattctgggtgtcggtcagcagtacaaagccgatccccgcgccgaaaaggtgaatctgagcgtcggtgtctatcagacagaagaaggcaagatcccggttcttcgcgctgtgcgtgaagccgaaacccgcctctacaacgccgctgcccctcacggctacggtcagatttccggcaatccggctctcggcgcttttgtccaggaactgctgttcggcaaggactctgaagtcgtccgctcccgccgcgcctgcacggtgcagtcactcggcggcaccggcgctatcaagctcgccgctgacctcctccactttgttgtcggcaagaccaaggccgcgacctccgttccgacctggggcaaccataacgccatcttcaagcaggctggtttcgacgtttcccactatcagtactacaacaaggctgacggcacgatcgcctttgagcagctgctcgctgacctccgcgcgaaggaagccggcactgtcgtcattctgcacgcctgctgccacaacccgaccggcctcgacttcacggctgaccagtggaaggaagtcctccagatcgtgatcgaccgcggcctcgttccgctcctcgatatcgcctaccagggctttgaccgcggtctcgaggaagacgctttctcgatccggctctttgctgaatccggcatcagcttcctcgtttcctcctccttctccaagtccttcagcctgtacggcgagcgtgtcggcggcctgacggttgtctgccagaacgctgatgaagcggcccgcgtgctctctcaagtgaagcagatggcccgcgccaactactccaacccgccgaactacggcgcctccctcgtcgccaccgttgccggcgacccggtgctccgtgctcagtgggaagaggaactcggcgaaatgcgcgcccgtatccgctcgatgcgtgttgccctgaagaacgcgatggacgccgaaggctccccgcgcgacttcagcttcgtgacggctcaggacggcatgttctccttcacgggcttcaccccggaacaggttgagcgcctgaagaaggaatacggcatctacgctgtggcgaacggccgtatctgcattgccggcctcaataaccacaacgtgcagtacgtggcgaaggccttcacggcggttcagaagaactgattgcggcataccgtaaatacgtcagaaaagattccttcaaaatttttttcttgacattacgaggataaatctgtaaagttaattctcgttgattccccgatagctcagtcggtagagcaacggactgttaatccgtgggtcgttggttcgagcccaactcggggagccagaattccaaaagccagaaagcgaaagctttctggctttttctgtttcagctccgaaaaccggggctttccggaaacgaaaagggcgcatcgctgcgcccttttctgttattaaatcaataagtcactaatccggaatgccgcgtccgaatcccatccgaagacccagttcgcgtgcccgctcgcgggtgagtacatagccataaatcctgcggcgtccatccggatccttttcgatatagacgccctggagctcaggcgtaaatcctggaagccggttcaccccctcttcaagcgcgaggaagtagtcgagcaccaccccctcccagacttcacccggaacgcaggtgatgacgccggggggatacgggagcgccccttcgagcgcaatccggccccgggcttcagaaagcggaatcagttcacagttcccgcgcaccagctcgtaattcgccgcctggggaagcatcgcgcggcgcggcagctcatcctttctgaacatcgctttctggatcgacttcaggtcgtactcgcggtagtagtcgtgaagctcctggcagagatcccggatcgtgtagtcgcggtaccgctcagcgtgattccggtacagaaccgggagcacttcggagagcggcgcgttcgcgtccaggagccgctcgaaatgcgcgatccggttcacgaggttctccatcttcgcgagatcttccgccggggtcatgaggaagaggatcgaattcaggtccgccttctccggcacgatgccgttctcacgcaggtactcagcgaggatcccggccggcacgccgaacggctcatactccccgcgctcgatattgatgccgggggtcgtgaggaggaacttgcacggatccacgaagtactgatcggggccgtaatcctcaaagccgtgccacttcgcgcccggctcatacttgaagaaccggagatcccttgcgatctgctcagtcggatagctgtcccagggcttcccgtccacctcgggaggaataaacgggcggatatagcggcaggtcttcaggagatactttctcgcctcgatcccgaccttcacgcagtcatcccagagcagacgcccggacgcgccggcatgcatctgagcgttgacgtcaagcgccgagaaaagcggatagaaagggctggtcgacgcgtgcatcatgaaggctgaattaagccgcttatgcgacacgtagcgcttctgccccttgatgtggctgtccttcttatggatctgtgaggtctgagaaaagccggcgagctgcttatgcacggactgcgtgacaaagatccccggatcctcgggcccgagttcaagcaggagcggcgagcagtccttcatcatcggaatgaactgttcgtaccccacccacgcggagtcaaagaggatgtagtcgcagaggtgcccgatccgatcaacgatctgacgcgcgttcccgatcgtgccgtcataggtcccgagctggatcactgcgaggcggaaggggcgcttcgctttggcgcgctccggatccgcttccgccgcgattcttcggatgtaatcctcatcgaagcagtggttatcgatcccgccgatgaatccataggcgttccgcgcggtttcgagatacaccgccgtggcacccgcctgaatcagggcgccgtgctgcacggacttgtggttattgctgtcgtagagcaccagatcgcccggcgctagaagcgcggtgagcaccacctggtttgaggcggacgtcccgccaagcacaaagtacgtgttatcggcgttaaacaccttcgcggcgttcctctgggcttcgtacggatagccctcgtgaatcaggagatctcccatcgacacgtccgcgttgcagaggtccgagcggaagatgttttcaccgaagaagttataaaactcccgccccacgggatgacggcggaaaaacgcgccgccctgatgacccgggcagtcaaattggctcttcccctcctccacatacttctcaagcgcgccgaagaacggcgggagaagcgagtcctcgtagcgctgcgccgcggcgtcgatctgacggccgttataggcgagattcgtgggattgttatcaatcacctgggaaacctgcccgatcagatccgggggaaaggtccctgtaccgtccttcacgaggacaatcgggatctcgaaggcgtgagccttgacgcgggagagcagaccgcggtccgcctcggtcgccgtcatgacgatgacggaagattccgtcaggtcagaggaacggatatcgacaacggttctttccgcctggaaggctttgcgcgcttcaggcgtagctgcgatggaaagttttttcaattttccctcttcaatcgatgggaacaccccggatccttcgctttgcgactctgcagccaatgaggaagggcggatctgctccggaaggagttgacgatcaggtggttccgctctgggcgaaaccggcgttttcatgataccaactgagggggtaacgtccgcagaaattcttcagtaattcgtaagcaattgacgggaaaaatttcggcgcaaggcggggcgatacagcgtaaagctttgaagaaataaaaaatccgcactgcgtaaacagtgcggattttgtgaaactggtggagaagaggaggatcgaactcccgacctcagcgatgcgaacgctgcgctctcccagctgagctacttccccgtgagattcagtattttacagaaattgccggaaaatgcaaacctgtcatcagcgaacggccgcattcccgtgtttccgcaaattacttcttccaggttccgttgcggacgatcacgcgatagccatcgggatcctcaaaagcggctgagtcaccgtcagcgtacagctgcggattcgtcacctgctggaagccggcatcgaaaagctgcccgagcgtcttcttccagacttcgtgctccggaatggaaagcacaataaagtgattgggagtcggagcgcgcggcacttcatcctcgccccgcttctgcgaaaactcgaactggtagggccagtccttgtgcccgcagatcacgccgtcccagccaacctgggcctcatagcggtcgagaacctcgaacccgagcccattgcaatagaaattgatgagcttttcgagattgttcgttgagcgggaaagacgaatcttcggaacgacggaatccatgtaacgcctccactgaaggaaaacacatatagttaacattatggacaggagaggccctcaaggcaaagatttatcaccgctccaaagcccggattccggcccaaacgctctatatggctgaatatgaaacagatagatttccacttcaatgtcggcaaccgactcttctacgcctgccgtttcgtgaataaggtctggggaatgggactgtcagtcgctgtatggagttcagaccggatgcggctcgatgacttcaaccgccgtctctgggcgtttgaggacatgtcctttattccgcacgccttcgcaggggggctcgacgcggagtcggcccgcgtgattctttcccctgatccgacggctcttccggattccgatgtgctgctgcttctcgatgagggaacgccgcctgactacgagaatctcttccagcggtttgaccgtgtggtggatatcgtctcctccatcccggaagaaaccgaagcggcccgcaaccgctatagaatctatcttcatcacaagtatcctctgaaggcttacgaccagggaaggcgctgaacaccatgacggttcaaaattcaaaccccatccacactccggttctcgcccatcctctgcccctcaactggggaaagctcagcagtctttccgctccgattgatctggccggaatctccgagctttatcagagaatcgctcccgccgctgccccgcagacagaaaccccggcagcagctccccgacaagaaggtgtcaccatgcagaataacggctccccggccccgtccttcaatactccgaatttcggcaggacagagcctcagagtcccgctccgagcaccagtttcccgcccggagtaccggttttttcgggtgacggcggctttgatgagctgatgcgtgagccccagaagccggcagctcccgcgcatcctgcggctcaggctccccgcgaggaacctgtgttttcgaacccgcagagcgcaccggccgctgaaccgtcccccttcggcgtgtcgtccttcaagaccccgtcctatgtgccgccccaccagccggaccctgttccggttcagccggcagcgccccagcgtgatccgtcgcaggaactggtctcctatctgcagccgattctggaacgcgccatttcggaccggctcagcaccgtgatcgacgccgcggcccggtctgcggccgatgccgcggcggaccggatccgcgctgaagtgctgtcgaagattgatctcatcgtgcgcgacgcggtcgagcacgaaacctcccgttttctgagaatgagaaggtaacagccggccttccgccggctggatgacggccggctccccatcctcacccgggagccccgtctcacactattccgccgattcactccggatcggccccgaaacaccacagtccctctgttatctctgcctgaaacatgagaaaatagcgggttactttatgtattcgtatgtcaaggctcctttgaaatgactactcctctgatgacagagctcgccaagagcttcgaacccgcttccattgaagcgcactggtacccggaatgggaaaagcgcggctacttccgcgccggactcgatcagaacaagccaagcttctcgatccagctcccgccgcccaacattacgggcatcctgcacatggggcatgcgttcaatcagaccgtcatggattcgctcacccgctatcaccgcatggcgggctacaacacgctctggctcccgggcaccgatcacgccggcatttcggctcagatcgtggtcgagcgccagcttgaaaaacagggaatcgatccccactccctcacccgcgaagagttcatgcagaaagtgctcgagtggaaggaattctccggaggcacgattctgaagcagatgcgccgcctcggcgactccgtggattgggagcgcacttacttcacgatggatgagaagctttcgcgcgttgtgcggaagactttcgtccagctttaccgcgaaggcctgatctacaagggcacgcgtctcgtgaactgggatccgaagctgcagtccgcggtgtccgacgtcgaagtggagcctgaagaggaagacggacatctctgggaaatccgctacccggcagccgatggcggaaaggacgtcatcgtcgcgacgacccgtcctgagacgctgttcggcgacgaggcgatcgccgtgaacccggaagacgaacgctacaaggatctcgtcggccacacggttcatctgccgctctgcgaccgtgagattccggttatcgctgactcctacgtggaccgcgaattcggttccggctgcgtgaagatcaccccggcccacgacttcaacgactttgaagtcggccgccgtcacaatctgcgctgcatctcgattctcacgaaggacgcgaagatcaatgaaaacgcgccggcgaagtatgtcggcatggaccgctacgaagcccgcaaggccgtgctgaaggacctcgaggagcagggccttctcgtcggcacgaaggcgatccgccacatggtgccgcgcgttccgcgtaccggtgaaatcgttgagccgatgctttccgagcagtggtacatggcgatgagcaagcccgcgggcgaaggctccacccatccgggcaagagcctcgccgatatcggtcttgaagcgatggaatcgggcgatgtgaacatcttcccggaacagtggcagggcgtgtaccgccactggctcacgaacatccaggactggtgcctctcgcgccagctcctctggggccatcagattccggcctggtatgacgaagcgggcaactgctacgtcgccgagaccgaagccgaggctcagaagcaggcgggtgaaggcgtgaagctgcgccaggacaccgacgtgctcgatacctggttctcgtccgccatggtgccgttctccacccttggctggcctgacccgcagggtgacgacaagatcgcttacgatctctacctcccctcctccgttcttgtgaccggctacgacatcatcttcttctgggtcgcccgcatggtgatgatgacgaagcacttcacgggccgcgtgccgttccatgacgtgtacatgcacggtctcgtgcgtgacgccgaaggccacaagatgagcaagagcgaaggcaacacgattgacccgctcgacctgattcagggtatcgatatcgaaggcctcatcaagaagaacacgatgggtctgcgccgtcctgaaaaggctccgaagatcgcggcgaagctccgcaagcagttccccgaaggcctgcaggcctacggcgctgacgcgctccgcttcacgatggccgcctacgcgaccctcggccagaatgtgaacttcgacacaaagcgctgcgaaggttaccggaacttctgcaacaagctctggaacgccacccgcttcgtgctgatgaacgttgaaggcaaggactgcggcttccagggcggcgaaatgtcgctcaactatattgatcagtggatcatcaccgaactctcgcgcacgatcgaagccgtgacgaagggctttgagacctatcgtctcgacctcgccgcgaacgcgatctactccttcatctgggatgagttctgcgactggtacctcgaggccgccaaggtccgtctgaacaacggcaccgaggctgagcagcgcgccacgcgccacacgctcgcctccgtgcttgaggcgacgctgcgtctcgcccacccgatcattccgttcatcacggaagagctctggcagaaggtgtcgctcatcaccggcagccgcaaggctgaggatgaagcttccatcatggtcgctccgtacccgaaggctgaagactttgcccgcagcgacgacgctgaccgcgccgtggctgtgacgaagaagatgattgaagccgtgcgttcgctccgcagccagatgatgctgccgccctctcagaaggtgccgctcgcgatccagggcccgaaggagatcgcggccgctgtcgctccgttcctgcagggtcttgcccgtcttgagtctgtggatctcgtggacaacatcgatacgctgaatcagggcgctatcgctccggtctcaatcgttgacgactggcgcctgatgctcgtcgtgaagatcgatgtggcagctgagcgcgcccgactcgagaaggaaatcgagcgtcttcagaacgaagtccgcaagtgcgaggcaaagctcggcaacgagcgcttcgtctccaaggctccggaagcgatcgtcaatcaggagaaggcgcgtctcgccgacttccagaaagcgcttcagaacaacacggagcagctcgcgaagcttcccgccgcctgatcgcggtgagtgtctgagggcatgatccctcaggccgacattcccgggtgaggactctcctcccccgggaattttttgtcccccttcaatccgctatgattcagagcaccggaaaaatggattgcgaggtaatgacagcatgcaggtgaatactcttctgaagccgacctggatcatcccgattgtccccgaaggcgttgtgcttacaaagcatgtgatcgcgatcgcggatggaaagatcgcggcaatcgttcctgaatccgaagcctctcagtttgaggcgaaggaagtcgtggagctgccaggcgaaatcgtgatgccgggtttcgttaacctgcattcgcacgccgccatgaatctgcttcgcggcgtcggccctgaccttagtctgatggactggctgcagaaaaaggtgtggccgcttgaaggccgcctgatgagcccggaattcgtgtacgaaggcagccgcctcgccggagaggaaatggtgcagagcggcgtcacctgcacgaacgaccattacttcttcccggtggacgccgcggcggggcttcgcgagagcggcatgaagtgcgcggtctccgcgttccttatcggtttcccctccgcctgggcgaaaactgacgacgaatatctgaagaaggcgggggaagtgattgagcacttccggggtgacccgatggtgcatgtcacggtgagtccgcatgcgccttataccgtgtctgacgacgcgatgaagaagctcgccgccctgagtgaacggaataacctcccgatccatattcatgtgcaggaaaccgagagcgaagtgagcaactccctgaagcagtatgggatgcgtcctattgagcggctgaaaaaactcggaatcgtgaatgagcgcctgatctcagttcactccgtgcatctttctgacagcgatatcgatacactcgcgaaagcggggtcgagcgtctgccactgcccaagctccaacctcaaactggcaagcggttttgctcctgttgctaaaatcatggatgccggaatcaatctcggcatcggcactgacggagtggcgagcaacgacaaactcgatatgcttggtgagacacgtctcgccgccctcctcgccaaagctgttgccaaagaccccacggcggccccggtacacaaaatgctgtacgccgcgaccatgggaggcgccaaagccttgggatgggaccgggaaatcggctctctggaagcaggaaaatccgccgatctcttcagctgtctcctcgaggaaattaccagtattccggtacttgaacctgcggctcagttgctttacagtgcaggtagggaaagtatcacccacgtctggatcaacggtcagcttgttgtaaaaaaacaacaaaaagccgagtcctttagggggatgtcccgtacgaaagcactcgacatcgctcacacgtggcagaataagtgttaagttgtagcctgtgcggtacaccttttttcatagaaggcgcttatacttgcacagcgtgcacgcagttatcagcagagggggcgaaaccctgcgtactgcattagataatggtcttccgtaagggagatcaaaaaaaaggaaagaggaaaaaatgaacacttccgcgaagattggtggcctgcttgctgccgtcatgctcgccgcttctggctccgccatggctgctgaaccggtcaatccctatgtcacctccagcgatggcaaggttgtgatggatccgttcggcctttgctggcgcactggcttctggactccggctctggccgaagccctgggctacaacggtgctggctgccagtgtgataaggaaatcctgagcaaggccgcctgcacggctccggctgctccggctcctgctgctgccccggctccggccccggctcccgctccggcccctgtcgctgttgctccgaccaaggagaaggtgaccctctccgctgacaccctgttcgacttcgacaaggccacgctgaaggccgaaggccgcaagaccctggatgatctcgtctcccgtatggctggcgttgatctcgaggtcgtcacctccaccggctacaccgaccgcatcggtaaggacgcttacaacatgaagctgtcccagcgccgtgctgacgccgtcaagacctacctggtcaacaagggcgtcaacgccaacgtcattaccgccaccggtaagggcaaggctgacccggtcgtgaactgcccgaatccttccaagaagggcaagatcaagaacttcaagcagctgatcaagtgcctgcagccgaaccgtcgtgccgtcatcgaagtgaccggtacccgtgtcgccaagtaattgaaagctgactcttaagtcttcggactaaagagctgaacctcgtccggtttccgggcgaggtttattttttgtgtcttttctgtggagcctgccgtgtctcagaaatccctcacctctttcctctttgatatggacggaacactggtagattccgccgcggggcttgccggagccgtgaatgatgtccgcgcttccttcggatttcctcctctccctgccgcggatttccgcgaagcggcatcagaaggatccgcggctctccttcgcgtcggtttcggtgtgacgcctgagaatccccgctacccgtcgctccgggaatcattcttcacggcttacgaggcacgctgccggaagccaactctctttccaggtgtcacggagctccttgccgcgatcgaccgcaaagggcttgtctggggcattgtcaccaataagccgcaggaattcgccgaagcgattgccgcttccacccccgccatggcgcgctgcgcgatcgtcgtcggctcccgccccggcgttcctctgaaaccggcccctgacgggatcctccgcgccctgaaggaactcgccctgaagcctgagcagacgctctacaccggggacgacagacgggatatcgaggccggcaaagcggccggcacatccactctcctcgccctctggggttatcgcccgaaggacgcggacacgtcactctgggctccggactttacggcctcgtctcctgaggacatcatccggctccttccctgagcgcggccgaaagaccgctttatgcccggctcataaaaaaagtaacgcattgatataatgcccgttcctctggaagccccccaatagaggggccggatggctctcccgtcccggccgccttcttccggtcttctttctgccatcgaaccatcgcggccttcgccgcgggaaaactcatgaaaactcagaaccccccgatgacactctcctacaaactgattcttacccttttctcggccgcctttgccgcgtccctgatcgcctgcttcttccgcttcccggctactgccggcggcattgagggagtcgcggtctggctgctttatcttctctacatggtgatcgcggtcgcccgccaggcaaaccgcctgatcatccgcacgctgctcgttctgatgaccgcgaacgtggcgctggccgcggtgcttctcatctatctcgcgctccgtcccgccgccaacccctgccctcttgtgctgggaccgctcggtctcctcacgctcgccgcggacttcaccttccatatctgcctctataaattcttcagtttccacgaggcgcttcagaacggcaaacgcgaaatctgacacggaaatcatttcctcgcatatcgttacttcgtacgctatttaagaacttcttattttcggttaatactcgaaaaagccctcgtctgacaggatgcagggcttttttcatggtgtgatccagtacctggataagagcaccggaaagactttttgcctactcacacgaactgactcttcactctttatctccttctatttctttcttttctgctctcagaatgggttattttggtttaaatctattagactgatctcagtcatagttggagagttctgacccacgcgctgtcacgagcctgcgcgccgacagaaaaaagaaggatcaaatgatgaagctcaaccgtctttccaaggttgcaatcggcgtcgccgcggcctgcggcgtttattctgcgatcggtttctggggtgttcccgcgggactcaaatgggcggcttctagtccggtgtccgacattcttgggcgcaaggtttcgatccaggaagtgaagttcaacccgtggactctggagctctcggctaagggagtggagatggcggggcgtgacgcctcggatcagcccgtctcaatcggaagtctctacacgaatatggcgggcttctcttcactcacgcgcttcggcgtcgtgctcgatgagctgaaggttgatcacgtgagcgggctgctctcgattgatgaaaacggaaagacgaatttccaggacatcatcgataacatcaaccgccgcttcccgccgacggaagaaaaaagcaaggaacccttccgcttcagtctcaacaatatttctctcacgaattcagacttccacatcgtggttccgtcgcatcacgtggatgagaaactgactgaaatcaatctcggtcttcccttcatcgggtctatcggcacggaccgcgatatctacgtgaagcccgaactcacgctgaaagacaatgggacgccgtttgagctgcatggcgaatctcttcccttcaagaacacgaaggcgacccgggtgcatctcgcgctcgacggctacgatctgccgcacctcggtgccatgctgccgctggatatggatgtcacctccggcactctgaaactgaatgccgacattacgtttgcccagggcgtggatggaggaaagaacacgatcctcgtcgacttcacgggaaacgcggatgacttcgcagccgctatgcggggttctgaagccaagacgaacgcgattgccttcaagagcctcaagatcgatcagggatcggtcgatgtgatcggccgcacggcaaccgtaaacggcatcacgcttgaaagccccacgatcgcgcttgagcggcttgctgacggatcaatcgcctgggcgaaggtagcgggaacgtcagataaagcggagccgcccaagacggatgacgcaaaggcggatgaaaagaagcctgaggacaccacgcccgctttcgcctggaccgtgaagaacgccgccatcactgacggtacgctccggttcattgaccacgcggcgcatgacgcccggatcgacgcctcagctctcaatgccaccgctgaaaatgtcacgatgatcccggggcagaccacgaactttgatctctctgcgaagattctcgacggcagcctgaagacgaacggcagcctcgatatcagcgctctgaagggaaaggcctcggttgacgcccagaacctgaacctcgaccggatctcaggctacgcggaactcgccggtctcacgatcgcgagtcgagcgaccgcgaaggtcgatgccgagtattcgctgatggaagaaaagccctcggtgagtgccggcggcacactgaatctgaagaatttcgcgctgacgaagaagggggagagcccgctctccgtcaaggcggataacgcccgggctgaaagcttcaaagcactctacgacggtgatgtatcgcttgaccttgggaagctcgcgctcgcgaaacccgcggtggaactcccgaagagctccttcagcgcgggtttcggcggaatcgacgcgcagaatttctcgcttggctggaagggcaaagatgaggcgctcagcctcggtgcccggacgctcgcgctcgccactccggaaattcacgccggcagcttctccggcaaagcgggccgcctctccggaaacacggtaaaggtcggctggaacagcaaacaggataccgtgacatttgacggcggcaaggtccgtgcggaaaagactgacctcacggccggaaacttcaagagcaccatcacggattcgaacgctgcgaaactcgcggtcaactggaacggaaagaaagaactgcttggtgtgacatctcagaccactggactcgccgggctcgacttcaaggctgatccggtgacaggcggttccaccgctgtgaacgcccaggcactgtcgctcagcgttgccacccgtgaggacggcggcgtctccgtgaaagcggctgacgtgaattccaaaggcacccggcttcaggtcgccggcggcactcctgtgaaactcgccgtcggcacgcttgacgttaagaagagcgcgctggatatcaagaaagcgcttgccttcacgggatccagcgtttctgcgggggacattcaaagcacggtcgaccttcttaacttcaatacgggccacgctgacatcaactccatcagcttcacgcgtgactccgacatgagtctcaaggtcgcgagcgcgaacctcagcaaggcgcaggtgatttcgcctgtgaacgccgcaaaggtgtcgacgctttcggacaccgtctccgcgtcgaatctcgactggaagagcggcgcgtccggccacgccaatctcgcctccctcaatatcaactccaccgcctttgaaatctcaggcggcaagtcgaagttcggccgcgtggaccgcacgacggtaacaggcgtcgaagcaccggctaccggcaccatccgggtctccgcagttgagatcgcaaagtcccgcatgatgctctcgcgtgacgcgaaggggaacctggatatcgatccgctcctcggaaagcggaaggctgccactgaagcgaagaaagtacaggctgtggtgaagcagaaggtggaggaagcaaagaagaaggccggtgtttccgcctcgcagccgatccgtatcggcgaattccgcgtgaccgacgggggcttctcctttgtcgacaattcgatcaagcctgccggccagttccggtttgccgatctcaataccacagtgaaaccggtcgcgatcggaggcgaaaacacgccttcctcactcacgatgaccggcgtcgtgaatggggtttccaagatcaacgtcacaggcagcggctcgcctttcgtggataaggggaaactcaccgccaaggggacaatctccgcggtctcgatgccgttcttctcgccctacaccgttcactatgtgtcctacccgattcagaagggcaacctcacgatcaagtcggatatcacactgaaggataagacgttcctcgatgttgacaaccacatcctgattgagcagctcgcctggggcgactacattccgaatgacacttcgaccagcctccctgtgacgcttgccaccgcgctcctcacggacggtcagggaaatatcgaatttgatctgccgatctcgggcaacctcgcggatcctgagttctcgttctcgagcctcattctcacagggcttgaaaacctgatcatcaaggtcgtggcagcgcctgtaaatctgctcgcctcgatcggaaacctcgcgctcggcggttcttcctccagcgccgcggctttcgtcccgtacatgtccggcagcggccacatgacggccgatcagcagaagagcacgctcgcccagatcacgaaggcgctgaaagataaccccaagatgaaggtcgaaatcacgccggtggtcagtgtgaagggtgacgacaacgcgctccatcagaacacgtaccgcggccttctgaagatcgttcagtcgacgcttcctgaagctgaacggagccgtgagaaggcggtcgacgcgctctatgccctccagttccccaacgacaaggcaagccatacgcttgaagagaaggaggcgaagctttacaccgctgtgcagcctgacgagagcaacctgcataacctcgctgactggcgctcgaggaacctctcgaaagcgcttgccgaagcgggtattgcggataagcggatcttcatcaccgcccctgaaatggataaaaaggggaacctcggcggcgtgaagatcaagttcatcaagtaatcggcgtaacaaaaaaggatccccgcgatggggatccttcttcggtctgcaggcccggcagcagtgccgggccgctcttttttatcagagcgtatccttcttcgacgtgaaggagtcgctgtaggtgcagtccttatcgagaccggctgccgtcagcgcgttcacggcatccgtcacgagacgcggcgtaccgcagatgtaagcgtcatactgggacgcatccgggtgatccgcgaggaactgatcctgcacgtgacccacgcggccagtccagccttcggactcgtccgggcggctgagcaccgggcagtagtggaaccactcgtgctcggcgtcccacttgcggcagagctcatccatgtagaggtcgaccttatggcggccgccccagtagagataaacctggtgaggcttggcgctcgggagcttgatgaagttttcaatcatcgccttcgctggagcgaagcccgtgcccgtcacgaggatcaggatatcgtgcggggtgcgcttatgcaggcggaagtcgcccgcgggagcggcgatttcaagcttcgtgccaacctggatcggctcacccttgacgccaaagagacggtccgtgaagagaccgcccgggacgtggcggatgtgaagctcaaggccattctcagccggcgtatcgcaggcgatcgaatagctgcggcgttccttgttttccagaagaatgtcgacaaactgtccggggatgaattcgatcggcttgccggaatcggccttcagcacgaggcggatcacatcgggggccacacggtccatcgcggcaaccgtaacggggatgttgcgcacgagcttcttgatctgcacggcgatttccacgtcactcgcggcttccgtgctgcaggtcagaatcttcggaccgtgggacggcacgccttccttgctgcccggggcatacgtgatgaagtcgccagagacaacgttagcggagcaggagccgcagaaaccgctgcgacaggcgtgagggatgtcatagccagcgcgctcggcggcatccagaatccgctcgcccttctcagccggaaaagacacatcggttccggaaattttcaccagaaaagccattctttgattttccttatcgtttttcccgcgaggggtcgttcccgaaggaaaggtatccatgtaattctgaaaagaataccagtactccactgaatcagcacggcttattccggtgacactatcctactttcggggtaaagtgcgatacacagtaaatgctctttccaaaagcttttttcggagacgaaatgacggattcatctattgaggcgatttctccaaaggcagtggcggcggccctctcgcgggtccgcgcccagagaccgctcgtgcagtgcatcacaaatgacgtcgtacaggaaatcacggccaatgtgcttctggcagccggaatgtcgccggccatggtgccggctccggaagaagccgcagccttcgctcagttcgctgcggacgctctgctctgcaatgtcggaacaccttccgaagaaaacagccggggcatgaagctcgccgcggcgacgatgtctgaagccggaaagccctggacactcgaccccgtgggcgcgggcggcaccgcctggagagatgatctgatttccgatctgattgacctcaggcccaccgtgatccggggaaatggttctgaaattctcgcctgcgccgggtttgcccatcagtacaagggcgtcgactcactcgactccagccgctcggcgctcgacgccgccaaggcgctcgcccaaagatcaggcggcatcgtctgcgtgtcaggcgaaacggactacgcgactgacggtacccgcgtgctcgcggcggtgggcggcaacgtcatggcgacgctcgtggtgggcaccggatgctcgctctccgcgctgaccgcgggtttcgccgcgaaagcggaggatccgctggtcgccaccatcgcctgctgtcagttcgtgaaacgggccgcggaaatcgccgggaacgcctcccggggcccgggttccttccacgacgcttacctcgacgcgctctatacgctgcagcccgaaaactttcttgaagaggccgtctgatggcgctccctgatctgtcgctttacctggtgctggaccccgtactctgcggaggcgcggacggcatggtgtccaccgcggtcgctgctgcccagggaggggccggcattatccagctccgggctccggactggaagaagcgggagctcgcggcctgcggacgagctctgatccgcgcacttgcgccctatggcgtgccgctcgtcgtagatgatcaggtggatgtggcgatggcaatcggcgcggccggcgctcatgtcggacagaaggacctcccggcagaagacgcgcggcgcctcatggggccggaagcgatcatcgggctctcggtctcaaacgcggcggagcttgaggcaagccgcagcctcgccgcggccggcgtggtcgactatctcggtatcggtccgatcgaaagcacctccacgaaacccgacgcagccgcgcctctcgggctcccggggtttgccgctctcgctgccgtgaaaccctgcccggttgtcgcgatcggctccgtgaagatccataacgccgcggctctcgccgcggccggagcggacggcatcgcggtcgtttcggcaatctgcggcaccgcggacccccgcgccgcatcagaagcgcttctcgcggctttccgttcaggattgaaaaaataacctgaggtgccaggaagagccccgtttccctggattgattccgccgctaaaagaaggcagaaccgcggggcaatcctgataaaatcgagctgctgaccatacggtctgaggctcacgcccggaccgtacggaaccttatttcttttgaggcaaccgaagaatggctttgttctctgaaagcaaactgaaaaaactccgctatccctacaacacagcaaggatggtgagtctcgtgaaggcaatcgaaacctcggatgcgggcggcaagtactggtccaaaaccgaggctgaagagatcaccgcggagctgagccgggaaaccactccgggctccaaggcgtcggatttcatccagaagcgcgccgcgctcgccttctcccggatgtcgaaacgttccccgacgcttctcacgatgaagctgaactacggctcccgatcgcttgtcgcgctctgcctcattctcggttcctacctgctcggcgctttcggtgaacggttcctctcaaccggcgcggagatcaatctcttttcaccgatctatctctttatcttcgggtggagcctcttcctctacgcggcgctcatcatcctggggctcgtaagcattgtccggcgccgtcatatcgaattcccgctccgcacgacactcgcaaaactttccgatggactcttcgccccgaagatcatcacctccggtatccgtcaggcgttcctgaaaatctggactccgaccgttctgagactctcccagttccgcatcgcccgcattctgcactgggcgttcctcgccttcacggccggcgtgatttccagcatcatcgtccggggtctcggccacaactatctgatcggctgggatatcgtcgggctgcataattcgccggataacgtctgcgatatcttcaataccctctttggctggatccccgcggcactgaatctcggcccgctgccggacgtgaacacggtggccgcgatgcgtctcgaccgtttgcaggacgccgctacaacctcagccgccgcggctgccgctttcgcgcccgctgcctcctggctcccgcgtctcttcattctctacggcgttgtcgtgctgatcccgcgtctccttctgatcctctgggatacgatcgggatccggatccgctccgaacgcctcccgtttgagatggatgggtatttcgcggatatcctccgcaccgctgaagcggctgtcgcgggtgctgccgctgccacagcggccgccgccgaaaccgtgcacgaagccgccgcgtcggatgtgaaggacgcggtcgaagtgaagcctgatgaggaatccggaaagcagtcctgattccttacgaagtcttctttccttttagccgctttccaatccggaaagcggcttttttgatgcctccatcaggagcaccgcctcgcccccttccttcaaaacgtgaagcaatcgggttcagacggcttcaggggacctcctgcctgaccaaaccttaatcctcccctgctccgcgctctttccgccctcaaagggggctctccgccgcgccaatcccgggttcggcggatatccgtctccggggtccgcttcctgccgccttacgggtaaaaaaattcccgggctggaaaaaccagaccgggaatctgaagatcagagtctttcagaaagcggattccttacggaaccatttcggaaatctcagccttcttcaccttgtgcacgaggtcttcacgcttcaccttcaggtacatggcgatagcggccgcaacgaacacggaagagtaaaccgagcagcagataccgaccgtcagagccagagcgaagtagtgcagcgccgggccgccgaagaaatacatcgacagcgtcatgcacagcgttgaggaatgggtgatcaccgtacgggaaatcgtcgcggtaatagctgagttaatcacctcaaccgtgctcgcctttctcatcgtccggaagtgctcacgcactcggtcgaaaataatcacggactcgttcaccgagtaaccgagcacggcgagcagactggtcagcacctgcagtgagaactcccactggaagaacgcgaacagaccggcaacaatcaccaagtcatgcatattcgcgatcacggcggcgactgagaacttccactcgaaccggaatgcgaggtagatcatgatgcccaagcagacaagcgcgagagcggtggcgccgtcagtggcgagctgcttgcccacctgaggaccgacaaactcgacggagtgctgcttcacgcccggagtctgggcggaaagaatatccatcacctgcttcgcctgctggccggaggtttcatttcccttcagcggcacgcggatcaggatgtctttggccgtaccgtagttctgcacggagacctcaggcgagatcttctcagccagaacctttcggatctgatccgtgtcagcagcgctcggatacgtcacttcaatgttcgtgccgcccgtgaactcaatcgagaaggcaagccccttcgtcgcaaggaagaacacagcgaggcagaacatgatgaccgatgcaatattcaggtacagcgaatagtgcatgaacgggatcgttcggcgaatgcggaaaaattccattatttatctccttgatccgttcggttatttacccgcggacccggtgccggcaaccttcttgggagggtcggggcgccagatcttgccgatgtgaatcttcttcaggtgcttctgacggccatagaccagattcacaagaccgcgggagacaaacaccgccgtgaagagcgaggtcagaataccgagacagtgcaccacagcgaaaccgcggatcggaccggagccgaagatcagcagagcgataccggcgatgagagacgtcacgttcgagtccacaatcgtcgcgaaggctctgtcataaccttccttgatagccacctgaggcgtcctccaggctctcagttcctctcggatacgttcgttgatcagcacgttcgagtcgacggacataccgattgaaagcgcgagagcgccgatacccggcagcgtgagcgttgcctgcagcatcgagaggatggcaacaatcaggatcacgttgaaaagcagcgtgatcgctgaaatgatgccgaacacctcgtagtacatcatcatgaagatcgacaccacgatgaagccgtagatcgacgccttgaagcccgcggcaatgtttgcctggccgaggctcgggccgacaagtcgttcttccacgatttccatcggagccgcgagtgaaccggctctcagcagcagagccgtatccgtcgcttcgatcgtcgtcatcgcgccggaaatctgcacgtgaccgccgccgatttcctgacggatcactggggccgtcaccacctggccgtgtcccttctcgaagaggatgatcgccatgcgcttgccgacgttatcgcgggtcacttccttgaagatccgggcgcccttgttgtcgagcgtcagattcacggtcggttcctgcgtctgggagtcgaagcccggctgtgcgtcctgaaggttttcaccggtcagcagcacgcggcggcggacgagcacctggtggttctcgcggtcagtgaagacctcgtcaccgaacggaaccgtgccggatgccatctgggtataagcctcaggcgtgtcatccaccatgcggatttcgagcgttgccgtacggccgagaatgtccttagccttcgccgtatcctgcacgcccggcagctcaaccacaatgccggtcgcgccctgctgggcaatcacaggctccgcaacgccgagttcattgattcggttatgcagcgtggagatattctgcttgatcgcgtagtcctgaacgtcgcggatcgccttatcggtcatgcgggcaacaatctgatagttgccgccgtcctgacggtcttcaagcgcgagatccggatcggtgccgcggatcagatcgaaggccttatcgcgggagttctcatccgggaactgcatcacgatcgtgtcgccggagcggtcaacgccgttattgcggatgtccttatcgcggagctgcgtgcggatatcggccgcgttcgagtcaatacgcttctgaatggcggccttcatatcgacttcgagacggaaatgcacgccgccgcgaaggtcaagaccgaggtacatcggcttgccgccgatcgccgagagccattccggagtgttcggcacgaggttcagcgcgatcacataatccgggttcgtcggatccgggttcagagcccgttccagcacctcacggccctgaagctggagctcggagtccgtcacgccgaaacgcacgcggacgctggcgctcgactgctggctgccggcatccaggtggacggcctgaggcttgattcctgcggatcgcagcgcgtcctcaaccttcgccatggtggcatccgttaccttcaccgtcgcctttccgggagagacctgaatagcaggcgactcgccgaagaagttcgggatcgtgtagagaatactgatgacgagggcaaacaggatgatgaggtatttccaaatgggataacgattcatcttgactacccaaaacccggcctgataagccgggcataaagaataatgcagacccgctcgggcgctgtatccagcgtgagcagggcctgcctcaggaagcccggaaaggcttcctcaataaatctgtcctgcgcgaaaccggcttctcagaacttgacggttcccttcgggagcacgttcgcgatggtctgacgggccatgacgatcgtcaccggggtgccttcgacggtcgagatctggatcttgacgttctgttcgtcgagatcagcgaccttgcccatgatgccgccggcggtcatcacttcatcgcccttgttgagaccttcgaccatcttctggtgttccttcgcgcgcttctgctgcgggcggatcaggaagagccagaaaacgacgatgatgagaatgaggggcaggaactgcataagagcggcggaagcaccgccggctgcggcgtccgccgcgagagcatcagaaatcagaaacatgaggtctcaagtccttgtttattcattagccgaaaagggtacagtcccccggccggaaatcaatcagctgattataaaggaataggcctccccgctgtgccagccggggaggcccttcagagtgcggagcgtcagccgacgccgcgggcgcggtcgcggtagaactgctctttccactcctcaaacgttcccttctcgagcgcgtcgcgcatctcagccatcagcgtgagatagaagtgaatgttgtggatcgtattcagacgggctccgagaatctcacccaccttgtgcaggtggtggaggtacgaccgatcgtagttgcggcaggtgtagcagtcgcagctttcatcgagcggcgcgaggtccttgatgtacttcgcgttcttgatcttcacgtcgccgtagcgggtgaagagccagccgtttctcgcgttccgggtcggcatcacgcagtcgaacatgtcgatgccctgggagacgccttcaaccagatcctcaggcgtaccgacacccatcaggtagcggggcttgtcgtccgggagctggctcacgatctcctcttcgatccggttcatctcagccttcggttctccgaccgagaggccgcccaccgcgtagccgtcaaaaccgatatcgacgagtccgtgaagcgactcttcgcgcaggtgcttatacatgccgccctgaacgatgccgaaaagcgcgttcgggttcccgaggcggttgaattcgtccttgcagcgcttcgcccagcgaagcgacatgcgcatcgaatccgccgcctgcttctcagtcgcgggcttgccgtcgatttcgtacggcgtacattcgtcaagctgcatcacgatgtcggaattcagcacagtctggatccgcatcgactcttcaggcgacaggaaaagacgccggccgtcgatcggggaggcgaacttcacgccctcctcggtgatcttccggataccgcgaagcgagaagacctggaatccgcccgaatcggtcaggatcggacgatcccagtgcatgaagtcatgcagccccttatggagcccaaccacttcaagccccggacggagccagaggtggaaggtgttgcccagaatgatctgggcaccgttgtccttcagctcctccggcgtcatcgacttcacggtgccgcaggtgccgaccggcatgaagatcggcgtctgcacgacgccgtgattcaggtgcagttcaccgcggcgggctttgcccgacgttttcagaactttaaaagatagcgccacgggcgtgtcctccgttatttggcctggggggcattttcgaggaacatggcgtccccgtaagagaaaaaccgatatttgttttcaatcgcgtgacggtacgcgtcaaggatccgctcgcggcccgcgatggcggaaacgagcatcacgagagtcgacttcgggagatggaagttcgtgatcagagcgtcgatcgtattgaacttgtaacccggggtcacaaagagcgtcgtatcgcgggcaccggactgaatccggcccggagccactgccgcggcttcaagcgtgcggagcgacgtggtgccgaccgccacaatgcggccgcccttcgccttcgtctcattcacctttgccgccacttcaggcgacaccgagtaccactcggagtgcatcttgtgctcagaaagcttctcctcacggaccggctggaaggtgccggcgccgacgtgcagcgtcacatacgcttcgtcgatcccctctgccttcagttcatcgaggagctcgcgcgtaaagtgcagacccgcggtcggcgcggccaccgcgcccgggatcttcgcgtaaaccgtctgataggtcgactcgtccttcgcgttcgcgtcgcgctcaatataaggaggcagcggcgtgctgccgaacttatcaagaagcggcagcacagcatccgggaactcgagctcaaagaactcgccctcgcgctcacccaccttcaccgggagcttctcaccctcgtggttctcgaaaatcacttccgtccccgccttcggggacttgctcgcgcgcatcatcgcgatcgcgctcttctctccggtcacgcgctcaatcagagcctcaactgcgccgcccgtggccttgtgaccgcggagacgagccttgatcacgaacgtgttgttcatgacgaggagatcgcccgggcggaggagcttcttgatgtcgtggaaaaggagatcttcgtatccgccctcaggcactacatgcagcagccggcagttgtcgcgctgttccagcggaaactgggcaataagttcttcgggaagatcgaaatcaaaatcagatagatattgttctgtcatggcttgactggccagataaagaaaggaaacgtggaattatacgcagtgggcagatttcggcagagagagacgtaaatttgacagatgtcaaatcttctcaaacgttaaatgagaattattttcaattggtgatagtatttggctcatcagttccacggggtcgggactggttaagcagttggatcggcagagcttctcctctctgctggttttcaggtatctcttttaggggcggcgtggacagacggccgcccccttttttttgcggtttggaccaaagagaaaccttttttggcataatatgacgtctttgcatcatgcattgtcacattgcccgggtggcggaatggtagacgcagcggactcaaaatccgccgactaaacatcgtgagggttcgagtccctccccgggcaccatctgatttttcccattctcttccgctctgccgcattccgcggccaggcttcccgtacccttcagacatttatctcgtgatatcaaacgagagctggacatcagacgcttttccccggataacacggcactccaccggaatatgtccataggtcttcgagacccgtttatagaaaatcagcggcatattggcgatattcggagcgagaaggcgcttcgcgagttcctctgtcccgatatcccaggcaataaagttcgaggtctccacaatctcaaccccgaactcccgctcgtagaagctgtagagcgattcatccggctccagattcttatcaaaccgctcgaatgtcagccccttgaaatagtctccccgcagataaagctcatcgatcccctgaaattcgccgtttttatcgatctggtgacggagcacatgaatcacggggtcatctttcttcagacgaagacggacagagaactcgtctcccgcgggaatggtttccagaaacagaacctttcggtccaccatgatcatcggcatcccatcccgggtctggaaaggctgaaaacggttccagaagcccgcgcctccgtcccgataggaccggacataggtgccagagccctggcgccgccagagaatgccttcgtcgcagagttcccccaccgcgtgacgaagcgttccgacactgactccgagttcgcgcgagagctcgccttcaggcggcagcttcgccccgggaagccactcgcgtgtctccagacgcttcaggatcttccgtttcgctgcttcgtaaagcggtacgccgttacccatcttccctcctctcctttcgcccgaagtatacggatatcgtccggacttccgctgcaaaagatatacatgacttcggttttacccgttattttaaacagcagacgtcacaatacagactgatacgcggacactagatccgcttcagtccggcggtttcaccggaatttcaactggaaggagactcgaagatggcagatgcatttgaccgctacgtacccgaaatgatcgaaacccggcgccgtattcataagcgtccggagcttggctggacagaattcgaaaccaccgcgatcgtcgcgaagaaactcaccgaactcggttttgaaattcatctcggacgcgaagtggtgaatcctgacgcggttctcgggcgtgatccgaaagcggttgaagcagccatcacccgtgcccgtgaggccggtgttccggaggagctcctcagccgcatggatggctacacaggctgcgtcggtattctcgacaccggccgccccggtccgacgctcgccttccgtcacgatatggacgcgctcccgattcaggagatcacggatcccgcttctgaccatctgcccgcgcgtgaaggcttcgcctcgaccttcaaaggcaagatgcacgcctgcggccacgactcccacaccgcggtcggcctcggtgttgcgcactggctcgcggataacaaggatcggctctgcggccgcatcaagctgatcttccagccttctgaagaagggacgcgaggcgcgggcgccatggtggcagccggcgtcgttgatgatgtcgactggttcttcggtgctcacgtcggtgtcaccgcgaagaccggccatatccagctctgcgcggacggctacctcgcgaccacgaagttcgatgtgaatttcaccggtattcagtctcacgccggcgcaaagcctgaggccggccgcagcgcgctccttgccgccgcgaacgccgcgatcatgctgaacgccatttcccgcacatcagaaggcgacacccgggtgtccgtcggccgtcttgacgccggtgaaggccgcaacatcacgccggctcacgctcacatggagtgcgaggtccgcggctccacgcatgaagcaaacgaattcatgttctcccgcgctcaggaagtggtgaaaggcgcggccgacatgctcggcgtgaagtatgacctcatcaagaccggtcaggcaacgacgctcgtcacaacgccggaggccatggagacgatgcggaaagcggctgaggcggttcccggtgtcaccgtggaggatatccaccactgcggaggatccgaagactgcacgctcttcatgcgccgggtcgcggagcatggcgggaacccgggcttcttcctctttggctgcgagaacaaggggcaccaccgtccggatttcgatatccaggacacggtgaacctgaagccgggctttgaagtcttcacgaacattgccaccgcggtctgcgggcgcaaagactgacatctgacacccagggcaccgctgccccagaggtaaaaaaaagggcgatccgtcggatcgcccttatttttggctttctcaggccgccttctcaggcccctgctccggaagccagagtttcaccgccgcgcctccgtccggcatattcgcggcggacaccttcccgtgatgcgcctctgcgatcacgcgtaccagggcgagcccaagccccgccttccgctccccgctttccgcgggaggcgcagaggtggcctcccctgccgccacttcagccgcgaaggctttgatgccctgcggaatgccctttccgtgatcccgcaccacgatctcgaccccatgattcttcccctgagccgaaatctcaaccggcgttcccttcggggaatacttttccgcgttatcgatcaggttctcgagcgcccgcatgataagcgaccggtcgatccggaccttcgggagatcagaggacacatccgtctgaatcgtcttcccggaatcaatgctccagaactgtcccgcggcttccgtgatgagctgcgagatatcggtctgcgcgagatcgagttccgcgttcccggcctgcagccgcgccatctccttcaggttcccggtgagacggcgaagcagcgcggcctgcccctgaatagaagagaccgcggcggagtacgggctcccgagcagctcagggaggagtttctccgtggtcttcagaatcgagttcaccggaaggctgatatcgcgggacacggcgccaagcagcgtcgcgcgcatcctctcggcttctccgcggatcatcgcgtctttcgcgatatttgagtactcgattcgctctatggtctgagcgacctgcaccgcgcaggcgtcaagcagccgctttgtatcggggttctccaacgtcagggcaccggtcggactgagcgccatcacaccccagcagcgccgcctcgtgaggagcggaatcatccgttccttcgcggctgagagtgtcatcgttccaagccccgcttcctgcgagtggtcgtaagaccactgcgccacttcaatatcggggagtttcttcgacttgaagctcagccggtcatcgtgatccgggaacccaagcgagatatcggcctgaaggagcggcgaaagatgacgctgcaccacttccgccacctgttccaccgtgatcgacttcgtgagttccttcgcgagctccgccaccgcggaactccggaagtcacgcacgcaggcgagatccgcctcgcggcgcagcttccctgacatcagaccgacatagaccgccgtgatgaggacaaggaagaaagtgaagatgtactgcgtgttattcgtcgtgaacttcagaatcggcggcacgtagaagaagtcaaacgcgagcgccgcgaggaacaccgcccaggcggccggcccgcagccccagacggcgcccaccgcgaccgccatcagaagaatcagaatgatgacgttcgcgggctcgaagatggagagcaggaacgcggtggcgacaagcgtcgccacgcaggcgatcgttgcccagaggtaattgatcgccggggcgttcccttcaccattcagccacttcgagcgctcgcgggtcttggaatcctcgagcgcgatctgcaccacgtcgagatccgggtatcgggtaagaagcttatcggcgacccccgcgcggaaaatcgcgaatttcgagcggggcttcgcgccgagcacgatcttcgtcacattgcggcgccgcgcgtactccgcgatcaccgcgaccggatcgctccctgaaagcaccgtggtttcggctccgagctgaccggcgagattcagcacatcgaatacccgcttcttctcttcactgtctggtctcgaaggatcctccacgtggaccgcgatccactcagccttcatgcggttcgcgagacgcgccgtttcacgcacgagacgcgcgctgtcggtgctcgtgccgatcgcgacgagcagccggtcttgcgcttcccacacggtcgcgatggcgctctcctggcgatacgcccgcatctgagcgtccacgcggtccgccgtgcggcggagcgcgagttcgcggagcgcgatgatgttccccttccggaagaagttatgcgcggcgcgtgccgcgatattcgggagatagatcttcccttcgtccagccgcttcaggagttcgtccgccggaatatcgacaagccgcacttcccaggcttcatcaaaaatccggtccggcacggtctcgcggaccgtgatcccggtgatgccggccaccacgtcattcaggctctcgagatgctggacattaagcgcggtgtatacatcgatcccggcttcgagcagctcctccacatcctgccagcgcttcgcgtggcggctcccggggagattggagtgcgcgagctcatccaccacgaggagctgcgggtggcgcttcagtgccgcctcaatatcaaattcgtgaaggttgctgcggccctgaacggtccgcttcggaagaatctcaaagccgtccagcagctcactcgtttcctcgcggccatgggtttccgcgagtcccaccacaacgtcgaccccagccttcagctgcgccttcgcctcagtgagcatcgtgtaggtcttgccaaccccggcgcaggcgccgaagaagatcttcagcttccctcggccgctctcatcctcagacttctgtatggaggccagaagcgcgtccggatcgggtctctcttcggtatcgtctctcatggtgcatgcctcctctctgtcagtcttttagtcggtctagcggcgctttccgcgctttccgctcttgccgctcttctcgctctgccggatctgctccgctcgcctgtcaagctccatgttgagcgcgagaacattgatgcgctcttccccaaggaaaccgaggaacggctcctcagtcatatcgtgcacgagcttctcgagatcctgcttcttcatttttctcgctttcgccacgcgctccacctgccagagcgcgtcttcgggcgtgatatccgggtcaagcccggaggcggaggttgtcgcgagatcctgcggcaccggtcccttcgcgtcggggttcgccttacgctgcgccgcaacccggtcgcgcaccttattgatgagccaggggctcgtcggaccgtcattcgagctcgtcgacgtcatggcgttattcgcgccccccgggatcgcgctcgggcgcccccagaagtacttcggctgagtccactcctgcccgatcaggcggcttccgaccggtttcccgtccttatagacgatcgacccgttcgcctgctccgggaaagctttctgagcgatcacggtgaccagcgcggggtaaccgacaccgcagacaatcccgagaaggagaaagatgatgatcgcgtttttcgctgctttcagaaccatggcctttgctcctagaagatcccgagataggccagcgccatatcaatcgccttgatcagcacaaacggcacaatcaggccgccgaaaccgtacaccacgacatttcgccgcagaagcctgatcggggaagaagccttgtagtggacgcctcggatcgcgaccgggatcagcagcagaatgatgagcgcgttgaagatcacggtcgacagcaccgcgctttccggtgacgaaagatgcatcacgttcagcacggaaagctcaggataagtcgtcgcaaaggcggccggaataatggaaaagtatttcgcgatatcgttgctcacggagaacgtggtgagcgcgccgcgcgtgagaagcatctgcttgccgatatcgataatgtcgagaagcttcgtggggcttgagtcgagatcaatcatgttcccggcttccttcgcggcctgcgtgccgttccccatcgcgaccgcgacgtccgccttcgcgagcgccggagcgtcattcgttccgtcacccgtcatggcaacgagtttcccctcggcctgatagcggcggatgatccgaagcttatcctccggggtcgcttcacccacgtagtcatcaagccccgcctcggctgccatcgcggctgccgtatagcggttatcgcctgtcagcatcacagtccggatacccatgctccgcagctgattgaaccgctgccggataccggtcttgatcacgtccttcagttccacgataccgagaacccggccgttttcagcgacgataagcggggtcgcgccgcggcggcccatgctgatcgctttctgctcagcctctttcggaagcgccatccctttctgccgtagccaggcgctgatcgcggacatggcacccttacggatgctacggtctccgagatcgagcccggacatgcgggtctgggcgctgaacgcgacaaacttcgcgcccttgaaggaattgatatcgatctgcacgttgtagcgctctttcgcaagccgcgtgatcgagtagccttcaggcgtttcgtccgcgatcgacgcggcggccgcggccgccgcgagctccgcgaccgtcacgccctgaagcggcacgaaagcaatggcttcgcggttaccgaccgtgatcgtgccggtcttatcaagcagcagcacgtcaacgtcacccgctgcctcaatcgcgcgtcccgacatcgcgatcacgttcgctttcagcatgcggctcatgccggcaacgccaatcgtggacagcagacctgcgatcgtggtcggcaccacgcagacaaggaacgcgaccaccgtgatcacgcggaccggcgccccgcgggacgccatttcagaggcatagagcgagaacggcacgagtgtcgcgcaggagagaaggaggatcacggtcatagcgatcagcatgatcgtgagggccacttcgttcggcgtccggcgccgccgcgcgccgtccaccatcgaaatcatcttgtcgaggaaggagtcccccggttccacattgatcctcgcaatcagccggtcagagagcacacgagtgccgccgacaatcgcggaattcgggccgcccggctcacggatcaccggagccgattcgcctgtcaccgcggactcatcgacagacgcgaccccgtcaatcacctcagcgtccgccgcgatcacgtcccccggctcaatcagaatgaggtcacccttcttcaagttctcggcgagcacaagttcaggcgacgtcacatcgtccactgacttgatgcgcttcgcgagaatctcacgccttgtgccgcggagcgcgatcgcctgcgcccggccccgctcctccgcaagcgcttccgagaagttcgcgaaccagagcgtgatccagagccagatcatgagtgacatcgagaaaaagatgtcgtgggcgtgcctcggatacgagtgcggaaagataagttcgtaaaccgtgagcaccgtaacaatcacggcgcccatccacacgatgaacatcaccgggttcatcatgagtgccacggggttcagacgatagagcgcgagccacatcgcgtgcaggatgtggcgcggcgtgaagaggtggcgcgtaagcgactggttttcccgatccatttcgtttctctcccttacgagtgatagccccagaagagctggatcgattcaacaatcggaccgagcgactgcgcggggaagaaagtgatcatggagagcagcacagccaccatgatgaacatgaaggagaagaccgggccatccgtctggatcgcctgaacggaattcatctgacggggtttggacgccatattgcccgcgatcgcgaggagcgcggtgagcgtcaccattcggcagatccacatgcagatcgcgagcgcagtgttgtagaagaaatcgttcgccgcgagtcctccgaaggaagacccattgaagttcgaaactgaggagaaggcgaaaaggatctgcgtgaaaccgtgcggacccggtgcggaaaccgcgtcaacgccctgaggcgtgaggcaggcaatggccgtaccgatcagcgtgcagatggaaggcatcagaagcgagacacaaaccatcttcatgtcataggcatcaatccgcttcccgagataccggggcgttttgccgaccagcataccgagaatgaagaccgcgacgatcgcaagcccgagcatcgtgtagagaccggagcgggagccgccgaaaatcacgtcacccacctggatcagccagagcgatacaccgccgccgatcggcatcatcgagtcaaatgacccggcagaggatccggcagcgcttgcggacgaccctgtcgcgaaaagcgacgtgagaagcgtgccgaagcggacttccttcccctccatgttcccgagcccgtgcgatacgccaagctctgtcaccagaggattcgccgtgctttctgaccaggcgatcagcatgaaggccccgataaaaagcaccatcatgccaaagagaattgagaagccggatttcacgtttcccgtcatccggccataggcaaagacaaggcttgccgccatgagcagcatcaggatgatctggatcatgcagaccaccgcggtcggtgcggcaaagggatgagccgaattcgcgctgaaaaagccgcctcccgtgaccgcgagcacccggatcgcttcctggcttgccaccggacccacggcaatcttctgaatcgggccttcgatcgtcttcacgacggtcatcgcgtcaaacgtctgcgtgcagccctgccacacggcaatgattgagcagattacggcgagcggcaggaagagccacagcacgcagcgcaccatgtcttcccaggcgttcccgagcgatggatcgcggctctggatcaggccgcgggcgaaagcaaaggccgccacaacaccggttgaggaactgagaaaggtgagcgtacagaggccgaacgcctgcgagaaaagactcatcacgttctcgcagtcgtatccctgccacgtggtgcttgtggagaaggagaccgccgtattgaaggcgagatcgggggccagccccttgaaattcagcgggttatagggaagatagccctgaaaccggaagatcaagtacccaatcaccgtgcccactacggtgagcgcgatgagcgaaacgcagtactccttccagtccatcggctcacggccggatttcccgagaggccagagaaaaatggactccacccggtacatccaggggaatttctgcgagagcgttccgtcgaaaaccgcgctcatgtagatcccgatcggcacgctcagcgtgaaaatcacagcaaagagcccgacgagaagcaaaaccgcggacgtggtattcattcttctctccggttaatccagaagttccgcgttgaaaagcacgacgatcaggtagacgagagccagtcccgccgcaatgcctgccatccagtacacccagctcggatcgccatacatgattaatgctcccggtatttctggcagagcttcacgaaccctgccgcaataagaacgagaaggaccaaaagtccggcaaagaacaggtcttcgagcctcatctcttttctcctttgaatgccgaaagccggcgcgtcaggcgccggcatccggggatcggggtcaggcccctttccaatgaaagtcgcttattttatcaagcctttgatcctgcacaagcgtcagaaatctgaccgcaggtccaagtcccggaatgacggcatcaggccggatttcatgaagcggctcaaggacaaagcgccgctcatgcattctcgggtgcggcaccacgagttccggcggctcatcaatcgggctgtcaccgaaaagctcgatatcgagatcgatcgtccggggggcgttatgaacgcccgcggggcggacgcgtccgagatcaagctcaattttctgcatcgcgtgaagcaggtccttcgccggaatcgtcaccgcgagcaccgccgcggcattcgtgtagtcaggacccgtcgcgtcgatcggagccgtacggtagagactgcttacccgctcgacacgaacccccggcaccttgtcgagccgcctcagcgcctctccgagcgcctcttcggggttcccgagattcgcccccaggccgatcacggcctccgtttcgtgcgccatggatcagccctcctgaatatcaggatctcgctgcgtgcggcgggggggacgcttctgaggcgtcagtttgcggtctgaaggcgccgggacgaagaatccgatcggcgcctcgggcgccgccggacggcggcggcgtgaccggcggcggccgcggccgccgtgtgagtcatcctcatactcttcgtcgcgcggcttcggaccctggcccggaaccggattcagagcgagatcacccgacgtcggatctttcttcgggcggcggctgcgcttcttggagcccgcgccgcgcgcttccttctccgcctgctcaatcatctcgtggcggcccgcttcatccgcctcatagaagttcttccaccactcgacaacctcgaccggcacttcaccgttctggctccggagcagcatgaagtcgtaggccgcgcggtacttcggatggttcacctgagcgaacggcatcttgccgaagcggcgctcgaaccggtactgcagcatccagatcatctggatatcggccatgtaacggcgctgaatcacgagcttttcgcactgtgtcttcagcaccacatcgcatgcctcgtagagcgcctgggcgcggctcttgcccttcttctcgaaggactcccagcggcgcagcgtctggggccagaggagcgtggcaaagaggaacgcgggagaggtcttcttccccgcgttgatccgctcatccgtacgctcgagcgcgagcatcatgaatttttcgcccgcggactccgtattcatcatgtcgagcaccggcagaagcccgtgatgcagcccttccttccggaacgcctcaacgcaggccacggcgtggccgctcgtgaggagcttgatgatttcgtcaaaaagacgcgcgtccggcacattcttcaggagataggccatcttcggaatcggacggcgggtcgactcatcgatccggaaaccgagcttcgcggcgatgcggaccgcgcgcatcatgcggaccggatcctcgcggtagcgctcctcagggtccccgatgatcctcaggcacttgtccttcagatcctcgtagccgttgtgatagtcgagcacttcctgcgtcgacggatcgtagtagagggcgttgatcgtgaagtcacggcgcgccgcgtcttcccacatttcgccgaagatgttgtcggaaatcacgcggcccgcggcgtcctttctcacgccttcggtatccagcgaacggaacgtggcgcactcaatcacttcacgtccgaaaatcacgtgcaccagacggaaacgccggccgatgatgatggcgcgcttctggcaggccttcacctcttccggcgtcgcgtccgtcgcgacgtcaaaatccttcggcttgacgccaagcagcatgtcgcgcacggcgccgcccaccacataagccttgaagccgcggcgctgaagcgcttcacaggtccggatcgcctgccaggcgacgagctccggccggatcccatgcactgaggcgggaatgatccggggagtcttctgaataactccgccggcggaaccgccaaggagactttttactttacgcacaaatttctgcaaaacagccattttgaataatttttattaagcatctatcttctggcggtcacccgggagggcttctagccgcaaccggtccccctgaagtcagtcggtcaccattttaggagcggactcctcacgcacagcggtgttccttggaggaaaacactgacgcagcagagtacgggtgatcttttttgaagctccgagcgcaaagcgctccacttcgaagagcgcttcggaaagcgttcccatatcgcggggaaggtgttccagcatccactgacgcgcgtcatcgggcagatcaatccggctctcttcagcgagttttctgagcgccgcatctttctgctcatcggtgagcggatgcacctgaaacacgagtccccaggaaagacgtgaaatcacgtccggccttcccttcatctgaagcggcggaagatctcctgccgtaatcagacggtactgcccgaacgggccgccgtcagaatgactgcgcacgtcgttcatcagttcaaagagtttctgctgagaatcctctcccagctcctcaacatcatccacggtataaatcaggcggctctcggaaaaagcgggaacccgctcgacgccggccagaggatccatggcatggagcaagtgcgtgcagccgaccccggtctcgccccacagatacagaaactgagggccggagccggtttccgccatcgtacgcagcacggacaccagttccgcgttgtctccgacagcgaaattatcgaggctcggcgcaggtctaatctgcaagttcagagtgagctgctcttgttccatgaatgaatatccgggggacgcagggcaaaaactacccctccgtctgaggatgcatcgaataaaatctcttagaatgagggtaatgcgataaacggaagtttagcgcgcccaccttttctcatgtttctttgagacatttctactcatgactcaactctcctatgatgcagccggcgtttccattgataacggagacgaactggttgagcgcatcaagccctttgccaagcgtactctgatcccgggcgttctcggttccatcggcggcttcggcgcacttttcgaaatcagcaaggaatacaaggaacccgtcctcgtgtccggcactgacggcgtcggcacgaagctgatgctcgccttcaagctgaaccgtcacgatacggtcggtcaggatctggtggcgatgagcgtgaatgacgttctggtgcagggtgcgaagaacgtcttcttcctcgactacttctcctgcggcaagctggatgtcagcatcgcggagcgtgtcgtgaagggcgtcgctcacggctgcgaactcgctggctgcgctctgatcggcggcgaaaccgctgaaatgccgggcatgtatccggaaggcgagtatgacctcgcgggcttcgcggtcggcgtggttgagaagagccagattattgacggaagcaaggtgaagcccggtgacgtggttctcggtcttgcctcctccggcccccacagcaacggcttctccctcatccgcaagatcgttgaggtgagcggtgcctcctgggatatgccgtttgacggcgcgacgcttgccgaccgtctgatggagccgacccgcatttactgcaagcaggtcgcgaacgtgatgaagaaggtgccgatccacgcgatggcccacatcacgggcggcggtctcgtggaaaatgtgccgcgcgttctgcctgaaggcacgcaggtcgtgattcaccgcgactcctggaagcgtccggcgattttcgactggctgcagaaggaaggcaatgtggccgaagacgaaatgctccgcgtcttcaataacggtatcggtctcgttgtgatcgttccggctgaagccgctgacgccgctgtctctgcctttgaatctgaaggcgaaaaggtttatcgtctaggtgaagtggtcaatcgcgcaaacgcagctgatcctggctgtgtcgtgatctgacgaagtaaagacggtctgctgttcgccctcaggccgcctcgcagaaaaggtcggaacttattcctcggttccggccttttttcatgcccggacgacaggcctccgcagatcccagtcaagcgacagcgcataggccttcgcgtcccggagccccgactcggtatagggatcaaacgcccggatctcatccttcatggagcgaagccacgtgatctgacgcttcgcgagctgccgcgtcgcggcaatcgccttatcgcggaacaccgcgtagtcggtttcgcctgccagatactcgagcgcctggcggtacccgacagagcgcatcgcgggggactcccggtcaaaccccggaagcccggtgagacgcttcatttcgtcgagaaacccggcttcaagcatcgcgtcaaaccgctcggcaatcttcgcgtggagcgccgcgcggtcttcaggaagcagcgcgatcgcagcaatccggaagggaggagccgaatgcggctgctccgcgattatcgcggacatcggccgcccggtcatccggtaaacctcaatcgcgcggctgatccgctgccggtcattcggtttcaggcgcgccgcggtctcgggatccactttggcgagctcttcccgcatcgcgggccaccccttttcctctccttccgctgtcaccgcttcccgcaccgcagggtccgtcgccggtagctcggcaagcccgtgaagcagcgcgttcgcgtagagcatcgtgccgcccacgaggatcggcagcgcgccgcgggaccggatttccgggatgagcttcacgcagtcctccgtaaagtccgcgacgttatacggttcaccgatatcgcggatatcaatcaggtggtgcggcacaccgccccgctctgcttcagtaggcttggcggtcccgatatccatcccgcggtaaacgagcgctgaatccaccgaaatcacttcggccggaagctcggacgcgatggagagtgacagcgccgttttgccgcttgcggtcggcccgagaatcatcaaggcgtcaaaagccatcagcgccccctcaggaaaagccggtcaaggtcgtcaagcgacatctgaatccacgtcggacgcccgtgattgcactcatccgcgcggtctgtcttctccatttcgcggagcagcgcgttcatttcatcaaggttcagaatgcggtgggcacggattgcgccgtggcacgccatggtggaaagaatttcgttccgatgcttctcaagcacctgcgtcccgccaaactcccggaagtcatccagaatgtcgcggataagctgcggtccctcgtgctcaatatccgcggcgatcacagccggaacggtacggagcgtgagatgctcgggagacgccgctccgacatcgagcccgaggctctgaagctcggcctcatgctcctcgaacgccgccatctcaagcggattcacggaaaaaacaagaggaatcagaagctgctgcgtcgggatgcgggaggcatccatctgacgcttcagtttttcgtagcagatccgttcgtgggccgcgtgcatatcaacaatcacaaggccctcgcggttttcggcgagcacataaatgccgccgacctgcgcgagcgcgcgcccgagcgggaacggattttcgtctgtcggaatcgggacaccctccggcacctcaacgccgcccgtatggccggccggcgtgctgacggagagaggcgctgccgcgggagcagctgccgtcggtgatgcgggttcaggagcgctgccagatgcttcaggagcagaggctggcggctgaggctccgtatgagccggcgcggctcccgtatcaaagagcttcagataggcggatccggggagcggcggtttcttccggtcccagctcagcgtttcaccgcggctctgctgaccgtaccccggtctcgggcggctttcaaagacgttatcccggttctgaggtgcggatgaatggctgaaaagcggcttctgagggatggcccccggactcacaccgccagtcacctcagccttcacgccggccgcagcgccgccagaaagcccggaaggcgcggagccgcttgaaatcgccggggcgagcgccgcctccaccgcatggaatacaaactgatgcacccgctgtccctcgcggaagcggacctcactctttgtcggatgcacattcacgtcgacctgcatggggtcaacgtcaaggaaaaggcagaaggaaggctgcgcgccgttataaagcacgtcgctgtacccctgcttcaccgcgtgcagcagcgtcttatccttcacgcagcggccgttcacgaagaagaactgcgcgtcactcttctgacgcgcagcggtcggtgtcccaacccagccggttacggtgagcccaggggccgacgcgtagacttcgcgcgacgcgtccgcgaattccttcgggagaatcatgttcgcgcgttcccgcggcgcctgggcggggagcgcgtgaattacgcggccgttcgccatgaagcgcatatcaacatcggggtgggaaagcgccgcgtgctcaaactgccggagacagtgcgcggtttccgtcgcttcggacttcaggaatttccgtcttgccggggtcttgaagaagagatccaccacttcgatctgtgtgccctggctgccggccgcgggcatcacgccatcctcgctgatcgaccaggcgtgatcctcgtccgccgtacggctgatcagggtgaggcccgcgacagaggcgatggaagcgagtgcctcaccccggaacccgaggcttcggacactctcaagctcaatcagattccggatcttgctcgtcgcgtggcgcttcagcgcgagcggcagctcttccttcggaatgccgcagccgttatccgtcacggatatgcgtctgagaccgccgccctcgatccggacctcaatccgggtcgcaccggcgtcaagcgcgttttcgacaagctccttcacgactgacgcggggcgctcaaccacctcgcctgccgcaatctggctgatcagctggtccgggagctcggcgatcgaacgcctcgctgccggcttctcttccttctcgatttcttccattcacactccgcggatcatgtatttagccgatttccctacactaggtccaatgatggaacccgcctcagttgttatgatagggaatttccggtactactatctgccagcggctaaaaagcaaattcctctatggacttgagcgtcatacttcagctattcaccaacatggatgcattcctggtcaatctggcctcgaattacggaatgatgatctatgtggtgatgttcctcatcttctatctggaaacgggcgtcttcgtcttttccttccttccgggagactcgctcctattcgtggccggcacggtggctgccgccggtacaacgagccccttcggactgatgctcgccgtgatcatcggtgccatcgtcgggaacactcaggcctattcattcggccgctggttcggccagaaaatttacacgaagaacttcctcttcctgaagcaggataagctcatgcgggcgaaggtcttctatgacaagcatggcggaaagaccgtgttcctcggccgtttcgtgccgatcatccgcgcgttcgttccgatcatcgcgggcgccgcgagcatgaagtcactccggtttgagttctattcgatgacaggcgccgtcgcctgggcggtcggcctgatcggcgccggatatcttttcggcaacatcccgatcgtgagaaataacctcaccgtgatccttctgatcggtgtggcgggtgccttctcaggccccatcatcatcgcctggatcctccggatgctgcatgcgagggatgcccgaaagggagtcccggtcacgctgccgaaggactgagaccgaaaggtctttcctctccacacccggaaataagaaaacggagctgaatcagaattcagctccgtttttcatgccgcttatctgaagcggtcagactcagtcgtccgcgcgggcttcaagagccgccacagcgggaagcgtcttgccttcgaggaactcgaggaacgcgccgccgccggtcgaaatataggacacacggtccgcgatgccgaactgcttcacagcggacacggtgtcgccgccgcccgcgatcgagaacgcgccgtcatcggtcgccgcggcgatggaggcagcaagagccttcgtaccgcccgcgaacggttccatttcaaagacaccgaccgggccgttccagacgatcgtcttcgcggcgcgcacttcacggtcgagttcctcacgggacttcgggccgatatcgagaatcatctcgtcatctgccacatcgctcacgctgcagacacggaacggaccctcggcagagaacgtcttcgagacgacgacatccaccggaagcggcatcgtggcgtgcttctcttcaagcgtcttcagaacgcggaggcattccggaacgagatcgggctcagcgagcgacttgccgatcgggaaacccttcgcgaggaggaacgtgttcgcgatgccgccgcccacgacgagacggtcaacggtcgaggcaaggtgattcagaatcgtgagcttcgtggagaccttggagccggcaacgatcgccatcagcggatgacgggcttcctcaacagctgcggtcagcgcttcgatctcacgggccagcagcggacccgcgcaggcgcacttcgcgaagtgcgccacgccttccgtcgtcgcctcagcgcggtgagacgtgccgaacgcgtcattcacgtagacatcgcagagcgccgcgtacttgcgggcgaggtcttcgttgttcttcttttcgccgacattgaagcggcagttttcgagcatcacaacgtgacccggttcaaccgtgacaccatccacccagttgcgcacgagcggcatttcggtgccaaggagctcggagaggcggtcagccacgtggatcaggctctcagcttcggtcggaacgccttccttcgggcggccgaggtggctcaccaccatcaccgcggcaccggccctcagcgccatctggatcgccggaacagacgccgtgaggcgggtctcgtccgtgatgcggcccgattcatcgtgaggggcgttcagatcgcttctgatcagcacccgttttcccgaaagctttccggcgtcagccagttcctgcagtgtcttaacccgcatgtatcactccgtacaaatggttgttttaacggctgaggtcttcatcccgcctcagccggcgcacatattctaaagtgaagaacggctttttcaagaaaaaagttatcggtcttttccggcgtgccaccgtccggtatccggcgcctccgatgcccccgtttcctttacggactcctgccactgagtgcggggcctgatgactgcggcgcacaccgcgcggagcagcaccacatcatcctccgtcagagaggcgcggctgaagatcgtccgaagccggtccatgatcttccgatgatccccctctcttgtcattccgacatgaatcagcgctttttcaagatgcgagatgaaccccgcaacatccgacgctgaagcgggttcccccgccttgaaccgaagctcccagggaagaaggtcagacgccttcccctccgtctctctcagcgcttcccgcacctcatacgcgcagacctggaccgcctgcgcgaggttaaggctcggcatttcggagtcagccggaatcgccgcgatcgcgtggcagagcatcacctctttattggacagaccatcccgctcagtgccgaaaacaaacgcgatgtcgcccggggcggaatcccccgcggtctcagagagcagcgcggcggacgacgccgcagcggtccggagcggatagatcttcggcccgaactcgtggttatagcccgagagcgcccaggcgtagcggacgccttccagcgcttcagcaagcgacgcggtctcgcggctctccgaaagcacatcctccgcctgagtcgagagcctcaccgcgtccggatcatgccggtagtccttcacccggggattcgatatccagagctgacggaaccccatcgtcttgatcgcgcgggcagccgcgccgatattcgccggaatgctcggatccgccagaatgaagcgcacgcggtccgccttgaaacccagatccatctttctccacccgaaaaaaaacggaggctgccgaaaaaaccggaagcctccatattgccttcagaaaattttctgccggcggattacttggcgagcgccatcgcgcgggccgtgtcgatcatacggcaggagaagccccactcgttgtcgtaccaggagccgaccttcacgaagttcgacttgccttcgatcaccttggtgaacgtggcgtcaaacgtggaggattcgtgcgtgtggttgtagtcgtgagacacgagcttctcttcggtgtaagcgagaacgccgtgataggccggatcctgagcggcagccttcatgatctcgttcacttcttccacggtcgtttcacggccagcggtgaagcagaggtcaacgaacgacacattcatcgtcgggacgcgcatcgacacaccgtcgagacggccggcgagttccggcagcacgaggccgatcgccttggcggcaccggtcttcgtcgggatgatggaggaaacggcggaacgggcgcggcgcatatccttgtggaacacgtcaaccagcacctggtcattcgtgaaggagtgaatcgtggtcatcaggccgcgttcaatgccgagcgagctattaagagccttcgcgatcggggcgaggcagttcgtcgtgcaggagccgttcgacacgatcttcatgtcggaggtcagcacatcatcattcacgccgtacacaacggtcgcgtcgcagtccgtgccaggagcggagatcagcaccttcttcgcaccgctctcaaggtgataggcagccttttcacgcgtacggaaagcgcccgtgcattcgagcaccacgtccacgtcgcaggaagcccagtcgatctcgtgcggatcacgggtggagaacatcttgatcttgtcgccgtcgaccgcgaagtcctgaccgtcgaggatctcaaccttggaagcgaaacggccgtgggtcgtgtcgtagcgcagcaggtgcgcgttggtttcgaggtcaccgagagtgttgatcgcaacaacctgcacatcatcccagcgcttttcttcgtagagggcgcggagaacgcagcggccgatgcggccaaaaccgttaatggcaagacgaatagtcatctgtagggtcctttaaaaatcgttttctcagtgaaggaggtccttgacgcgggcaacgccgttttcaaccgtcagaccgaagagcggccagagcttcgaagccggagccgaggcgccgaactgatcgatgccgagcgacgcgccgttgccgcgggtgtacttgtaccagagttccgtgctgcccgcctcgatcgtgagaacggggagaccagccgggagaacgctctcgcggtaagcggcgtcctgggcgtcgaaccgctccgtgcagggcatggagacgagacgcacagcgataccttcctcagcgagcttctcctggatcgcgctgccgagtgacacttccgtgccggtcgcgacgatcacagccttcgggctttcagcgtcggtgagaatatacccgccttttcggatcaggtcagccttggcacctgcctgatgcaggaacggaacgctctgacgcgagaagatgagggcgctcgggccgttcttcttttcaaaggcgcagccccaggcgacagcggcttccaccgtatcgcacggacgccagacatccagccccggaatcaggcggaggctcgcggtctgctcaatcggctgatgcgtcgggccgtcttcgccgacaccgatcgagtcatgcgtgtaaacgaagatcgaacggatctgcatcagggcggccatgcggatggcgttcttcgcgtagtcagagaacgtgaggaacgtggcgccgaacgggatgaagccgccgtaaagcgcaatgccattcataatcgcggacatgccgaattcgcggacgccgtaggaaatatggcggccagcgaggttatcggtgccgaacgcggtgacgccttcccagttcgtgaggttggagctcgtgaggtcagccgagccgccgagcgtctcggggagcttcgggcagatcgcgctcagagccttctggctcgccttgcgggtcgcgaccgattcagcggccttctcggcagcttccacggcctgagcgaccgtttccgcgtagttcgcgggaaggtcacccgcgatgcggcgcttcagttcagaggcgagttccggatacgcggcagcgtagccgtcaaacatcttctggtaatcggcttcgagcttctcacccgtcgcgcgggcgtcgaacgcgtcatacacgtcctgcggaatctcaaacgggccgtactcccagccgagcgccttcttcgccgcagcgatttcctcgtcgccgagcggagcgccgtgcaccttggaggtgccctggaacttcggggagcccttgccgatcgtcgtcttgcagataatgagggtcggcttttcgctctgggattcggcttcattgatcgcctggtccaccgcgtcgatgctgtggccgtcgatcgggccgatcacgttccagccataggcttcgaaacgctttctcgtatcgtcaccgaaccagcccttcacgttgccgtcgatcgaaatgccgttgtcgtcatagaaagcgacgagcttgccgagctgccagacaccggcgagcgagcacgcttcgtggctcacgccttccatgaggcagccgtcgccgaggaacacatacgtgcggttattgatcacggggaagccggggcggttgaattcagcggcgagcatcttctcggcgagcgccatgccgatgccgttcgcaataccctggccaagcggcccggtgctcgtctcgacccccggggtcacacccacttcagggtgacccggcgtacgggagtgcagctgacggaaggacttcagatcatccatcgaaagatcgtagcccgtgaggtgcagcagcgcgtactggagcatcgagccgtgtccgttcgacagaatgaagcgatcgcggccgagccacttcgggtctttcgggttgtggcggagatggcgggtccacagggcgacagcgatatctgccatgccgaggggcatgccggggtgacccgacttggctttctgaatggaatccatggcaagtgcacggatggcgtttgcgagcttctgcggcgaaacggaagaattcgacattttttccggatgtgtttttaagaagataatgaattggatttaagatgcaggaggaaagctgcaccggcgatacatgcgtaaaaagcatgcagcggttttttcagcccctagattttaatgactttcacggtgaacttaaactctgaatcttcactgtttctgttttgaacaaattcataccgcctttcctatgacgattccccgcttttatgtccccggtccctggacctctgatcggatcacgttccctgaaaaagcctcccaccacgcgatgcgcgtgctccggatgagaaacggggatgaggccgaggtgtttgacggcgagggccggacagccagaggccggacagagttcagcagtgaggggaccgtgctcatcgccgagtcctaccccgagcacggacgcgagtcgccactcttcattacgctcgcgcaggccttcgtgtcgcctgacaagatggagtggatcacggagaaagcggtcgaggccggagcctcccggattgtgtttttcccggccgcccggtcggtcacgaaactttcaggcgataagctcacgaagcgtcttgagaaactccgcgccaccgcggtctctgcctgcgagcagtgcggccggagccggattcctgaaatagagacctttgcctcagctgaagcgatgctttccggactgaacgcggatgcccgcgtgattctcgctccgtcgagcgacccggggctcgcgctcggcgccgcgcggtctgtcgtcttcgcggtcggtcctgaagggggattttctgaggaagagctgacgctcgcggatggcgcaggctggacccgggggcttctcggtccccgagttctccggacagaaaccgcggggcttgtcgcgatcgcctgcgcgaacgccgtgtcgggcgactacgacatcacgggaagccgcgcctgaaaatttcgattgggagcggcagccttggtcagccgccgaaacgggcgcgcgtgatccgggtcagaatcgattcgatcacgccgccaagcgtccagtcccaggcaagcgaaaaggctgctgaaaccgcggacagaatggctgcgccaatcccgaccgggaaatagaagtcaaagaaactccggaccgccggctcaagcgccggagagctgatgctgagatccgtgagatcctcaagaatcagagtcgccgcgtaggaaatcaggaaaggggcgagcgcgagaagcccgatcacgagcagcaccgagaaaaccttcttcacgggacggttcagcgcgatcgtccggtccatcacaaagggccccttatagcggaggctctccttccagagtccgatcacaagaccgataaagaaaagcagcgtgctcagatccagaatcaggatcgtcatgccctcaatggctctgaggagcccgtgcatcgcgagaagcgggaacgtgaggaggaagaccgcaagcgggaaaagcccccagcggaacgctgtgccgacagcgccctttccgccgatcttcgtaaactgccgcgcgacataggcacagagtccgattcccagcgcgaggccgaaagcgacgatgagagtccgaatccacatgatgcgtgcgcccttatgagaccgccgcggctatttttcgcgaatccggtgcaggatctcgtagtcgtccgatgtgtaccagtattcgccgctcgtggcgtagttgttatcgcgaccggccccagcgacaatgcgccgcttgccgagacctttcacgcccggcgtggggacgatatagacacgataatagcctttccgcttgatcggcagttttttgttgccgttgcgataccggatgccgtcgtctttataaggaaaggggccgcccgctttgataagtttcagtttctgctgggcctcaggcggaagctctgcgacggtgacgtcctccgcttctccccagagactgccccagttcccatcctgatcacgcccgttcaccagcacaacggctgcgatggcaatggtggcaatcacggcgattgcgccgacgctgaagagcgccttggatttggtgagcaggctttttaacatattcggattcttttattgacagtcgggcccatccgcctcggaggcggagcgccgagccgtcagcttttgttaaccagactatcggttatcagaagaagatccggaaagccagtccttaaattctgagaaagtgccggaaatccgttcggagatggactccgcgggtttcttcgcgcgcttaagacgaacagcctgattaacgtcgccttccgcggcaaggcggagacggctgtgttcgcgtgtaattttattgccataactgccgtctgtggaactggcgcccacgccgacatagctcttaagcccgcgctgcagggaaccggtgtcgtcgatcatgtcacgcagaagctcggacccgacctgcatattcgtatggatatcaaagatttcgccgccgtgacgctccacccgctgggagtgcgcgttcggcatgatctgcatgagaccgctcgcgccggagcggcgattcttcgcgagaggattgaacgtggattccgcggccgtgatggaaaggagcagcagcggatcgagattattcttgcgcccggcttcaatcgccgcgtcaataatctggctgatacgttctttcggcacctggtaggcgcggctcacataagcgataaggttggccttgaggtcgctcgtcgattcagatgacacctgagccgatgcagcgcccgaggccgctgcacttccacccttcggctccgccgctcccgcagccgcaacagcggtcaccccggcgaccagaacggccgtacggagaaattttgcagaatgatggcggagtgaaaaataaaatgatcggctcaaaagtttcatagcatcttttttacgctctgggcccctcggcggaaaaaagcaaaaacaacactccgccgcgcccaggagacagacccagccgggccttcctcaagcgtttttgtatttaattcgtccttttagggtggaaaattgcgggggcgcaagttccccctgaccactcatttaactgacctagtttaacggattcagagctaacccgttttgcaaattgcaaattttggtgacagaggcggtttctcagcggaagaaaaccgtcgcgagagacaggaaaatcaggaatccgcccgaatctgtcatgaaggtaagaagcaccgatccgcccatcgccggatcgcgtccgagcgccttgagaagcatcggaaccgccacacccacgacagcgccaagcagaatattgagcatcatcgcgaggaacatcacgaacccgagcttcatgccctgagccgtgtcggcgtagagcagccaggcgagcgacccggccaccaggccgcagagaataccgttgcagatcgccaccatcacctcgcggcgcaccacttcaggcgcgttgctttccgtcacctggcccatcgccatggagcggacaaggagcgtgagcgtctgatttccggagttgccggccataccggcgacaatcggcatcagggcggcaagcgccacgaccttttcaatcgtctcatcaaaggcgctgatcacgcgcgaggcgaagaatgccgtgcaaaggttcacaccgagccagagccagcggctcttcgcggtttcccagacactgctgaaaatatcctggtcttcatccagaccgacggcgccgtacgcgtcctcttcgctttcctctcggatcacgtccaccacttcgtcaaccgtgagacggccgacgaggcgccccgtctcatccaccacggcggcggacacgaggtcgtagcgctcgaacgcctgcgcggcgtcacccacatcgtcaagcggcgagagcgtgagcacatccttctgcatcagatcgcgcaccaggctgtcggggtcagaaaccagaatcttggtgagcagcagcgtgcccttgaagtgaccatggcggtccaccacgaacaccttgtcggagtgatccggcagcgaatcaaagcgcctgagatacgcgagcacggcggcaagcgtcgactcctcccgcacggacaccatttcgaagtccatgcgcgacccgacgctgtcctccgggtacgacatagcggcccgcagctgggaccgttcttcaagcgacagggtttcctgcacctcggccgtcacatcgggcggcagatccggcaccaggtcagcgatttcgtcggtgtcgagagtttcaacggcgtcgaccagctcgtcgcggtccatcgcgtcgatcagggtctctcggacgccgtcgttcacttcaatcagaatctcgccgtcccgctcgctctttacgaaattccagagcgcgagtcgctcatcaagaggcagcgcttcgagcacccaggcaatatcggacggatggagtttttcgcagatttcccgaagttcttcagccgcctcaggcgtcaccggagcggcctcggatttctcctcattctctccggactctttcttctggcgtttgttttccggcagatcctcaagccgctcgaagatctgctggacacgcgcgagagcgttgcttgcgtcatcgggatcgcgggtcagagcggactcatggccaggtgtctgatcagcggcggcagcgccctccgccttttcctcttccctgttttcgttcatttctgccatgaaactcggctccgatgctggattacgggcgggatcgcccggaaaagattgtacccgctcaggcactcctttcggaaaaacacttacttcacgacgctttcttttgctgcccgaagcggcgtgtcacccatataggcctgaatacgactggcctttctctggatataagctgaattccggtgtacctgataatacttgggccggggcagtatagcggctaggaacgcggcctgagaacgggatagctgagaggcgctacagccaaagtaatagcgtgacgccgcctcaacgccgaagatcccctctccgaactccgcggtattgagataaacctcaagaatccggctcttaggccagatgtagtcgagaacgagggaaatcaggatttcccggcccttgcggatatagcttttcttatgcgagagaaagacgttcttcacgacctgctgcgtgatcgttgatccgccgccgccctttcccttctcaatatgcttctccatcgcgagttcgagcgcgtcccagtcgacgccgtcgtgatgcagaaatttctgatcctcggacgcgatcaccgcccgcttgatgttattgcccatgcgggcaagtgggatccactgatggcgcagcttcacgccgggcttctcagccttcaggcgcgccgcctcaagcttcatgtaaggcgtcacctccgggttgatccagcgataggcaaccgcctccccgatgatgaaaaggtgccagaggagagctgccgcgacgagcagcagaaaaaccgtcgtgaggatgccgcggcgctttttcacgggcgtcacttcgctgcgcgctcccggataaggcggcggatgagatcgtaggtcttcgaggtatccggacgcgtgcctctccagtcggcatagctttccgcggcctgctcaatcagcatgccgaggccgtcagccactttcttcgcgccgcctttcttcgcgagctccatgaaaggagtgggttccgcgccgtagacgaggtcataggcgagggacacctcggcgaacaccgattcgggaaccgggggcacgatgttggagaggctcgttgaggtcgcgttgatcacgagatcaaagtgttcagccgccgtggcttcatacggaatcgcgtcaacgccgaagacatccgcgagcgtctgagcccgttcgagcgtgcggtttgccaccgcgatccacttggggttctgctcgagaagcgacgggagcagcccgcggacgccgccgcccgctcccagcacaagaatcgaggcattcgtgatattgaagccgaaccgggacgtgatatcggtgacaaagccgatgccatccgtgttgtcgccgagaatcttgttcccgaaaacgagcgtgttcacggcgccgcagcttcgcgcgcgctccgtaagcttatcggcaaacttataggcatcgagcttgaagggcagcgtgatgttgcagcccttgtagccctcatcgaggagctcttccgctttttccgcgaactgaccgataggcacctcgattttctcgtacgagatgttttcccccagttctgccgcgaagctctggtggatttctggagaaaagctgtgctgaatcggattacccagcaccgcgtaacggtcaggctttgtcatttcaacgcactcctttttgccggaatttggggctttgtctgtcgcaaagcccccttttctatctttctagcataagcaggaaaaaagcggaacactcctttttcattacggtgccggagcggcgtcggattccggagcagattcagcggcaggttcggccgcggattccgggctttccgccggggcttcaggcgcgccggcttcggcggctgacgcggcggcttcctcaggcacggcttccggcgcctcttcctcaggctcctcgtcacccagctcctgcacttcgtctctcacttccttaaggcgaacctcgaggacgagcccgatgtagtcaaggccgaggatatcgagcaccaccttcttgccgcgcggcagctccgggagccccggcacgcgctgcgtgaacgggatgccgtcaaagcggacgaggtcacccttcacaacgatgccctcaatctgcttcacattttcctgagcgatccagcgaagcgaccagtagcgctccatccgggtctggaagtccttgtaaagaccgtaaatattctcgaactgcgcgacgatcatgaagaagtcggagtcattccgctcgtagggaggcttctctcccatcacggtcgcgatgatctgctgctgattcacaaggtcaacgtagcggcggagcggtgacgtgcaccaggagtagcgcgccacgccgaggccgtcgtgcgggcctccgaccgtgctcatgcggacgcggcccattctctggctgcggtagatgccggccgtgccgtgctcttcaagccactcgccccagacgctgttcgcgaaaatcatggcctcagccaccacgaggtcgagcggttcgccgcgccggcgtcccttcacgtgaatgatggcgtcttcgccctcaccctccagatcaaagaaccagtcaatctttcccttcacctcagggcgtccccgcacggcctcgcgctccgcctgcaggtgcttcgcgaagtgccagaggtagcggatatcctccgcgtgcggaatcgtgagcgtgccggcctcaaccgcctcttccgacacctgttcatcccactggtcgtaacggaggttgtcgcccatccggatccgctcaagccgcgtatcggttgagagcacactcatcgtctcgtcatccaccatcgcgtaaagcgagaggcagggaacaaggcgcccctcgtcgagcgaatacgccttcacccagttttcagggagcatcgtggtcttaagacccggcgcgtagacggtcgacatacggttccggacgaagagatccatcggatccccgcgctgcatgccgatggaaggcaccgcgatatggataccgatccgggtcttgccgccctccatgtgagtgacggacgtcgcgtcatcgatttcggtcgtgctcgaatcgtcgatcgagaacggcacggcgtcagagaccggaaggtcatctccccggccttcaggcggctgcgggagggtatccgggaagccagcgccctccgggaaattctcggcgtagaacgaatcgacatgccaatgccacggcgacgcgatcgccttcagttcgaggaggagcttaagcggcgtcatgcggcgttcggccgcggcgtcagaaagcgccttccactcgatgctgttcttatccgcgtgaatcaggagcccgatcggatcagcgctgatctcaggcggcacggtgcccgcaacgagctccgcggtgatggccttcttatgctcttcctgcttacgctttctctcaagcgcctcaagcgcccgcttcaggatttcttccggtgccgccttgaagcggccgcggcccttgcggtagaagtagaccggcgactcatagagcttcatcaggaggccggccttcgcgatatttgtttcctcgtccccgaaatactcagccgccagatcctcgtagctgaactcatccttcggtgccacctcccagaggaagctcggatcgagttccgcggcctgcgcctgggccttctccatgaaggcctgaggcgacggctgctcgaagctgaagaagaccttggagcccttcaccttcgtgcgctttccggtcgaaagctccacctgataggttgcgctcgtcgaagaaagtacagacccggccttgaaggagccgttgtcgtcaaaaaaaagattggtcatatgtgttgcagccggaattcagtttgagtcggccggcgaaggcaccgcttcagggcgcgtggcgcagaagtcggttattgccggactgtattggtcaaagttgctgatctgatgatcgccctgcggcaccagtacgcgtttcgctgtctggtattttctgtccgcctcgtgccagtcgaggacttcgtccgcggtggagagcagcacgagatagcgggtaggcattgtaatcgctggagtatccagtctgaggagctgatcagcgtagtcctcagtaatcaccacacggcgctttccgccgtatgtctcctgctcacccagaaaatcccggacaagctcccaggggcgcaccaccgggttcaggagcaccgcgcggcacccggttttctccgcgagccacgtcgcgtaaaacccgccgagactggatcccacaacggtcagctcctctggcggcatccccgccgtaaatctcgcgagcatcgccgctacctgatccggagacatcgtgagatccggagcgaagaaggggatcccacgcctcttatgttcaagcgcgaggattctcccctttttcgagtcaggagaagagagaaagccgtgaagatatatggtcgccatccagtctcagccctcctcccgctcaggatgccttttcgcggagcgcggcgagaagctttccatgcacgccgccgaagcccccgttgctcatcacgagaatgctgtcgccaggcgccgcgtaggctgccgcttcctttacgagaagatcaagatcggtgtaggtgtgagccttatcaccgagcggcgcgagcgcctctgcctcattccagcggacaccggccccggcgtagcagaacacctgatccgcgtcactcagagaccccggaagcgccgcgcgcatggtacccatcttcatcgtgttggagcggggttcaagcaccgcgatgaggcgccccttgccgtagccgatcttcccgcggagcgcggcgatcgtttcgcggatcgcggtcgggtgatgcgcaaaatcgtcgatcaccgtaaccccgtcctcagttcccttcacttcaaggcggcgcttcacgccggagaagctttccatcgcggcgatcgcctcacgcggatccacgccggcgtcgcgagccgcggcgattgcggcaagcgtgttcagctgattgtgacgcccgaggagcgggctcttcagaatgccgaaagactcaccccggaaggccacttcgccattctcggaaatcgtccagccattctccgaatcaaaccgctccacccggctccagcagcccatctcgagcacccggtccagcgtcgcgctctgaccgttcgcgacgatgagcgccttctgcgccatcgtgcgcacgaggtggtggaaactcttctcgatcgcctcgacattctcaaagatgtccgcgtgatcgtattcgaggttattcagaatggcggtgcggggacggtagtgcacaaacttgcttctcttatcgaagaagcaggtgtcgtattcgtcgccctcaatcacaaagtacgggctctcaggcgacagccgcgcgctgtggctgaagttcgacggcacgccgccgatcaggtacccaggagccttgccgcaggcttcaagaatccaggcgagcaccgagctcgtcgtggtcttgccgtgcgtgccggccaccgccatcacgtggcgtccctgcagaatatgttcgctgatccactgcggacccgaggtatacggttccccggcattcagaatcgcttcgagaagcgggttgccgcgcgaaatcgcgttcccgatcacccagagatccggatgaatcgacagctgctcttcgccatacccttcatagagctcaataccgagaccgcgaagctgatcgctcatcggcgggtagacccccgcgtcgcaccccgtgaccttatgccccgcctgaacagcgagctgcgccacgccgcccatgaaagttccgcaaattcctaggatatgtatgtgcattggataacgcctgcatccggccgcgtccggcttcggatgcctcagaaaaaagatgctcatcattgtagcggctgaggcagacccgctaaggcgtctccgctagactagccggggtgaattgtttcagagtgaagcatggatactgaaattgaagaagccgccgcttacgcggcgcggctgattgtggatcagcactgcagctgggcgctcgcccggacaaaactcaccgaggcgttcggcaagcgctgcccgatgccgtcgggagcggatgtggaaaccgccgtgcgggagcatctcagcatcttttatccggatcatccagcgctgctcgccgcgctccgcgcggaggcggccgctgtcatgcgggatctcgctgaggccggcatcacggcctaccttgcgggtcccgtgctgaacggcgcggcgactgatgactccaatatcacgcttgaatgcttcgcggaaagcgggaaggacgcggagctcgcactcctcaatctcaatatcaactgggagccgattgacccgcaggccacgccgtcccttcacccgatggaggcgctcgggtggctgcgccccatccggcggggctccccgctctcacgcctcctccccttcgcgcactcggtcggcgtctctcttgaagtgctgccgctccgggatctcggcgcgaatccaaggaaacgcgccccggatatctatcagaccgatatcgaggcttcaggccgcgcgtcactcgatgaccttctcagcctgctgcgcgacaccgcacatcatccggattaacctatttttgagaatccggggttttctgttctgcgcattgtctcttacaatcgcagtcggagatttttaacgctttttagcgacatttcacggcaaaatagaggttgcccgctttttccgggactcccgcaggacgcgaaaggcactgagaaaagcgaaaaattctgaagtatctctataagttatctactgatgccggttcttgctgcatgacagccactgccggcttgttaagacaaaatcggacggctttcctacccggtaaaagagccagtctgaagcgaaggacattatggatctgagaaaaattaaaaccctgatcgacctcgtgcgcgaaagcggcgttgctgaactcgaggttaatgaaggcgaagatcatctccgtattgtgaacacccacggcaccgcctcgcccctgcccgcaggcaccgtgctcaccgacctttccgcgttttccgctccggccgctgctgttcccgcggttccggccgccgctcccgctccggctgccgcggaagctgccccgcagcccgcagttcctgccggcaagcccgtgacgagcccgatggtcggtacgttctaccgttctccttcgcctgaagcgaagccgtttgtccaggtgggcgacacggtgaagaagggcgacacgctctgcatcatcgaagccatgaagctgctgaacgagattgaagcggaagaagacggcgtgatcaaggaagtcctcgttgaaaacggacagcctgttgaattcggtcagcctctctttattcttggataaaacccatgtttggaaagattcttattgccaacagaggggaaatcgcgctgcgaatccagcgcgcctgccgcgagctcggcattaaaacggtagtcgttcactcgatggcggacgctgacgcgaagtacgtccgcctcgctgacgagagcgtctgcatcggacccgctccctcctctcagtcctacctgaacattcccgcgatcatcgctgcggccgaagtgacggacgcagaggcgatccacccgggctacggcttcctctctgaaaacgcggactttgccgaacgcgttgagcagtcaggatttgccttcatcggaccgcgtcctgagacgatccgcctgatgggcgacaagatccaggcgaagaaagccatgattgaagccggcgtgccctgcgtgccgggcagcgaaggcgctctgccggatgatccggatgagatccgccgcatcgcgcgcgaggtcggctacccctgcttcatcaaggcgagcggtggcggcggtggacgcggcatgcgcgtggtccgcagcgaagccgcgcttatcaactccgtgaaactcacgaagcaggaagcgaaatccgctttcggcaatcctgaggtctacatggagaagttcctcgagaatccgcgtcacatcgaaatccagattctctgcgacaacttcagaaactgcgtttacctcggcgagcgcgactgctcgatgcagcgccgcaaccagaaggtgatggaagagacgccggctcccggcattccgcgccgtctgatcgaccgcctcggcaagcgctgcgtcgaagcctgcaagaagatcggctaccgcggcacgggcacctttgagttcctgtacgaaaacggccagttctacttcatcgaaatgaacacccgagtgcaggttgagcacacggtgaccgaggaagtgacgggcgtcgatattgtcgcggagcagatcaagatcgcggccggcgaacggctcgagctgaagcagcgcgatatccagatcaacggtcacgcgatcgaatgccgaatcaatgctgaggatccgtacaccttcgtgccgtctcccggaaaggtcactgcctggcatctgcccggcggccctggcatccgtatcgatacgcatgtgttcgccggctacaccgtgccgccttactacgactcgcttatcgcgaagctcgtggcgcacggccacacccgcgagcaggctattgcccgtatgagcatcgctctctcggaattcgcggttgaaggcatcaagaccaacatccggcttcaccgcgatatcatggcggacgaaaaagtgcgccagggcggtgtcagcatccactatctggaagagaagctgaagacgcttcattcctgatcggcagtaccccggcatcctaggagaaaaaatgcaggaaattacgctttacgccgaccgcggcaatgctgaagcgatcggcgacatgctgatggaagccggggctagcagctacacgacgcaggacgcagacgcggatacgccgtctgagtcccccctcttcggcgaaccgggtctggaacccaaggtccaggcctggaaccgctcgcttcttactgtcctcgcggacgatggtttcgactggaaaacatcgctcgccgtgatcgaaaaggcgctcgccattgagaagcttgaagtgaagtccgtggaagctgtgcctgatgttgactgggtccgcatcacgcaggctcagtttcagccgatccaggcctcgcacaggctctggattgtgccctcctggtccgaaccgccgtcccctgacgcgctcaatatgaagctcgatccgggcgtcgccttcggcaccggaagccatccgaccacgcatctctgcattcagtggctcgatgagaatctgaagaaaggcgaaaccgttcttgactacggctgcggcaccggcattctcgcgatcgcggccgccatgttcggcgcgggctcggtcgaaggctgtgatatcgatccgctcgcggttgaagcctcccgtttcaacgccgaaaacaacggcgtgaccggaaacttctgccttcctgacgggattcctgccgggaagccttatgatatcgtcatcgccaacatcctctgcaatccgctgatttcgctttctcccacactctgcggccatgtcgccgagggcgggcagctggtgctgtcgggcattctcgatgaccaggtggaccgtatcattgaagcgttccgcaaggcggatcctgccatcacgctctcgcggtggcgttctgaagagggctggaatgtcctcagcgcccggagggcggcttcgctttaaaaggcttcatctctatggctcttgttgttcgctgtcccatctgcggctgcatctatcaggtaactccggaagacctcgaggccgacaacgggcggcttcgctgcggcatctgccagacccggtttgatgcctcggagacgcttcgcaaggtggatgacgacgtgctcgacggtcttctgaaccgccgcggctctgcccccgaaccgagagccgcagagacgccggctgctcagcccgccgcggcgcgccctgcggctttttccgcttctcccgcgtccgaacggtccatgccgaacgacgctcaggaagaaaagcgccccgttttcagccgtctgaattcactttccccgaaactcggctcagtcaccattccgaccgccgtgaaacggggtaatcgtcttttctggccgatcggcgttgctgtcctgattctcgtcattctctggcagctgctgtcgctcttcggccccgtgctcggccgctacgtgccggctgtgctttcagcccgccaggcggtctgcggcgtgattccctgccccggtcccggcagtgaaggcgtgaatcccttcgcggttgagaatttcgccctgaccccgatcacgatggatagctatgagatccatctgacgctcgcgaataacggcgcggagagccttccgcttccggtgcttgaggtgactttcaccgatgaccgcggccttatcgcgatccgccgcctcgtaaagcctgaggaatacgcgggacagggttccggcacgcggcttggcgccgcgaagacgctccctgtacgcttcgccttcacgctttccggcagccaccccgcttcctgcaccgtacgcgcggtgccccagaactgatcgcgctggcggggaaccgcgatggctattctgatttcaggctccgtcgcctatgacagcgtctgctcctacggcggacggttcgatgagatgctgctccccgatgagctttcgcatctcaacctcacctttctcgcggacaccctggaacgctatttcggcggctgcgccggcaatatcgcctgggcaatgaaagccgcgggaggctccccacggcttctcgcgatgctggggaaggatggagccgcttaccgagaccatctggacaaagccgggatcgattcccgcttcgtgaaggacgcaccggatgagtggaccgcccaggcctttattaccacggattctctcggaaaccagctcacgacgtttcacgccggtgcgatggacctcctccaggtgccggaccacgaagcgctttcaggcgtctctgccgcgcatatcgcaccgggcggccttcgctccatggcgtctcagggagagctctatcggaagcttggcatcccctacgtttttgatcccggccaggcgacatcgcagctgtcgcccgcggctctgacggagctctctctcggatccatgctgatctgcgtttccgagtatgaggaaaagctcctcgctgaccgcacagggctcgatagaaaaaagcttgtcacgccttcccgctcgctcctcgtcacacggggaggagaaggatccgtgatttataccgaggagcgggagatccggatcccggccgtacagccgcttcgtatcgcggatccggtgggagccggggacgcctaccgcggaggactccttcggggactggaactcggtctgcccctggaaacctgcggccgcatcggttccaccatcgcgtcctttaagcttgaggcaccgggcggccaggcgtacagcccgactctgagcgacatcgccgcccgctaccaaatggtgtggggcaccccttatcccggataacaatacgccgtccgatcattgctgaaaggacggcgtctttcttaaaactccaactgtttacttcgagtcgatcgggtcgaaagtgagcgtcacttcacccggcatcggcgtacccggcacggtcgggaacttcgggcacttcgcgatagcgcgctccaccgcgctgtcgtagcccgggagcccggagccgcgggtcttatgcggagcaccgatctgatccccggtcggcatcagcctcacgcggtaaaccgcctgatgctggccgcggcggatgccggacggaacgttaaagatgatgttcggacggatacaggccgtcacgcgggcgataaaggccgcttttgcggatcccgagagattctggaactgagccgtacggtcacctgtcggaacgccagcggtcgtctgggaaggctttccgcccgccacacgggcaagctcctggcctctcaccttcgccatcgcgttctgcctcgcggcctgagcgagacgggcagcttcagcctgacggactttctccatctgagccttggcagccgcctgacggcgctgttcatcggcgaccgccttcttcttcgtttcatcagccgcgcgcttcgcgtccgcgatccgcttctgctcttcctgctgagccttcagctgctcagccttctgcttcttcgccttttcctgggccgcaacaatatcggccttccgttcttccgcaagcgactgcttcggagccggagcgggggcaggggcaggagccggtttcggagccggcgcaggcggctcaggcttaggttcaggggctggggtggattccggaggcgggggctccgccgcgccgtcatctcccttcaccggaccgccgtgctcagatgtgccgctggtcgggacagatgcccagagctccgcgtacacctcctcattctgcgtcttccactggaaggcgaagagcagcgcgacgaaaagcgccgcatggatcgcaagcgcgagcagaaaggcctttttcaggtctctcttccggggcgtcgcgccggggcgggcgtccgttgccgtgctggaggaaccaagcttcattttcataagttgctacttcccgccgtcaatctgaagggcgagcccgaccctctcgacattggctttctgaaggttcttcatcacgttgatcacctggtcatacttcacgtcgcggtctgccgagatcacgacaggaacagggttcccgccgctcgccttctcggcatcctgaacgtagctgatgagaccgggcatatcctgcggcgtgagtttcgcgccatccttgatcgcaagcgacccatctgcctgaacgacaacggaaatcactttgtcaggggctttggatgccttcgcaaccgtcggcagattgacaacggaaggttcaacaaacggtgccgacaccataagaatcacgacgagaacaagcatcacgtcgatatacggcacgacgttgatttctgacatcaccttgcggcggctgccttccggccgaagtgaactcatggctctcagctcctctgcctttcgagaatgttcaggaactcctcggtgaaggcgtcaaaccggttgaagagacgaccggtggatgtggcgtagaagttatacgcggccacagctggaatagccgcgaaaaggccgatagcggtagcgacaagcgcttccgcaatgccgggggccaccacggcgagcgacacattggtgagcgtggagaggccggtgaaggcattcatcacgccccagaccgtgccgaacagaccgatgtaaggcgaaaccgaaccgatggaagcaagaatcgagaggccgctctcgagactatccatttcacgctggtagaccgcccgcatggcgcgcttcacgccgtccagcacgtgcgcggaatcaatgccgcggtcctgcagcttcgtgtactcagccatgccggccgcgaaaatcttttcttccggaccgctcttatcgcggcgcatctgagcgccttcaaagagcgagccaagatcggcgccgccccagaaccgcttttcaaaatcttccgttgccttctgggcacgctgcacctggaaccacttctggaaaatcatggtccagctgatcacggagagcgcaaggaggatggtaaggacaatcttcacgacaatagaggcgtgaagaatcagagaaataatggacaagtctgccgaggctgtcatttatgggccttttatccctgtaacagaaacaggagtactgaaatgttccgtgacaaagcaccgaaaataatcggctaaagtataggcggtggcagggacagcgtgtttcggggaaacattaggaaacttttatggagttcagtcttttcagcccgaaagcggctcggtcggcaggacaccgttttcttttgctcacgtccctcggactcgcgctgctcgtctcagcctgcggcccggtgaattcaccgagacccggcaccaatggcagcgaaaatacgctgtactccccgttctccggcagaagcccgaaaaccctggatcccgcggtttcttattcatctgacgaaaccgcctacgtgtacagcatatacgagccaccctatcagtaccattatctgaaaagaccgtatgaggtggtgccgctcacagcggtgtcactcgcggttccccgctatttcgataaagcgggccgcgagctcccgcagaacgcggatccgtctctcattgcggaaagccgctacagcatcccgatccggtccggaatccgtttcgcgccgcatccggctttcgcgaagacctcggacgggaaacccgcctactttgatctcgcccccgaaaaagccgccgcgctgaagagcccgcttgacctcccgctcaaaggcacccgcgagcttacggcagaggactatgtctacgcgatcaagcggatcgcgtcgccgcgcgtcgtcagcccggccttctcaacgctttcctcccacatcatcgggctccgcgaaatgcgggacgccatccggcgagaggatgccgctgagcaccatcctgcgtttcttgatctgcggaagattccattccccgagaatggtgtctcggctcccgacccgcatacgctcgtgatccggatccggggcaagtacccgcagttccaggactggctcacgatgagcttcttcgccccggtcccgtgggaggccgaagcgttctacgcgaatccgggatttaaggagaacagtatcgggctcgcctggtggccggtcggcactggtccctacatgatgacggcgtacgaagaaaaccgacgtcacgtgctctcgaggaatccggattttcacttttccgcctacccctgtgagggagctccgggggatcgtgaaaaagggctgctcgctgactgcggaaagcctctccccttcattgaccgcatcgtttttacgatggaaaaggaagcgattccgctccgcaccaagttccttcagggatactacgacagccccgcgattgaccgctcggatgtcggacaggggttcctcgtcgaagccgcggattcgccggaactcgcgcgcgagtacgccgagaaaaagatccagttcccccgcactgttgacctctcaaacggctacctcggcttcaacatgatggatccggtggtaggcgccggaaagacgcctgaagaggccgcgcgtcaccgcgcgctccgtcaggcgatttcgatcgcgatcgactgggaagaggaaatcgcgattttccagaaggatcaggcgatcccgctcatgggaccgatcccgccgggaatcgatccccggtttaatgagatgaatccggtggtgtaccgcatgaccgcttccggccggccggcgcggcgctctctcgcggacgcccgggcgctcatggtgaaggctggctaccccggcggccgtgacctcagaaccgggcggccgctgacactcgcgctcgacttccagcagtccgcctcggatgcgaagccgcttctcgactggtatcagaagcagttcgcgaagcttggcattcagcttgaaatccgcgcgaccgactacaaccggttccaggacaagatgatccggggatccgatcagatcttcctctggggatggctagctgactatccggatccggaaaacttcctctcgctcctctatgggccgaacgccaaagcggtaaccaagggaagcggggaaaatgccgcgaactaccggtcgcctgaatttgaccggctctttgaccgcatgaagtacctcgacgagggaccggaaaaagatgccgtcgtgcaaaaaatgattcagattgttcaggaggacgccccctggagcttcggctacgcgccgcggtccgcggctgcctaccatcagtgggtggggaacgcgaagccctccgccatggtccggaattcgctgcagtacctgaagctggatacacccctccgggctgagaaaatccgtgagtggaaccagcccgtctggtggccgctcattctcctcgcgctgggaggcgccgcggctgccgcgctcctcatccgcgccgtgaagaaacgctcccggcttgacgccttcggccgcgacaccggaaaggagaaatcatgatccgctacctgctccgccggattgtctacggattcctgatcctgctcggcgtgaatctgctcacctttctcatcttcttcgccgtgaacacgccggacgacatggcgcgcatcgcgatcggcggcaagtatgtatccgccgaagcgatcgcggactggaagcacgtgcatggatacgataagccgctcatctggaacggcagcgcgcccggcacggaaaaagtgacgaagacgattttctgggaacggtctgtgccgctgctccggatggatttcggaacgagcgaccggggccgcagcatcaataaggaaatcgcggaccgcgcgtggccctccctcgcgctcgcgcttccgacatttctgctcggcgtgatcgcaatgacaagtctcgcgctcctcatcgtgctcttcaggcgaacgcggctcgagtccggagggctcgtcggctgcgtcatcctgatgtcgatctcaagcctcttctacatcatcgtggggcagtggcttttcgcgcgcctcatgaaactcgtgccgatctcgggatacgcgaacggctggcacgccgccgtattcctgatccttccggtcgcgatcggggttctctcccgcatggggagcgacacgctcctctaccgcacgatgttcctcgaggagatcggaaaggattacgtgagaacagcgcgcgcgaaaggaatgcccgaatcccggattctcttcctccacgttctccggaatgcgtctctcccgatcatcacgtcgaccgttgccgtgatcccgcttctcttcatggggtcgcttgtcatggaaagcttcttcggcattccaggtctcggcagctacacgatcgacgcaatcaatgatcaggacttttcgattgtccgcgcgatggttttcctcggcaccgcgctctatatcctcggtctgatcctcaccgacattgcttacacggtcgcggatccccgggtgagactgagctaggaggtccgacatgccgcttttcgtctttctgccgactgacgccgtgatgtggctcatcaccgcggtcctgatcgcgtccttcatttacgtgcgccgcagcccccggacccgggaaaaatggagccgggtcttttcccgccccatcccgcaggcgtcctgcgtgattcttctcgtctttttcgttctgggactcgcggactccattcacttcaggccgcagctcgcgtctgccccgggagaatccccggcgtattccgcctccaccgtgtcgctactcgacagcaccgtggggaactggatcgccgggcgcgagcggagctactcctctcccttcgcgattaccgagtttgataaaacctcggctctcgtggacgggaaacccgtccggatcttcgcccacctgaaggggatcacaccggatgcgaaaaccgcgtctgaccgaaaccgcgatgtggcgctccgggcgcttgccgcgctttcggtctgggccctcgtgtcggccgcagcggccgcgctgattctcagccgcacaccggcggtccccggggaaaagcgttccgcgcgtctcagacgggcaatcaggggccgcggagggttcgccgcagccgcatccggcctcatcctcgccgcactccttcttctcttcctctggagcgcctatcacccgttcggcactgataaaacgggaaacgatgttctctatcaggccgtaaagagtctccgcacggcttttgtgctcgggtcactctccacgatcacgatgctcccgtttgccgtgttcttcgggatcgccgcggggttcttccgcggctgggtggatgatgtcgtgcagtacctctatacgacgatcagctcaattccctcggtgcttctgatcgcggccacagcgctcatgattcaggtttttatcgatcagcatccgctgcttctcccgacctcccttgaacggggtgacgcgaagctcttcttcattgccgcgatcatcggtgtcacgggctgggcgtcactcgcgagactccttcgcgccgaaaccatgaagctctcagggctcgacttcattacggcggcccgcgcctgcggtacgccctccggcgtcatcatgcgccggcacattctcccgaatgtgcttcacatcatcctcattgtgtcggtgatcgggttctcggacattgtgctttacgaagcggtgctttcctatatcggggtcggcgtcgatccttcgatgaattcctttggctcgatgatcaacgcggcacggaacgaaatgtcccggacaccgaccgtctggtggaatcttttcgcggccttcatcttcatggtcgccgtggtgctgagcgcgaatctcttcgcctctgcggtccgcgacgcctttgacccgaggtcttacagcgggagcggaaaatgacggacgaaaaaactctccttgaactgcggaaccttgaaatcgaggtggatacgccgcgcgggccgatccgcccggtgagcggcatttcgctcagcatcccgaaagggaaaacgctcgcgctggttggggagtccggctgcggaaaatcgatgaccgcgctttccgtcatgcggctgctgcccgggaacgcccggattctatccggcacggatacgctctcgggtgaggatctttttccggtcccggaaagcgtcatgcaggcggtgcggggccgccggatcggaatgatcttccaggagccctccacgtcgcttaaccccgtgatgacggtcggggatcagattggcgaagtgctctcccggcaccttgggctgaaaggaaaggagaaaaccgaggaagagatcgcctggctccgccgggtcggcattccggaacctgagaaacgcgtgaacgcgttcccgttccagctttccggcgggcagaaacagcgctgcatgatcgcgatggcgcttgccggtgacccggacctcgtgatcgcggatgagccgaccacggcgctcgatgtgacgctgcagaaacagattctcgatctgcttctcagactccaggcggaacgcagtctgtcgcttctcctcatcacgcatgacctcgcggttgtccgcaagatggcgcattacgtcgcgctgatgtacgcgggagaaatcgtggagcaggcgccggcggatgaattcttctctcacccggctcacccttacgcgaagcagcttctcgcggctctcccctcaaccgcccggaaggggaagcttctcgccagcatccccggcaccgtcccggactttctgcagccgatcgaaggctgccggttcgcgccccgctgtctctgggccgtggacgcctgccgtgaggggacgattcctctgaaaccgatctcagacgttcacgcctgcgcctgtatccgtccttactcggaaaagacccggactgacgatgagccgccgcttcccccgaaggccgcgcccggccggacgcttcttgaagcgaaagggctccgcgtctggttcccggaaggacggaaactcttccgcacggataaagactatgttcacgcggtggacgggattgatatcacgctgcgggagaatgagacgctcgcgctggtcggcgaatccggaagcggcaaaaccaccgcgggaaaagccatcctgaggcttctcggaaaggaagcgaaaatctcgggaagcatccggatctgcggtgaggacaccgcttctccgaagggaaagaacctcaaggcgctgcggcaggccgcgcagatcattttccaggatcccttttcgtcgctcgacccccggatgaccgtcggtgagacgcttcttgaagcgcttgaaagcctgcgccctgatatgagccgggaagaaaagtcagagcggatccggggactcctcagccgggtgggactccgggaggatgccctgagacgctatccgcatgagttttcaggcggtcagcggcagcgtatcgctatcgcgagagcgctcgccccggagccgaaactcatcatctgtgatgagcccacttcagcactggatgtctcggttcaggcacagattctgaatctcctcggccgcatccagcgggaaaccggaatcgcgtatctcctcatcacgcataacttcggcgtggtcgaatacatcgccgatcgggtggcggtgatgaggtcggggaaaattgtggaagaggggccgcttgaagacgtgcttcagcaccccgcctccacctatacccgggagctgcttgacgcagtcccgagactcggcggtatttagaagaggtctgactgaccgcccttcgactgcgtgtagccgaagtggcggtaagaggcttcagtcgccacgcggccgcgaggcgtccgctgaatgaagccctgctggatgaggtacggttcgacgacatcctccagcgtatcgcgctcttcgccgaccgcggccgcgaggttatcaataccgacagggccgcctccgaatttctcgataatcgaaagaatgaagcgctgatccatgccgtcaagccccttcgcgtcgacacccagcatccggagtgcgccgtccgcgacgtcccgcgtgatcacgccgccatgcttcacctccgcatagtcacggacacggcgaaggagccggttcgcgatacggggcgtgccgcggcttcgctgcgcgatctcacgggcaccgtcaggctccacctcgacattaagaagcttcgccgaccggcagacaatcttcgaaagttcctcaaccgtatagaactgcagctgattcacaatgccgaaacgggcccggagcgggttcgtaagcatgccggagcgggttgtcgcgccgatcagcgtgaagggcggaagatcgagcttgatcgagcgggcagccggtccctcgccgatcatgatgtcaatctggaaatcttccagcgccgggtaaaggatttcctcgacgacaggagacagacgatgaatttcatcgatgaagaggatgtcccccttctcgagattcgtgagaatggcagcaagatccccggggcgctcaagcacagggcctgaggtctgacggagattcactcccatttcgtttgccacgatgtgggcaagcgtcgttttcccgaggcccggaggcccaaagagcagcagatggtcgagcggctcgccgcggcgctttgccgccgcgatgaagatcgacagctgatcgcgcacaagctcctgaccgacatactcggagagcagtgtcgggcgaagcgcccggtcgacgttttcttcgttcggcgaaacggctgccgccgtcacgatcctttcaacattttccattctttctgtcctgccttatcaagccccggcgtaccgtctcagttccgatagcgaagcgcgatacggatgccttccgcggccgtcgcgtcaggcggaatattgcgggcagccgccgcggcgtcgcgttcgctgtagccgagcgccacgagacccgcgataacatcggcctgaacgctgctcggcgcggtgccctggggacccacggcggcggcttcgagttccggccccagctttcccttcagctcgaggacgagccttgccgcggtcttctttccgatacccggaacacgcgtgaggagatcactctgctcattcgaaacggcggaggccagatcctgcacagacatcccggagaggacagcgagcgcggtcttggagccgataccgctcaccttcacgagcgcctggaaagcggacttctcctcgcgggtcagaaacccgtaaagcagaatcgcgtcctcacgcaccaccatctgcacgtagagcctcacctcacgccccgcgtccggcagattgcagaaggtcgacatcggaacggcaagctcgtagcccacaccgttcacgtcgagcacgatgcccgttgtctgcttctcttcaagctttcccttgaggatcgctatcacggtttatctcctttcatttccgcgacccgggcggcccacgcccggcgggatgatttcgcgccgccgcgcgaagtgaaacgggcgttgcccatcgaggttttggcggccccggtaagcgctgtcatcgcttcagtctgcgcagctgtcagcgcgcaggccatagcgtccgccgcgtccgcctgaggattctcaggcaggctgaagatacggaccatcatcgcctggatctgcggcttctcagcccgccctgaaccggtgaccgcctgcttgatttcggtcggcgtgaattcccgcaccgggagccccgcgaccgcggcgctgcagatcgcggcgcctcgcgcctgaccgagaagcagcgtcgactgcggattcacgttggcaaagactttttcgcacgccgcaatatcagggtgatactcagccgcgagctcctgaatgcagcggaagatgtgggagagccttgaagacagctctcccttaggcacgcggaagacgcccgcggtgatcagcgtaaaactgccggcattcatgtcgatcacgctgaaccccgttttattgagaccagggtcgatcccgagaatcctcattccgcggtttactccttacaggatcagaacggacggccgccgccgaagcccgggaaccctccccccatgccggggaagcggccgccggccatgcggagcagcttcgagagtccgcccttcttcatgcgcttcatcacttcagtcatctgatcgtactgcttcagaagcttattcacttcctgcacagggagccccgcaccggctgcgatgcggcgcttgcggcttgccttgatgagttccgggtgatggcgctcagccggcgtcatcgagtcgatgatgccgatcgtgcggcggatcatgcggtccgcgtcagcgtcagacacattctgcttcgcggccgcttcctgcatcgcggccgggagcttatcgatgaggcttgacatggatcccatgccgcgcatctgaatcatctgctcacggaagtcattcagatcgagacggccggactttctcacgcggtcagcgatcttcttcgccttttcggcgtcgatattcgatgtgacatcgcgcaccagagcgacgatgtcgcccatgccgagaatgcggctcgccatggcttccggattaaacgtatcgaagccgtcgagcttttcgcccgtaccgatgaacttgatcggcttaccggtcacctggcggacagaaagcgccgcgccgccgcgggagtcaccgtccaccttcgtgaggatgatgccggtgagcggcagccggtcgttgaaaacttttgccgtgttgatcgcgtcctggcccaccatcgcgtcgaccacgaagaacgtttcgatcggcttcaggaaggcggacaggtctgacgcttcctgcatcatgcgctcatcaatcgagaggcggcctgccgtatcgacgatcagcacgtcgaagaaatgacgctttgcgtaatcgagcgccgcggctgcaatgtcgagcggcttctgatcagtcgtgctcgggaagaattcagcgccggcctgctcagacaccgtcttcagctgttcgatagccgcagggcggtagacgtcagcggaaaccgtgagaaccttcttcttctgattgcggatcagccagcgggcgagtttgccggcagtcgtcgttttaccggcaccctgaagaccggcgagcaggatgatcgcgggaggcgtgcaggcgagattgatctcgcgctccttctcgggcagatcgccgccgatcacagccgtcagctcacgctgcacgatgctcacgagaacctggcccgggttcaggcttccgaccacttcctcgccgagcgccttttccttgatgcggttcgtgagttcacgcacgaccggcagtgcgacgtcggcctccagcagcgccagcctcacctcgcggagcatctccttcgagttttcttccgtaatgcgggcctgaccccgcatggtcttcacaactttggctaagcgctgggtaagagtatcaagcatttttctgtatgaataatagggtggcccgggagggcatccggcgcagactggttcaatgcgcctgcccgccagagcagagaattagcgtcaggcggcgtcagcgagacgccgcccgtgctgtgtgattttaaagtgttgggagcttaaatagtgagcccgcacgctttaaagaacggaaaggagaccccgcagccgaggatctccggcaccgcgagccggctccagtcgaagaacggacccggatcggtcttccggccaggcgcgatatcgctgtgaccggcaacggcccggatcggatagcggaggatgatcgcccgggcgagctttacgagagccgcgtactgcgcctcttcaaagggacagaaatccgttccctcaatctcgatcccgatcgaaaaatcgttgcagcggctccggccttcaaaggaggaaatgccggcgtgccatccccgcgctgtgcagggaagaaactgcgtcacggttcccgtacgttcaatcaggaagtgagaggcgacatgaaggtcacggagcgactcaaaggtcggatgctcatccactgaaagacggtctgtgaagaatcgctgcacgcatcccgtcccgaactctccgggcggaagcgaaatattgtggatcacgagaaggtcaatcggagaccccgccggacgctcgtccgaatgagtgctcgggcaacggacggcgccctctgcccagccttcatcgctgattctgaaagacggctcgcagccagttttcctcagcatgctcttcttctcagtcgagcctcgcgcacttcttcgagcagtagagtttgccgttcttcacgactccctcattcttcgggaagaacgtgccgcagtgagggcactgcgccatttcgcccgaggaggccacatcacggttccgctcgcgctcttcgagccggcggcgcatctcgcgcagttcttcctccatctgttccttctcacggcgctgcttctggcgggagaaatagactaaggcaacaacaatgatgatgatccacgggagtagtttaatcagacccatttggcactcacttctcagatgagaatgtattcaaggaagaaagcgtatcccagatacgcaatcacataaacgccgcacaggatccagaaccaggcgagagcctttctgccccgccagccgagaatccagtgtcccgcggtcagaatgccgcagagcagccagctcgcccaggtgaggaaggtcttgtgatcgagatggaagagcgtcccataatactgctgcgtcacgagggctcctgttacgagaagtacagaaagcacgaggaacgcggtgagaaggatatagaaaaaaacctgttccatcaccaggattgggggaagcgtggagagaatgccgctctgcgggaccgggtctgacgagaaacggaaccgccggttctggcactccatcagaatcgcctgcacgacatccaccgtaaggagcccgtaggtgaggagcccaagagacagatgcacccggaagagcggcgtccactccgccatttcaatcggttcaccagggaacaccagcggcatcagggcagccaccgccgtgataaacgcgctgacaccgaacaccggtccgacacgcttcaccgcggatacaaacgcgagcaccgtgaatccgagcagcatcgctccggacactgcaggcccgaaaccaaagagcgtctgaccgggggccggaaagatctgtgtcttcagggcaaagccatgcagcaccacagcggcgacgacaataagcagcatccaggtcggcaccttggcgccccgcttcctgagtgaagagagcaccacgccacccgagacgcagtaaatggccgcagcggccagcgacagcaaaattccgttttccatcatgaaaattctttccccgcagagcgtcaggcggtcagaggtgccgcgcggcccggcaggatttcttagtcatgtgggcattttaggcgaaacacgattaatgcccacggtcaaaaggttcccttcaattgtgaatcagttaatatgcaggtacaagagaaaactcgtattgcactaatcctgaatgaatacttttgctcatctactcggttacctcgttgatctgttcacggcactgcttggctcggtgctgctcctgagggcctgggtctacgctcaggctatcccgacagcggatccgatcgcgcgtttctgcatcgcgctgaccgactggctcgtgctgccggtggcgaagaccatgcgcgcgtccggcaagtggcactggccggcgatattgtccgcgttcggtgtcgcgatcctgtcctccatcctctcacgtctccttttcggcattccgatgtcgattctcggactggtggtgtcgcctttcgcactcctgatccgctggggcactgagatggtgctctggggcaccgtgatctgggtggtgctctcctggcttcagtccgcgtcccctgtcacccggacgcttggctacctcgtggacccgttcctgcgacccgcgcgccgcctgattccgatgatcaagggatttgacctctccccgatcctcgttttcattctctgccaggtgattctgatcatcatcaccccgctcgcccgcgggattatctgatcaattcatttcccgcatagcaaaagccggatcactttcgtgacccggcttttttgatgccttcagcttatcaggccttcagcttgctcttgataaaggcaacggcgtcttcaaccttcaccatttccttctgatcaagcgtacggcggttcgcgtattcgatttcgccgttcttcaggccgcggtcaccgaccacgatgcggtgcggaacaccgatcagttcccagtcagcgaacatcggacccggacgcagatcacggtcatcgaggatcacgtcaatcccttcagccgcaagcttgtcatgcagttcgtcgcagaccttctgcacggcttcgcttctcttgtagcccatcgggcagatcgcgaccgtgaacggcgcgatggcgtccggccagatcatgccgcggtcgtcgtggttctgctcaatggctgcgcccgcgacgcgggaaatgccgataccgtagcagcccatttcgagaacgcgggacttgccctcttcgtcgaggtaggtcgcgtgcatcgcttcggaatacttggtgccgaggtagaacacatggcccacttcgataccgcgctgcagcttcagcgtgcccttgccgtccggcgacgggtcgccctcgacgacgttacggagatccgccacttcgggttcgggaagatcacggccgaaattcacgccgcggaggtggaaaccttcctcgttcgcgccgaccacgaagtcgctcatgttgatcacggagcggtccgcgtagatcttcacttccttcggatcgagaccgactgggccgaggtagccgggcttgctgccgaaagccttgaggatttcggcttcagtcgcgaagcggaagccattcttcagctcaggaagcttgccagccttcacttcattcaggctgtgatcaccgcgaagcagaatgaggacgatcttcgcgggaagaacgttcccttcctcgtcgcgctcgtcagaagcgagcaccacggacttaacggacttcgtgagcggcaggccaaggagttccgtcacgagctcgcacttatcgcggcccggggtcggaaccttctgcatttcttccgtcgctgcggcgcgttcgccgccgacctgcacagcctccgcgagttcaatattcgcggcgtactgggaatccgggcagtaagcgatcagatcttcaccagtatcggcgatcacctggaattcattcgagcggttgccgccgatggaacccgtgtcagccgcgaccggacggaacacgagacccgtgcggttgaaaatacggcagtaggcgtcaaacatcgtttcgtagctcttgccggcagcgtcagcatcacggtcgaacgagtaaccgtccttcatgatgaattcacggccgcgcatcacaccgaaacggggacggcgctcatcgcggaacttcgtctgaatctggaagagattcaccggcagctggcgccaggaggtgatttcctgacgggcaatgtccgtgatcacttcttcagaggtcggctgaatcacgaagtcgcgctgatgacgatccttgaaacggagcagttcaggaccgtacttttcccagcggcccgactcaacccagagctcggccggctgcacgatcggcatcaggagttcgaccgctcccgaacggaccatttcctcacggacgatgttctcgatcttgcggatgacgcgaagacccatcggcatgtacgtgtacacaccggcggccagcttcttgatcatgccggcgcggatcatcagctgctggctgacgatgtcggcgtcagcgggcgcttctttcagagtggaaataaaaaattgacgggctttcatgaaaattccgctgttaaaaatagagatttgaattacaaaacgcgagagggacaaccggccgcgaaagattcacgcattctataacgcagccgcctgtgatggaaaccggggtgggagaactcctcgcccggctccgcacaccgtcctagtcgcgcgtaatgacgagattgtctttgtggatcagctcaggctgctcaatgaaaccgaggatcccttcgatctcttcagtatggtgaccggcaatgcggaccgtgtcgctgctcgagtagccggcgaggccccgggcgagctcatcaccctcaggagacagcacagcgatcacatcgccgcgcttgaagtcaccgcgcacttcttttacgcccaccggaagcaggctcgtattgcccttcacgatggcacgcgcagcacccgcatcgaggagcaccgcgccttcaatattgaggtgatccgcgatccaggacttgcgggcgaggatccgcggctgatagcagacgagttcggttccgatcgtctcaccggccgccaggcgctgaagcacccggggctcacgtccatagacgatgacggtcgacgcgcctgactgagcggcgcgcttcgccgcgatcaccttcgtgatcatgccgcccttcgagaaggagcttgcggcgccgccggccatcttttccaaagcgggatctccggcacgggcacggtccacaaagaccgcgtccggattctttctcggatccgccgtgaagagccccttctgatccgtgaggatcacgagagcgtcggcttcaatgaggttcgtcaccacggaacccagggtgtcgttatcacccaccttgatttcgtccgtgacaaccgtgtcgttctcattgatcacgggaacgacgccaagggagagcagcgtgaggagcgcggagcgcgcgttgaggtaacgcgtacggtcagcaagatccgctccggtgaggagaatctgcgcggtctttacgccgcgtttcgcgaattccgtttcgtaagcctgggcaagacccatctggcccacggcagccgcggcctgcagctgtccaacctcagtcggacggcgctcccagccgaggcgtctcacaccttcagcgatggagcctgaagagacgagaaccacctcacggccgagcttctgcacagcggaaagctcttcggcgagattggcgattgccttctcatcgagcccacggccgttatccgtcaacagcgctgtgccgaccttgatgacgatgcgcttcgcatccgcaaccactgatttgatcgctgtcatgccttctcccccaggcaatgaagggggccggaatatccggcccctcagttgttactccgaatcagccttatcgccggctacttcctcagacgcagtttcggcggcgggctcttcagcagcttcatccgtgttggcaaaacgcggattccgctcggcctcagccttgagacgctcggcgcggcgctgttcgtcgaggaactgagcgatcgccatcacgacttccttcgtgccttcacgcgttgccgcggaaatcgcgaagaacggacgtccgtccgggcagagtgcgtcgcgcagcttcttcacgagctcttcgcggtcttcggccggcaccaggtcgagcttattcacgacaacccagcggggcttcgcgagcagcgtgtcactgtacttgccgagttcacgcacgagtgcgtgagccttctcgatcggatcctcaccatcaaacggcatcgcgtcgatgatgtgcaggaggagcttcgtacgctcgaggtgccgcaggaactcgtgaccgagtccggcaccttctgccgcgccttcgataaggcccggaatatcagcgatcacaaagctgttttcctgctcgatacggacaacgccgaggtgaggcgacatcgtggtgaagggatagtccgcgatcttcgggcgggcgttcgacaccgccgtgatgaaggtggacttgcccgcgttcgggtagccgagaagaccgacgtctgcgaggaccttcagttcgagcttgagagaacgcgcctggccgggttcaccgagcgtgaactgacggggagcacggttcgtcgggctcttgaagtggaggttgccgaggccgcccttgccgccagcggcgaccagagcctttttaccgttttcggaaaggtcggcgatcacttcaccggacttttcgtccgtgatgatcgtaccgactggcatgcgaaggatgatgtccttgccagcccggccgtagcagtcggagcccatgccgtgttcgcctgacggcgccacaaactttctcgtaaagcggtagtcaatcagcgtgttgatattctcatcgccgacagcccacaccgagccgcctcgtccgccgtcgccgccgttcgggccgccgcggggaataaatttttcgcgccggaacgaagcggagccattgccgccgttcccgccaattacatcaatagaagcttcatcaataaatttcacagcaagttccgtccttgttgcctgattctttcgtatgggcctgatgccgtccggcaccgatagcccgcttgtggtttcctgcgaggcggatcattccgcccgtattcatttacttaggagcccagccttcgttttcaccttccgagataagtcccggagcggctccttcaacaccagtcttttgagtatatctacaaaccgcatccggctttcctgccgcgcggcgcgatgactctgccgatgtgttttccggcagcttgctgcttaatgggcgatccgaggaggatggctccccggtttctgcccgccccctgccggaaggggctttatttctttccaatcaacaaaaaaaccctgccgcaaaacgacagggctcttgcattcaaagctgccagctgcccaattaggcggccaacgggacaaccttgacgtactggtggttcttgggtcccttgacttcgaactgaaccgtaccagtaacggtagcaaacagcgtgtggtcacggcccatgccgacgttgtcaccggcgtggaagccagtgccgcgctggcgaacaatgatggaaccagcgttgatcacctggctgccgaaaaccttgacgcccatgcgatgagccttggaatcgcgtccgttgcgggtcgagccgccgccctttttatgtgccattttttcctattcctctagaaaaaacttaattaaattaagccgcgatcgtttcgatcttcagctcgacgtagtactgacggtggccagcgctcttcttggagtgcttgcgcttgcggaactggaaaatgcgaaccttatcggcacggccttcggagaccacggaagcggtcacggaagcgccttcaaccgtcggggtgccgaccttcagttccttgccttcgccaacggcgagcacttcggacagggtgaccttgtcgccaaccttgacgtcgccgaggagttcaaccttgagcaggtcgccttcggagacacggtactgcttgccgccggtcttgataattgcgtacatgtaattcctcactgtttcactcagctgctgctgtgaaaccttcttgtatcgggatagcatcggacggtctgtccgctgctgctctagaaatcggttcccttgaaaagggaatcgagcgagttattatcatagattttttatgtaaagtcaaccgctttacgttccgccccctcccgatctgaaaatttaaatgaaaaagttcttgacattttctgaaaacggattattatctgaattcttcgaaccgtttagctcttaaaaacagctattctgcgaagctcggggtgtgactcagcctggtagagtgtcacgttcgggacgtgaaagtcggaggttcgaatcctctcaccccgaccagatttcaaaaaggagatgtcgaaagacatctccttttttcgtttccgcttttacttcctccttttctcctcaatacccgccattacccggagttccgatgctccccggatccgattccgattgcgttaacgtaactaaatagattacaatactggcatattcaccggcggctcgtcgaccttgaagcccggtatcagcggcttcctcgcggaaacgtcggcctcacaatccatcctggagacaccatgccgaaacttgtgctctatgccgcggcagccatcattgcggcggccgcgcttcctcttccctatgggatctatgtcttcattcggatcatcgggacgattgccttcgcatacctcgcctatgaatcctggaggcaggagcatgagctgctcccctgggcgtacggggccgctgccattctcttcaaccccattattccgattcatctcagcaaaacgctctggacggtgattgacctcgcggccgcggcggtcatcttcttttccactgagaagttttcgaaagaggcctgatcatgagatccatcttctccgccattttgacgattctttatatcgggtacggcatcacggcctttgtattcgcctgggacgctgtcagctacttttccggagtgcattcgtttttcggactgacgcttatctggttcctgatcattccggtgctgctgatgattccatttgctccggccgccatgatctgcgccctgatttactatctcgccgccattcggggctggggctacctccttgcgatcatctactgcttcccgtctatcggcctcgtgattctttccatgatcagcggtggcatcggcgcaatctcaggctggctttctgaaaaatttcatcggttctgaaaaccgtctgtcagcgcctcagcattgcgtagaatgaatcgggtaactttttaagaggcttccgccttctcccgcttcatcatgacaaacagcaaaccttgggttctgggactcaccggtggcattgcctccggaaaaacgaccgtatcggactatctcgccagcaaagggtgccttgtcgctgatgcggacgcggaatcccgaagcctcaccgctccgggcggcgcggcaatgccggaaatcgaacggattttcggcgcggacttcatccgcccggacggcgcgatgaaccgcgcgaagatgagggaactcgtattttcaaacgatgccgcccgccggacgcttgaatccatcattcatccgctcgtccggaaagctctgatggaaaagatccggaccggcgccgaaaattccccctacgccgtcatcgcgattccgctttttccttccattcttcagcttcggccgattctcagccggcttctcgtgatcgactgcccgacgccgctccagtgtgagcggctgcggagccgctcaggcttaagccgcgaggagtcgctcgccattatccgggctcagtcccggcgctgggaacggatagaagaagcggacgatgtgattgtgaacgcggggagcctccccgaacttttaagcgcggcggatatccttcaccagcgctatctcagagcggcagaagccgcttgaggaccaattgatatgacagaagaaaagaattccgagaaaccctttaccgtcaagtgcccgacctgcgggaaagaggtcgtctggagcaccgacaatccctaccgcccgttctgctcggaacgctgccggatgatcgacctcggcgagtgggcgagcggaggctaccggattgaaggcgcccccggaagcgcggatcagctcgatccgggtgactttactactgaagagccggacaccggcaaaggccggggaaaccgttaaaactcaagccacacgccctgagctccggactcttccgcggcagccgcttcagacgctgactcagccggaagatacaccgggatttcgtgctcttcgccaagccctgtgactcccttgcggataaaggagaagtccgcgtggttggccgcggcgagcttcacctcggcttcgctccgcgcgaaactcccggtccagccggaatcactgctcacgggcttctcaccctcaacccagataagaccggcaccggcttccttcgcccgtgccacccgggcctcgacatcaccgcccttctgcggaatccaggccgccacgcaggggagttcaatccagcccgcgatcagatcatccatcgggagcagctcaccagcaggaagccgggcccggtgatagaacccgaactgctgatgctccatggaacggggctctcccttccagtcatgacacttccggaagtgaagtctcacgcgggcatgcggatagtcgatcaccttcacaagccacggggttgacgctccgatatccagatccagctcctcgcggagttcacgcgccagcgcttcatgcgcggtttcgccgggctcaaacttcccgcccgggaattcccagtaccccgcgtagggtttgccttcgggccgcgaccccatcaggatcgtgccgtccttacggataagaatgccggcggccacttcgaccgccttccgttccacctgctgctctgccattttttacggaagtcctttcccaagagcgagccgcgacgcggccgcccgtgcaaactgctgcgccacccggccggaacgggatccccgctcaagcgcgaactgcagcgcagaaaaacgcatgtcgtcagaggctgcccgctccgggtcaaccttcagcacggcaagccactttttcacgatatcgagatactcatcctgcgagaacggatagaaggagagccagataccgaaccgctcagagagcgaaagctgctcctcgattgtctccgcgggatgcaggaggccgtcttcatcgaggtggctctccaggttatcgcttgccttttccggcatcagatgacgccggtttgaggtggcataaacgatcacgttgtcgccgcccgcggaaatcgatccgtcgagcacggccttcatcgctttgtagcttccctcacccgcctcaaacgcgaggtcatcgcagaagagaatgaaacgctccggacgctttgaaatgatgcggacaatatccggaagatccatcaggtagtcgcgggtcacttcgatcagccgcagcccctctttccagtacgcggcaagacaggcgtgaatcagagagctcttccccgaccctctcgctccggtgaggagcacgttatttgccggaagccccttcacgaagctctcggtattcgcgaggatgatttctttctgacggtcaacgtggagaatatccgcggcatcaatcgtcgcgatgttttcgacgggctcaagccttccggctgtcatcccgaggtactggcgcctctcccagcggaacgcgggacggctccagtcaacctgatccgcgggcggcggaagaagagacgagatctgcttcgcaagcccaagaagcgactgctcaagttctgtattcatatcaggcccctaaccgaatcagacgctttccgcccgcgcggcatccgagagtcccgcttccagcatggcgtagaaactgtcaacggagaccttcccggcgtcctcgtcttcatgcggcgcgtcaatcagcacgaacgcttccgctccggacgcattgaacgcacggctcgccgcttcgtccgcggcgtcacgggtcagcggcgcgtcggttgccgcaaccacgaggtaccctctcggagtttcaacccggatgacgtcaagcgtcaccggaataaattccacaaagcacttgagagaggacgctgaggcttcgctgccgtcagaggaaaagcggcggatcgcccgaagccatccatcctcagacatttcgtcccgcacttccttgatgcttgacttatcgggtgcgcggccgtcagaggcgaggcagaggagccggtgcttgcggggcttcgcgccctcccccttatcccctctcaggacgcagaaggagtgaagcgacttctccggtctcacaaagggcatgccgcctgaagacttgacccagacgccgcttttctccgggaaccggatacagagcacgtcttccagcgctccgatctccaccttgcggatcggctcaagccccacccgcatcgccttcaccatctcttttgcattcattcgatcgccttccttcccgtccggttcgctcacccgccggacgcctggtttcctgcccggattctctccggctgatactgctgacgataacagaaaaaccgcgcctccgactgaggcgggccgcctcgcgggatcctcttcctccgggcgcaaaaaagcctggccgcggatcactccgcctgaggccaggctttcatttccttatcggaaaacggcgtctgatcagttcagcttaccgtggcagtccttgaatttcttgccggaaccgcacgggcacggatcattgcggccgacaccggcgaaagcgatatcatccaccgtcgcttcctgagcctcaggctcgttttccggcgcggtcagagacgtgaactcagcctgggaagcctgcgcggcatccacctgacgctgggcctcttccgtcgcttcgtgttcagcctcttcagcctcttccggcatctggatctggacctgcatcaggatgcggaccacaccttcacgcgtcagatcaaggagctcctcaaacatcgagaaggcttccttcttgtactcctgcttcggctgcttctgagcgtagccgcgcaggaaaatgccctgacgcagaagatccagagcgctgatgtgctgacgccaggtctgatcgagcacctgcagcagcaccgagcggcagaagccgttccaggcatcggcgcccacgagttcaaccttctcgttatagacgcggtcagcctcgtcgagcaccttctgttcgaggtcttcatccgtacggctctcgtcctcttccatccaggccttggtgtcgaggttcaccgcccactcgctgcgcagcgtggaggtgaggccatcgagatcccactgatcttccaccgtctcggccggcacatactggcggacgaggtcggaatagaagccgtgacgcatttcgcggacgctttccgagagatcctgggagtcgagaatctcgtttctcaccttgtagatctcgtgacgctgatcgttctgaacgtcatcaaactccagcagctgcttacgaatgtcgtagttgcgggcttcgaccttgcgctgagcgttctcgatcatgcgggagagcatcttgctctcgatcgggatgccttcctcgagcttcaggtgcgtcgccatcgccttcatgcggtcgccgccgaagatcttgaggaggttatcctccatcgagaggtagaagcaggtgctgcccgggtcgccctgacggccggaacggccgcggagctggttatcaatacggcgggattcatgacgctcggagccgatgatccgaagaccgccgctcttcaccacctgctcgtgaaccttctgccaggcagccttttcttcgtcaatcttcgccttcttctgctcttcagtcagcgactcgtcatggcggatcgtatccaccaccttcgaaatgctgccgccgagcacaatatcggtaccgcggcctgccatgttcgtggcaatcgtcacagcgcccggacggccggcttcggcaacgatctgggcttcacgctcgtgctgcttcgcgttgaggacgttatgcggaatgccttccttctccatcaggtgactgaggagctcggaattttcaatcgacgtcgtaccgacgaggaccggctcgccgcgcgagtagcagtccttcacgtccttcacgatcgcatcgtacttttccttcgcggtcttgaagaccttatcctgctgatcgacacggatcatcggacggttggtcgggatcacgacggtttccaggccgtaaatgtcctggaattcgtacgcttcggtatcagccgtaccggtcatgccggacagcttgtcatacatacggaagtagttctggaaggtgatggaggccatcgtcatggtctcctgctgcaccttcacgtgttccttcgcttcaacggcctggtgaataccgtcgctccagcggcggcccggcatcagacggcccgtgaattcgtcgacgatgatcacttcgccgttctgcaccacgtattccttgtcgcgctggaagagcgtgtgagccttcagcgcggcaatgaggtgatgcatcagcatgatgttctgcggcgagtagaggctgcggccgttcgtgataagaccgcgctcggtgaagatcttctccaccgtctcgtgaccctggtcagagaggtaaacctggtgctgtttctcatccacccagtagtcgcccggttccttctcgcccttctgacgggtgaggagcgccggaatctgatccatcgcctgatagagttcgatattgtcttcagccggacccgaaatgatgagaggcgttctcgcctcgtcaatcagaatcgagtccacttcgtcgacgatcgcgtagttcagcggacgctgacggcggttcccgggctcgtactccatgttgtcacggagatagtcgaaaccgaattcgttattcgtaccgtaggtgatatcggcggcgtaggcggcgcgcttcacagccggatcctgctcgttcgacagaatcacgccgaccgaaaggccgagccactcatagagctgccccatccacttcgcgtcacggctggcgaggtaatcgttcacggtcaccacgtgcacgcccttgccgggcagcgcgttcaggtaaaccgcgagcgtggcggtcagcgtcttgccttcgccggtgctcatttcagcgatcttgccgtcattcagcaccatgccgccgatcatctgcacatcgaagtggcgcatgccaagcactcgcgtggaggcttcacgcacaaccgcgaaagcttccggcagcaggtcatccagcgtttcgcccttctggagcctgtcgcggaattcttgagtcttcgccttcagttgatcatcggtgagcttcttcagctcaggttccagtttattgatctgggcaacgcgccgacggtacgccttcaccaggcggttatttcggctgccaaaaattttcgtaagaattccgtcaaacatatcgtcccctcggccggactaaaaacggcatgaggtaaattttgaaatcggtagaatttccacccttttgatcaggcttacgccttaagggtacggaaaaagaataaaggattatcgcacatagctattaagaaaaaacgattctccttcagttatcggggatttcgccccgctatactttccctatcaacgtaaatcccaatcggaacgaaccatgaaagaccgcatccgctcgggggccggctttcagcggagcctccgttttctgaattctgacgagcagggaatggattcgctcgagctgaggctcgccgtctcgcggcgcatcctgcccgcgctgaaccgcatctgcgagcgccgttttctccgcatctcgtttacatcccccggccaggtctttgtatcgcctgacggctcggtccgtctgatcgtgaaggatcagtctcaggtctatcagctgaaaaatctgcttccgacccttcaccgcgaagtggagaaagcctgcggcttcccggtgcctgagatcacggtgggcgtaaatccagggcttcacgaatcgctctccagccgggcggaaaccgccaccggcgaccccagaaaagcaaacccggatgccgctgccgccatccgggagaaagcccgcgcgctgcctgaaggcagtgtcacgcggaagtcgcttgaaagtcttgctgaatcgctcgaaaagtaactgtcctgtcagacaattgcgagattcgggcggaaggcgaagtcagccggagccttttccgcttcgctgaacgtcacgatttcccaggcggaggcatccgcaagcagggcccggagcagcttgttattcagagcgtgacccgacttgcaggcgctgtaagccgcgagcatcgggtgaccgagcacgtacaggtcgcccatcgcgtcgagaatcttatgcttcacgaattcgtcgcggctgcgaagcccgtcattattcagaacccggtaatcgtccatcacgacggcgttatcgagtgaaccgccctgggcgagaccgatcgaacggagaaattccacgtcgttcacaaagccgaacgtgcgcgaccgggccacatccttctcataggagtcgtgagcgaagtcgaccttcgtgctctgaatcgtggagtcaatcgccggatggtggaagtcaatggagaattccagactgaagccgaaatgcggctcaagccttgcccactttccttcttccttcacctcaaccgtcttcagaacccgcacaaactgcttcggggcattctgctcaacgataccggccgcgtgaatcaggaaaacgaagctcgccgccgagccatccatcaccggaatctcaggcgcatccacctcgacgaggcagttgtcgatcccaagaccgttgaaggcgctcatcagatgctcgatcgtggacacgcgcgcctgaccgacattcaccgtcgtcgcgagccgcgtgtcattcacgttcgtcgcgacagcaggaatatccacggcaggcgtgaggtccgtccgacggaaaacaataccggtgccggcagcggcaggcttcatcacgagatgaattctgcggccgctgtgcagaccgattccgacggtcgagacagattccctcagcgttctttgcttcagcataaaaagtaccaataagttcaataggcggcagaacttgcattctgccgccggaaaattcaggcgccggctattctagccgcaaaaagggcgatcagtggcgtcccttgttgcgcaggtaagcgggggtctgaagatttcggattgtttcctcgtcgaacgtgccggagaaattccagacgttcggctgggaagcagcagcctgaggcttgggcgcttcagcctggggctgaggagccggagcggcaggcttggcgggcgccgcggcaggtgccgcagccggagtttccagaggctgcgcgccaaaaagcggagccgtctcgccggtcttatgttcaaagtgcggcgcagcggcggccggagctgcttcatgcttcggagcagccggcgtgggatccgccgcgaaatgcggcatctcgggcgccggagcggccttcacgggttccggtgcgcggggcgcgggagcggcggcagcctgaggcgcaggctgagcgggctgcgcaggctggtcagcctgtgccggggaacccgagaaaatgccggtccacatattgtccgggcgcatcccggtctgagccttttcctgctcggtgagcggactgtccataccggtagccaccaccgtcacacggagctcatccccgagactgtcgtcgcgggccgaaccgaagatgacgttggcgcccttcgacacgaagtcgctcaggaccttcatcacctttctcggctcagagagcttcagagagttgctggccgtgacataaacgaggagaccgcgggcaccggtaagatcggaaccttcgagcagcgggctggaaacggcgagcttcgccgcctcttcagcgcggttcggaccagaagccgtggccgaccccatgagggccgtgccatgctcacgcatcaccgtgctgaggtcattgaagtcaacgttgatcagacccggcgtatgaatgatttccgcaatgccgtggcaggccttgtagagcacatcgttcgcggcgttgaagcattcttccatcgtggcgtcttcgccgaattcgtcctcaagacggtcattcagaatgacgatgagggagtcgacgtattccttcagatgggcaatgccttcttcagcgcgctgcttgcgggccgtaccttcataggagaaaggcttcgtcacaacaccaaccgtgagaatgccttcttcctttgcgatcttggcgataaccggagcggcacccgtaccggtgccgccgcccataccggcagtaataaagagcagatgagcgccggacaccgcatcacggattttttcagtggaatcaatagcggccttctcgccaacctgaggattcgccccggcaccgagcccgctttcaccgagctgcagaagcacatgggctttgttcatggcaagagcctgatgatcggtgttggcggcaataaattcaataccgtcagccccctgatccaccatatactggacagcgtttccaccgccgccacccacgccgatcactttgatcaccgtgttgcgcggatccttacccagcatttcaaaactactcattgcccttctccgtgatactgccgaacgggtaacgctgcccaaagccttgtcggcccgcgttaccctcgctgtgtgttgtttcttccgatcttaaaggcgtcgtcagagtttagtatattttgccccattctcggggtttattgcttaataatttccgataaaccagtgcttgatggtcgagaaaaagcccttcctcagacgcttctgacctttttcctcggaatgccggcctttctgctcgatgtgagccgcttctttcaggagcccggcgaccactgaccatgcgggagaattccccgcgccgccgaggctcgcgacaatatccggagctccgatgcggcagttgtgctcaaacacatcttcggcaagtttcaggaaaccttcagtctgagtcacgcccccggtgagcacaatacccgccggaatcatctgatcgaacttggacgactggagccgctccttcacaaaggagaggatttcctcaagccgggcctgcaccacttcggcaagcttctcctgagcgatcacctcaatcgcgtctcccggccgggtattccgacggatatcggagagatccacaacgtcagcgcccgtgaattttgtcggatccgcgctgccgtacttcagcttgattctctcagcctcttcctcattcagctggaaaagcgccgcgatatcatgcgtcaccgcgagaccgcccaccggaataatgtcggtgtaccagggcttgttgccgctgtaaaccgtgacatccaccgtgccggcgccgatatcgatcaggcagacgccgagctctttctccgactccgtcagcaccgcgtcagccgcggcccagaccggaatctgccagtgtttcacctcgacaccgctccgcctcacacagcggaagaggtttgtcgccgtggtcggaagaccgcaggcgagatgcgcggttgcctccagacgcttcccggacattcccacggggttcaggatcccggcctctccatccacagagtacccgaggacctgcatcttcaggactttggcgtctccctggagcgcgaccgcgccggcatgctccgtcgccgcgtcgagctcttcctgcccgatctcagtcccgcgcaccggagtcgcccccgtgttattgaagaatcggagacggggatcctcacaggctgtatagacctctgagatatggagaccggaagtccgctctgcctcatcaaacgccgcccggatggaacctacggcggcattgatgtcgatcacgacaccgtttcggatgccggcagacggcgcggaaccgaggccgcagatcttcacgaccccgtcggaaccgggttcagccacgatcacggctaccttgctgctgcctacatcaagtgctaccagtaaattgttgttgtccataacagatccgcttatacagacggcccctttcgtgtcgttcctgcgcgatccgcgccggcgggtcctgccccggctgccgccgctggcttcgcgctgcccgccgccgtacccggggcagacggctgcgcatcagtcttcggccgctcacgcggcagtgtggctgcaaaggcgttgacgtaacgggcatcgatcgatccgggaggtcctcccatcatgcgcgagacttcctgatagtgcgcggcaaccagttccagcctgtcctgcacgcggctgtcccgcgtattgcgcccgagctcaatcttggtcgacgggatgtcgccgccctcaatcacaacagaccaggagccgcggtccgtgaccgacaggtcccggatcttcgcgccgagtttttccactgtgacggaaagcggtccgtacatctccaccacttcgtgtgccatggcatcaggccccgagaaggacgggagtccctgagcctccggcgtatccagattcttcagggcgaaaatctctcccctatcggaaatcagacgcgttccgccccagatcgcaatggggcggcgcttttcgatttcaaccctgatcgtatcaggccagagccgctcaacctttgcggacgccacccacggcacctcttcaaccgccgcccgcatcggatcgagatccgcgaagaagtagttgccgttcagcttctcccagagcgttttttcgagcgccccgacgttcgtaaaggacgtatcccccgtcacttcaatatggtgaatatcaaagtacggctgatgaacgacgtggcggatgccgagtccggcaagcacgagaaagcagatgagcgcgagaagcccggctccccgtctcacttttccggatgcattggcctgagtcatgacgatccgcctctcttcctgtctcagaccgcgtggtccagacgggcttcagacgccacctggagcacgagctcttcgtacgggataccgaccgcgcgggccgccatcgggacgagagaatgcggcgtcatgccagggttcgtattgatttcaaggagatagaagcggccggaaggctccatcatgagatcgatacggccccagccccgggctccgatcacgcggtaagccttttcaaccgtttccgccatggcgcgcgccgtctcctcggggagatcagcggggcaggcatagcggacttcgttcccctgatacttgttcacgctgttgtagtcgccgttcggcgccatgatttcaatgatgggaagcgctttcgcgtttttcccttcgccgagcacggcgcaggtgaattcacggccgtggatacggcgttcaacgacgaggtcatcctccaccgcaagcgaccggcggatcgcgtcagcaagcgtctcctcagtggcgtcctcaagcttctcaacgccaaaggagctgccgtccttattcggcttcacgacgagactccggccaagacggcggatgatttccgcggcttctgacggagccgacacctgaaaaccttccggcacgggcagccccgcattctcccagagattgcaggttgcctgtttatcgatgccgatcgcgctcgcgagaacgccggaaccggtgtacgggatctgcatccactcgagcacaccctggatcgttccgtcctcgccgccgagaccgtgaagcatattgaaggcgcggtcatagccgccgagcgcgagttcagagagcggctgcttgccggggtcaaacgcctcagcgttcacgccctgggagcggagcgcattcagcaccccggtgccgctcgaaatggaaacctcgcgttcgctcgacttcccgcccatgaggactgcaactttccccagatccttcgccgccatcatgcgcggtctccttcattcttagacagttccgtaaccttcgatgccacgtgtccgatagacccggcaccgagcgtgatcaccacgtcgccgtcccgcaccaccttcaggatagcggccggcacatcgtccacacgctgttcataaatcagatccgcgccgccggcgagccgaatagcacgggcaagcgaccggccgtccgcgccgaagatcggcgcttcacctgccggatacacttccgtcagcaccacaacctgcgcctcatgcgagagcaggtgcacaaaatcctcaaagcagtcgcgggtacgcgtatagcggtgcggctggaaagccaccacaatgcggtgtcccgggaaagcgccgcgcgcggcggccagtgtcgccgccatttcgtgcggatgatgaccgtagtcatccacgaggcggaacgtgccgccgccgttttccgccggcaccggcaggtcaccgtactgggcgaagcgccggccgacacccttgaatgtcaggagacccttctggatcgcgtcatccgacacgccgacaagcgtcgccaccgtgatcgcggcaagcgaattcacgacgttatggacaccggtcagattgagcaccacggggagcggggcgtagcccgggcgaagcaccgtgtacttcatctgaagcccgcaggcttccacgtccaccgccctcacctgagcctcttccgagagaccgtaggaaatcacgcgcttcgtgatctgaggaatgatggagcgggtgttctcatcgtcatagcagagcaccgcgacgccgtagaacggcagccgttcgataaacatcgtgaaggcctgcttcagacgctcgaaatcgtgcccgtaggtgtccatgtggtcctggtcaatattcgtgatgaccgagagcaccggagaaagattgaggaacgaggcgtcagactcgtccgcttccgcgacgaggtactcaccggttccgaggcgggcgttcgtgccggcctgcatcagcttgccgccgatcacaaatgtcggatcaaggccgcccgccgtaatcagcgtcgtcgtaagcgacgtcgtcgtagtcttgccgtgcgtgccggcaatcgcgatgccctttctgaggcgcatcagttccgcgagcatcacggcgcgcggaacgaccgggatatgctgggcgcgggcttccaccacttcggggttctcttcatgaactgcggaggaaatcacaactgcgtcggctccggcgacgtgagacgcgtcgtggccgagccagatcgtcgcgcccatctcagcaagatgccgcgtcgtatcgctttcagcgatatccgacccggtcacgtgatagccgagattcatcatcacttcggcaatgccgctcatgccaacaccgccgataccgacgaaatgcacgttcttaacaacaaatttccaggccatcaggacaccctaaaagtacggtccgcacgggactcgatcatatcggccacagctgaggccgcattggaatgagacagttttctcgcggcttccgccatggagagcagctgcgcgcggtcgatcgacgcgagcacggcggaaagccgctccggcgtgagcgtatcctgccggaggcagcgcgaagcaccgttctgctccataaagagagcgttctgcagctggtgagacgtcgtcttcacaacgagcggcacaagaagagaagcagcgcccgctgagcagatttcggacacactcgtcgcgccggcgcggcagagcacaaggtcagaccacgtataggccgccgccatgtcttcaatgaaaggctgcaccgcggcctcgactccggcttcggcgtagagcgccttcacctcatcgaccgctttgaagccgcactgatgaattatctcaggtctcgaatccgagggcagcagggagatagccttcgggagcaggtggttcaggaaccgggcgccaagcgacccgccgaaaaccagcaggcgcagcctgccgccgcggcccgcgaaacgctcagacggaggatcaatcttcgtgatttcctgccggaccggatttccggtgacaaccgcctttttgccgccccgctccgccgcttcgccctcaaacccgcaggccagcgcgtcaataaagggcagcaccaggcgcaccgagagcaggctcgccgcgtcacagttcatcaccaccgccgggatccccatgcggtgagccgcaatcgcggacggcacagcgatatagccgccggtcgaaaagaacgccgtcgcgcggcgcttctgcagaatcgctttcgcggcaggaaacgccttcgcgagcttcaccgctccggaaaccgctcccgcgagaccatgcccgcggacgccggaaaagtccacggcgtcaaattcgattcccttcttcgacaccagcatcttttccatgccggcctccgtcccgagccaggaaacctcccagccccgggcaatcatttccgccgcaaccgcaagccccggcatcacatgtccgccggtacccgcagccgcaatcaccagatgtttgtccgatcccatttctttcctaaaatcccttcaacaagcacgcagacgccggcgtccgccgcatcagacgtagccgccgtgcatctggacccggttctcgtgatccacccgcagcagcagcgcaattccgcagagcgtcgcgacgatggcagatccgccgtagctcatgagaggaagcgtaaggcccttggtcggcatcaggcccgtggccaccgccacgttgatgcagacctggactccgatccagatgccgataccctgcgcaaccagacccgaaaaaatgttgtccatcttaaccgcaatacggccgatttcaaacgcactccggataagtctgtagtaaaggaatagcacaatcacgacgcccacaaaaccgagctcttcgccgatcacggcaaaaatgaagtccgtgtgcgcttccggcaggtagttaagtttttcaaccgacgcaccgagacccgcgccgaaaatttcgccgcggccgaacgcgatgagggaatgtgagagctgataggccttgccgagcacgttctcttcattccagggatccaggtacgcggtcacgcggccgagtcgccacggtgtcgcgataatcatgccgacacccatcgtgataaccatcgatcccacgacaccgagaatcacgtacgagatgccgcccaggaacagaattcccatgatgatcgcgagcaccaccactgtcgcgccaaggtcaggctgcagcgcgagaagcgctgtgacgatacccatcacagcaagcatcgggatgaagcccttccggaaagagtgcatgtactcctgccgcgtcacggtgaaccacgacgtgaagatgacagcggcgagctttgtcacctctgacacctgaagattgaataccgggaaccggatccatcgccttgagccattcacgctgacaccgatccccggcaccagcacgagaatgagaagaatcaccgagataatgccgatcggcttcgccatcttttcccagacccgcatcggaacgtggtacacgaagaacgccgctatggcgccgaccacaagggccgcgatgtggcggatcagaaagtaagtggatgttgtgccgtacttcggcgagtcggcaagcgacaccgaggccgagtagaccatgaccgtgccgatgccgatcagtatgcacaccgtcgcgatcaccacccagtcaaaatcgagtgatgatccgcggtagtttgagcccggacggggcgccttcacttccttcggatagatgacctcaaacgcgagcgggtccgaatcactcttcttccgatggaatcgctgccggagtttatctagcacttggagacagcctcctcggcgatcttcgcggcttcgctgcggaacacttcagcgcgcacggcatagttcgggaacatatcccagctcgcgcaggcaggtgaaagcatcacggcgtcgccaggctttgccatcgcgaacgccttccgggtcgcctcttcaacggttgccgcggattcaagcggaacgccggacgaacggatcgcgtcagcgatctttcctccgtcccgcccataggtcaccgcgccgcgggcataggtccggatcgcgggttccagcggaccgaagtcctgcccctttccgtcgccgcccagcagcacaacgatcttctgaccggcttctccgagtcctttaaggccggctgcggtcgcgccgacatccgtgcccttcgagtcatcgataaagtcgacacccgacgcggtgagaacaaactgcgtgcggtgcggctcaccctcataatgcgcgagcacctgaagagccttcccttcagcggcgccggccgcgcgggcgagcgcgaggctcgtgagcgcgttcatggcgttatggacgccgcggatcttaagcgcgcccgcgggcatcaggtactgaagccgtacgccgtcgtcagcggcttccgccgtggcaagccacttcacgccgtcacgctccgcgatcccccattcacccggcgctttcggagcgtcgctcccgaaggtttccgttttttcacccggaagcgcgctgccagccgaaagcggatcctcgcggttcagcaccgcgagtgtctcaggcttcaggatccggcgcttcgcgttcagataagcgtcgaaatttccgtgccagtcaatatggtcctcggtgacattcgtgatcgccgcggcgtcgcagaaaaggctctccgtcgtctgaagctggaagcttgagagttcaagcacccaggcgtcgggaagggtccctgccttatcgtgctcggtgagctccgtcacggcgttcgggccaatgttgcctgcagccaccgcgctcacgccgcccgcgttcagcatcttcgcggtgagtgaggtcgtggtcgtctttccgtttgtgccggtgatgccgatcaccttcgggtgatagcccttctcctcccggagacgggcaagctcgcgtgcgaaaagctcaatttcgccaaccacttcgactccgagtctcttcgcttcggagacgattggcgcggcgtcagagaattcaggggaaagccccggagaaatcatgacaagcgacgtgccttcgaccgcagcaggatcgagcgcaccgcccgtgaacgaaatctcaggatgttccttcagccgggcgaggagcgaaggctccctgcgggtatccatcacacggacgctccatccacgctccgccagataaagggcggacgcgtatcccgacgttcccagaccgagaaccagtgcctttttgctttccattttctttctccaccgccgcagcccggcaggcatcagcggattttaagcgtggcgagtccgacaagaaccagaatcatcgtgatgatccagaaacgggtcaccacctgcgtttcgctccagcccttcagttcgaagtggtgatggatcggcgccataaggaagatccgcttgccatgcgtgcgcttgtagtacgtggtctggatcatgacggagagcgtctccaccacgaagacaccgcccatgatggcgagcacgagttcctgacgcacgatcacagcgatgacgccaagcgcgccgccgagcgcgagcgcgccgacgtcacccatgaagacctcagccgggtggcagttgaaccacaggaaggcgagacccgccccagccatcgcgccgcagaacaccacaagttctccggctcccggaatgtagtggaagaggaggtaggacgcgaagtccgggcggcccacgcagtaggcgaagatgccaagcgccgaacccaccattacgcaggggagcaccgcaaggccatccaggccgtcagtgagattcacggcgttactcgtccccacgagaacgaagtacgtgaggatgatgaagccgagcatgccgaacgggaacgaaatctgacggaagaacgggatcgtgaagtcgagtttcccgctcaccgggagcgtgaatccggaccggacccactcccacatcagggagaaggtcgaggtgtcagccggcgcctgaatggcgaacgacagatacaccgcgacgatgatgccgatcagggactgccagccgaacttctcgcgggcgctcatgccgtgcgggtcgtggttcacgaccttgcggtaatcgtccgcccagccgatccagccgtaaccgagggtcaccaggagcaccacccagatatagcggtttgagagatccacccagagcagcgtggaaatcgcgatcgaggcaagaatcaggatgccgcccatcgtcggagtcccatccttcttcaggtgggacttcgggccgtccgtacggaccgcctgtccgaaatgcagcttcttcagctcccggatcgtgaagggcccgaaagcgagcccgatcacgagagcggtgagcgccgcgagcacggcgcgcagcgacaggtagtcaaaaacggcaaatgcccggacgtacccggacagccagtgaaacagagacaaaagcatttttttattccgaaactgcagcgtctgaaagggcctctaggacagccttcaccacacggtcaaagtgcatgaagttagaggccttcacgagcaccgtgcccgcctccatcccgcgcaccgtctccgccgcctcgcggcagagggtgtcaaggtccgcataatgccgggcgccgctgccaaacgcgctgcacgcgttctgcatcaggtctccgcaggcgaggagcgtacccacgcccttctccttcgcgtagaggccgatttcctgatggaactcagctccccgggttcccacttcgcccatgtcgcccgcaatcagcacgagcgggccgcggcttgaggtgagaacgtcgattccggctctcatcgagtcggggttcgcattataagtgtcgtcaatgaggagcagttccggacgaagctggtgacggacaccgcgccgcgcgacgggcttgaaagcctgaagcccctggattacggcatcaaacttaacgccggccgagaaggccgcggcagcggccgcagcggcgttatgtccgttatgcgcgccgccgatatcgaggcgggtcatggcgctgccttccgccgcatgaatccggacttcggtcgtgccgccaagcgtcatcacctcagccgtcagatccgcgctcacaccgggctgcgtcgcgtaggtacggcggcggcagtgttcggaggccttttcccagatcggcgcgcaggcgtcatccgccggataaacggcaacgccgtccgcgggaagcgccttgatcgaatccgcattctcttccgccgtcgcttcaacgctcggcaggaattcctgatgctcgcgctgcgcgttcgtgatcacggcgaccgtcgggcggatcatcgcggcaagttccgccatctcaccccggtggctcatgccggactccaccacagcggccttcatgccgtctctcagacgccagagcgtaatcggaacgccgacgctgttattgaagttgccttccgtggagagatatccgtcgcggccataggcctcgcggagaatcgacgcgatcatctgagtcgtcgtggttttgccgttgctgccggaaaccgagatcaccggaattgaaaagcgctgacgccaggccgcggccgattcgcagaacgcctgattcacgtccggcaccacaatctgaaccgcgttgatcccttcgatcaggcgggaaaccatcaccgcggaggcgccgcgcgccgcggcgtcagccgcgaaatccgtgccgtcaaaacgttcgccgcgaagaccgacaaaaagatcacccggttccgtctttctcgcgtccgtgcagacacgggcaattcccgtatcggcatcaccgtggagcaccgcccccttaaccgcctgggcaacccagcccgctgtcgtgatgaacgtcattccgacttctcctctttttcctttgccatgcggctctgaagcgccgcctcaacttcctccgcgtccgagaagtgatgcttcacgccgcagacttcctgataatcctcgtggcccttgccggcaaccagaatgacgtcagcagcgcccgcgcggctgaacacttcctggatagcctctcgccggtcaaccacaatttcaggcgaatgagcgcccgcggccaccgcttccgcgatagtcttcgggtcttcaaaacgggggttatcgctcgtcacaacgagcttgtcggagagtttttccgcgatcgcgcccatgatcggacgcttgcccgggtcgcggttgccgccggcacccacgatcgcccagagcttgccgccgcgggcttccgccacagggcgcagcgtggtgagcgccttctcaatggcgtccggcgtatggcagtagtcgacaacgcccatcggctcatccgggtgcgtgatcttctgaagacggccgggaggaggcgcgaggcgctccgccacacggatcacgtcatccagatcgcggcccgaggcgagcatcatgccgatcgcgccgatcatgttgtccacattgaagagaccgagaacgcccgcttccacgtgacgctcttcgccagcccagcagagcgtgaaggcaatgcccttcgcgccgatctgaacatcgcgcgcctcgagcagctcacagccttcgggcgccttcgtgccgaccgcggtcgccgcgatcacccgcacgcccgcgtcgagcgacacgcggcagagtctgagccccgccggatcatcaatattgatcaccgaacacttgaggccttcccagcggaagagaagcgatttcgcctcttcgtaggcttccatcgtgccgtggtagtcgaggtggtcacgcgtgagattcgtgaagagggcatagctgattgcggtgccgtcaagacgcccctgcaccagaccgatcgagctcgcctcgattgagaatgccttcgcgccgtcgcgatgaagctccgcgagcagcgtctgaagcgtcacgggatccggcgtcgtgagcggcacgctgctgtacgagcggccattcatcgtgcagccaatcgtgccaaggacgccgcagggagtgccgagttccgtgagaatcgacgccatccactggctcgttgtcgtcttgccgttcgtgccggtgacagcaaagccttccatcgcgccggacggattcccatagtagagcgaggcaaagcgtccgagcgacttcgatagcccttcgacttcaagcgccgggatgccttccggaatctcggcgctgccaggagcggcatcgatcagcacagctcccgcgcccttctctgcggctgccttgatgaagttccggccatcgactttcagccccggcacggcaatgaagacatcccctttctcaatgcggcgggaatccagccgcagctcggccccctcaggcacggtttcccgcacccaggcgagggctgaagccaaattggctactgacatgtttttaaatacctttattgctgtttatgtccgccggcaagaacgacaccaggcttggcgccgccctttttcgcgaaggcaagtccctgaagcgtgtcaggcctgtcgggcgccacatgcatgatccggaggacgctttcggtgatctgagagaaaactggtgctgcgacgacgccgcccacgtgccccgcttccctcgggtcgtcaacgacaaccgcgacgatcacacggggattggtagcgggggcaatgccgatgaagtccgccacatagcggtggacatagcggccgttttcaagcttataggccgtaccggtcttgccggcaacggagtagcccggaacctgagcgcgcacagccgtgccgcccacttcaacggtacccatcatcatgccgcgcatttcatgcgcggtcttcggcttatagacctgaaccccctgcgcggccttatccgtcttgaagagcgtgagcggaatcacgtcaccgttccgggcgaacgcggtataggcgcgcacgagctgcacgagcgacacggcgacaccgtgaccgtaagaaatcgtggcctgctcaatcggctgccaggtcttaccgtcacggagaatgccggacgctgcgcccgggaatccgatgtgcggagccgtcccgaaaccaaggtcacggtacatctggtacatcacctcgcggtccatcttgagcgagatcttcgtcgtgccgatgttcgaggacttcgcaatgacctgacgcaccgagatcagaccgtagttatgcgtatcgctgatcgtacggttgccgatcgtgagctttcccggactcgtatcgatcttcgtgtccggcgtgacaacaccggtgtcgataccctttgccacagcgaagggcttcatggcggaacccggttcgaacacgtcggtgagcgcgcggttgcggcgtttgtcaaaggaaaggtcgcttcgctcattcgggtcataggacggcacattcgcgagagcgaggatttcgcctgtctgaatatcgaccacgatcgcggcaccggccttcgctttatgaagctcaaccgccttggagagcgcgtccatcgtaatgaactggaggcgcgaatcgatggaaagcgtgatgtccttgccgtcagagggttccttcagccagtcgtcttcaacgatccggcccatacggtcgcggatcacgcggcgcttgccctgctctccggtgagcatcttgttctgcgcgagctcgatgccttcctggcccttttcctcgagattcgtatagccaaccacgtgtgccgacacctgaccgtccggatactgacggcgggtttcgctcgacacatggacacccgggatcttgagcgccttcacctgattggcgacgctcacttcaacctggcggtgcagataggcaaagctcttattctgttttctggcaatccgctgctggatttcggaaaccggcatgccgagaagcttcccaagctctgcgagctgctgcggggtggccttctcagtttccgcgggcaccacccagacagaacgggccggcatcgtggacgcgagaacaataccgttccggtccagaatccggccgcggaccgccggcacggtgagcgtgcgggcaaagcggatttccccctggtgctgcaggaatttcgttccaaggccgcactgcagatagaaggcgcggcccacgagaacgcagaggaaagctgtgatgcagccaaacgctatataagagcgcttcggctcaatcttcaccgcaaggagcggatcctcatcgggtccaagcttcagctccttcttctttgctttcccgtcctcttcccaaaacgcttttgcacgggcgagcatctgaagcttcatgcgttctattctttttttcgcatcctcattcattgctcattccccttcggcgccgcagcagacggcaccggcttatattcgagaacgaccgtgttccggctcgtcgcgggtccgagtcctgccttcatcgcctgagaggcgatgtaacccggaagcgccgcgcgggagatctccatatagagttcgctcgcgtcatcgttcagccgcctttcttcgttctgcagcttctcaatctgggcgacaagcgaccgtgcacggtactggcttgtgacaagcgagcaggcactgatgaaaagcactgcggcgcctgccagcgtcacaacggtaagaactgaaagacggctttcgctcatttcctcatctcctcaggcagcaggctgctgctccagggagccgccgtcctaacgccaacccggagcgtcgcggagcgcgctctcggattttcagcgcattcggcctcagtcggcctgatgcgcttcgcgggctgaaaaagcggagccggaagttcgtccgcccggagcggaatcctcggatcaatttcacgtccggggttcgaagcgtccgaaaagaactgcttcacgatccggtcctcgagcgaatggaaactgatcaccgcgagatgcccctcgggctcaagcagccgcccggcctcggggagcgccttctgcagttcgtcgagctctccattaataaagatccggatcgcctggaaggttctcgttgccggatgctgctgcgagtcgccgcgacttctcggcaccgtcttcgcgacgagatcggccagatgccgcgtcgtcgtgatcggattctccttccgttcctcagcgattgccttcgcgatgcggcgggcgaaacgttcttcgccgtaccggtcgattacccgggtgatctcggactccgacgctctcgcgagccactgcgcggcgttttctcccgtgctcgtatccatccgcatatcaagcggaccgtcgaaccggaaagagaacccgcgctgcgcgtcatcgatctgcggcgacgacacaccgatatccatcagcacgccgctcacgcttccgtcaccgaacccaagttcggcaagccggtcacaaagctccgagaacggcgcgtggatgatccggaaccgcggatcggtaatcgcgcgggatgcctcaatcgcttcaggatcccggtcaaaagcaatcagcctgccttccggcgcgagctgagccagaattctccgggtgtggcctccgcggccgaaagtcgcgtccacataaaggccatcccgcctccacaccagttcctcaggcgccctgtcggcgagaaccgggaggtgaacgaaaccgccctcttgccccgaactatttgtcatgcccacgcggtaaattccgaaaacatatcgattaatgggaaagctgcaggcgcactgccccgcagccccggattttcggggctacagctacacttcctcagcttaatttcaaaatgtaaagcccccgggggatccggtcaagccaaaacccgttatttcattattagaaagcgggaaaacacggaaaaatgaggcgatctgtctgaatttttttatttcagatcattacggtaggatacagtcagatgtgtccggacataaaaaatcccggagccgctgtaacgcagttccgggacctctcgaataggaggcacgaagtccatcggtaagccggattttgttgcccgggttgccccggtgacagtcattcgtctagacccggtctcgcgaccgggctcaagccacttacccgcagcctcgccggacagggtcagcggctgcctatttagtgttgcttcccgtagagattgcccgtttcacccgaacttgatcggctcgtctctgttgctctaatcctcgcctcgcggcgggcagccgttagctgctacggtgtcctatgaagtccggactttcctcgggcgggacaggtcccgtccacgactgtctgatcggcttcgtgcaggcggtcactatatatagaaaacgatgaagccgcaagacgggcgcttttgaaagtgcgcctattgttgtacattaacgcctaattattctcataaaacaactgcgtctctcttcttctcctatgcttcttaaaagaaaactggcacttgcggccatgctgaccgcatttaccctgcccgcctgggccgatggatttctttccagcgccctctccgctatcaatgaaaccacgcccgcgggtatggtctctcaggacagccgtgaggacggcgtaggcggctggttccgcgaccagggccggggcttctccaatatcgtgaagcagggcaatacggcgattgtgctgccggtttacaccgagcaccccgcctgggactacaacaaccgacaccaggaaaacggcctcacctggggcggcggcattgcccgcacctttgttgacagccgcggaaacgagcgactggcctatgcagtcgcgttctcggactctcactacgaactcgagccttccgtgggctacggctgggtctcgcgctggaatgtcggcagcaccggtcttcatgtcggcgcgggatacctcgccggtctcacgttccgggctgactaccgctggctcccgatccctgccccgctcccgctgctcaacgtcgggacccggaatttcggcgcctatatgacgtacatcccgttctcgaacgtcgccttcttcttcacgacgtttaatctcgatgatcacgccacgcacgaaatgccgctgcagccgggcagcgtctggtacggccggaataacctcctctacgcaggcggctcctgggtccataacgatctcggcgacccggacagcgacaagggccgcgcgacgatgacgtcaaacggcggctggaacgccggtatccgtcactactttgaccgtcactgggcagctgacctcggtgtcatccgctcgaagcacgacacggcctgggacggcgtgaagcagcacgactggaagatgactcaggtgaatctgatggggcagtaccacgcggacgccacaaagaacctccggctcttcgccggcgcgggcattggctacgcgaagcttaagcgcacgggacagtccgaagactctatccatccggtgatcggcgcgggcttcacctgggccttcagccgtgagttccatctcacgggctccatcgttaccgccttcccccgcttcaaggacatcgacgctgtccactgcccgggcgacaccggccgtccggctcccacctcattcaatctttctctcggaaagactttctgacatttcccttcggctcccggcctctcggccgcggagccgggtaactaaaataggggctcttcccggcaagagctttcaggattttccgttaaggcaaaacgacaatgaatcgcaacgacgaactctttgaacgcgcacagatctccatccccggcggcgtgaattccccggtccgggccttccgttcggtcggcggctccccccgcttcatgaaccgggcccagggtccctacatgtgggatgtgaccggcaagcgctacgctgactacatcctctcctgggggccgatgatcctcggccacgggaatccggaagtgctgcgcgccgtgcacgaagcggtcgatgccggtctgacgttcggcaccgcgacggagctcgagatccagatcgcggaggaaatccgccgtctcgttccgtcaattgagtccgtccgtctcgtctcctccggcaccgaagccggcatgagcgcgatccgtctcgcctgcggctacacgggccgcaacaagattatcaagttcgagggctgctaccacggtcactccgaccgtcttctcgtgaaggcgggctccggaatgctcacgttcggtcacccgagctctgccggcgttccggccggcatcacgaacgacacgatcgttcttgaatacaacaaccccgcgcagcttgaggaaaccttcaaggagctcggtgaccagattgccggcgtgatcgttgaagcggtcggcggcaatatgaatatggtgaagggcaccccggaattcatccacgcgatccgcgacctctgcacgaagtacggcgctgtgatgatcgtggacgaagtgatgaccggattccgcgtggcgcttggcggcgctcagtcggtctacggcgtcaccccggatctcacgatgctcggcaaggtggtgggcggcggcatgccggtctccgctttcggcggccgccgcgagatcatgaatcagatcgcgccgctcggcccggtctatcaggccggcactctttccggaaaccctgttgccgtgacggcgggtctcaagaccctgcagctcattcaggagccggggttctacgaccgcatcaccgccacgtcgaagcgcctcactgaaggcctcacgaaggcggctgccgataacggtattccgttcacggcggactactgcggcggcatgttcggtatttacttccttccggaagtcccgcaccgctttgctgacgtgatgaagtctgacgacaagctcttcggccgctggttccaccagatgctcgatgcgggctgctacttcgcgccttctgtcttcgaagccggctttgtttccatcgtccacacggatgaagtgatcgatcagacgatcgccgctgcccgcgacgctttcgcgtcgctccgcgcggcagtctgatcttcggagtttttcccgcatgaaagccccccgactgctcatcggcctcctcgctgcggccacgcttattcagacagccggggcatccggcgcgttcgtgacgggaagcggcgattcgtcacctgcctccggaatctttcaatcctccggggcgggcgctgccccgtcacctctggcccccggccgctcagcggtcaaggcgcggctcattaccgcccagaccgcagcggttccgggaaaaagcctgaagctcgcggttgagctgacgcatgacgccgggtggcacacttactggaagaacccgggggacgtcggttccccgaccgaattccagtggacggttccctcaggctggaaggtcacaggtcccgcctggcctgaacccacggaaacccaggcgctttcactcaccaattacggcatctccggaaaggccctctaccccttcacggcttctgtccctcagaacgcctccggcacggctctcgtccgggtgcacgtttcctgggtcgcctgcaaggagcagtgcgtgccgggggatgccactctggaaacaaagatcccggtagcatcatctgccgccgcgtctcccgaggcccctctgattgaggccgccgcatctcaggtaccggatcctgcgccgaaagacatccgggctgttaaaaacggctcccgggttctgatctcggtgccggggcaccatgttgatatcaccttcttcccggatgcgcccggcacggttttcaagccggatgccggtcccgctatccatcagggagacgcgactgcccgcgcctataccgtttcggttcagcccggatcgaagtttgggcttgtggatggactgcttctcgttgacggcggaaagaaaaacggcggagccacgtatcagcttactgtcaccccggagtcaggctctgtaccggcagccgcagccgccgcggtcacttcaggtggaaccggaaccccggatggcggactgaagcagctcacctttctcaccgccgtgctttttgcggcgctcggcggtctgatccttaacctgatgccctgcgtctttccggtgctctcccttaagatgctggacctcatcggagcctcaaatgacggccggcttatccggcacggtctcgcctttaccgcgggcgtcctcctcaccatgggagcgctttccggaaccctgatcgcgcttcaggccgcaggggcgtcgcttggctggggctttcagcttcagaacccggtgatcgttctcatcctcgcgctcctcttcctcgcgatcacgatgaatctcgcgggtgtgttcgaattcacgctcggcagccgcgcgggcggcaacctcgccctcaaaacaccgacgcgcggcctcctcggaagctttttcaccgggattctcgccgtcattgtcgcgagcccctgtacggctcccttcatgggtgcggcgctcggcttcgcgctctcgcagcccgctgccatcgcggtcacagtgtttctcgcgctggggtttggcatggcgcttccgtggctcctcctcaccatcttccctggctgggtgaagtggctcccgaaacccggggcctggatggagacgctgaagaaagtgatggcgatcccggtcggcctcgccgcggtctggctgctctgggtgctgtcgcagcagctttcccgcaacggtctcatgatcgtggccggtattctggttcttgccgccgtgtcgctctggcttatcggccggggacagcgcctgaagcctttcggcggcctttatccggcaagtttcccggcggccgccgccgcagccctcgtgctctatatcggcgtcggccagttcgcgccggctgccatgagccttgaaggcaccgcgtggcaggcgtggtctcctgaagccgtgcaggccgcccgcaactccggaaagccggttttcatcgacttcaccgccgcctggtgcgtgacgtgtcaggtgaataagaaagcggtaattgacaccgaagacgtggaatccgccgcccggaatctcggctacgcccggttcctcgccgactggaccaacaaggacccggcgatttccgcggaactcgcgcgctaccgtcataacggcgtgccgctctacatcgtgatttcgaagtcgggggccgtgaaggtgctccccgagctcctcaccaaagacacgctgctcagcgcgctgaaggaaggggcgaactagcctcggccgctccgtcggaggcggcgtaattcagcaccgcgtcaagcaccggcttcgcgccgagcgcgttcgggtcattcacgatcgcgctcacagcgtaaagcgtcccggacgccgacctcacgtatcccgcgaccgacctcacgccccggatgtatccggtcttgatgtgcgcgccgccctcttcaagcccccggcgcttcatggtgccgtcgaccccggcgatcggaagcgacgacatgaattccgggctccagggctttttcccggcggccagcagcacgccggtcagctggtcggtcgaaatccgcgcggtgcggctgagccctgagccgttatcaatcaggaagccttctgtcggaatgccctgcgacgccatccattgggtcacggcgtttctcgaggcaagcctcgtcgcgccgcccggtgttcccgccgaaattccgaggaagaggttcctcgcgatcggattgatggaattcttattcatatcccggatcatgaggctgagaggctttgaagtcagcgtgtagagcacctgcgcgccatcaggtgccttccccttcatccactttccggtccagacgccgccgagcgcggtccatccggcccgcatggcctcttcatcaaagatcgccgctcctcccaccacgggccacggcacggcgctccacgaaccttcaccgcacgccatcgggtagctgccgcggaaggaaatccggccgggttcggtttccgggcggagtgtcgcggtcaggttcggggggcagacactttccgcgtaggaaagcggcacgcgaagcggaaagctgtaaccggcgagatccggatcatgcagcaccgccgcagcgctctcgcctggaagcggcacgaagctgaaagtcacggactgaagcgcgagtcccagaggatcgtgcccttggttatagggacggtccgggtgcccgtcaaactccgcggggtctgcttcgggttccgcaaaaaccgaggaatccagcaccacggggcccgtgatcgtgctgacgccaaccgcgcggagagccatgagcgcctcacggaaccgggaggcggggagccacggagcgccggacgcccggatataaagcgcgggaacggttcctcccgtcggaagcgacgccgacagaaactcggttttccagaccttccctgccccgagcagatccatagcggccgcggcggtgacggtcttcatcacagaggctggactccggggaacactcccctcccagcggatcgcggcccgcccttccccgtataccggtgtaagggtgacagagagcgatgaggcgctgattcctgtcgaggagagagcctcattcacttcgggcggcagcccgtctgacgcctgggcggcgcaggccggaaacagaagagttacaaatagacacaaatacgctatcttcatgaataaataaggctttcgccgctccagagagtctatcgcgccgcaggcgtttcttttcagtttaaggccgccccttgaaaaagggccccgttccccccatatagaggataaggcagaggcgggagcccccctccggggaatgctgcgccctgcttttgatttttctgcttatggagagtccttccggtctctccctcatattaagaagcactgtggagattgaaaaatggaaatccgtcctttgcacgaccgtgtgattgtcaagcgcctcgccgctgagcgcaccacttcttccggcatcgtgatccctgaatccgccggcgacaagcccgaccagggcgaagtgatcgcagtcggccccggccgccgtgacgatcagggcaagctgatcccgatgggggtcaaggtcggcgacaaggttctgtttggaaagtactccggccaggccgtcaagatcgaaggcgacgagttcctggtgatgcgtgaagacgacatcatgggcgtcctcgcctgattcagcccccattgataagtgattttggagaatttaagacatggcaaaacaggttttgttcggcaatgacgcccgcaccctgatggttcagggtatcaacactctcgcgaacgccgttaaggtgaccctcggaccgaagggccgcaacgttgttctcgagcgctccttcggcggcccgaccgtcacgaaggacggcgtctctgtcgccaaggaaatcgaactgaaggacaagttcgagaatatgggcgcccagatggtgaaggaagtggcctccaagacttccgacaacgccggtgacggcaccaccaccgctacggttctcgcccaggcgatcgtcgacgaaggcatgaagtacgttgccgccggcatgaacccgatggatctgaagcgcggcatcgacaaggctgtcgccgctgccatcgaagccctgaaggatatttcccgtccgaccaccacgtcgaaggaaatcgcccaggtcggcgccatttccgccaactctgatgaagaaatcggccagatcatcgctgacgcgatggacaaggtcggcaaggaaggcgtgatcaccgttgaagacggcaagtccctgaagaacgagctcgacgtcgtcgaaggcatgcagttcgaccgcggctacctgagcccctacttcatcaacaatccggacaagcaggttgttctcttcgagaacccctacatcctgattcacgacaagaagatcagcaacatccgtgagcttctgccggttctcgagcaggttgccaagtccggtcgtccgctcgtgatcgtcgctgaagacgtcgacggtgaagccctcgccaccctcgtggtgaactccctccgcggcgtgctgaaggttgccgctgtcaaggctccgggcttcggcgatcgccgcaaggccatgcttgaagacatcgccatcctgaccggcggtcaggtgatctcctctgacctcggcctgcagctcgacaagaccacgctccagcagcttggtaccgcgaagaaggttgagatcagcaaggaaaacaccacgatcatcgacggcgctggtgatgctgagcagatcgctgcccgcgtgaagaacatccgcatccagatcgaagccgctacctccgagtacgaccgtgagaagctccaggaacgtgtcgccaagctcgccggcggtgtcgctctgatccgcgtcggtgctgccaccgaagtcgaaatgaaggaaaagaaggcccgtgttgaagacgctctgcacgctacccgcgccgctgttgaagaaggcgttgtggctggcggcggtgtcgctctgatccgtgcgaagcaggctatcgccaaggacctgaagggtgacaacgacgagcagaacgccggtatcaagatcgtgctgcgtgccatggaagagccgctccgtcagatcgtgaagaacgctggcgacgaaccctctgtcgtggtgaacaaggttgctgacggcaacgcgagcttcggctacaacgctcagaccggtgtctacggcgacatgatcgaaatgggcgtgctcgacccgaccaaggtgacccgcaccgctctgcagaacgctgcttctgttgcttccctgatcctcacgaccgactgcatggtcgctgagcttccggaagagaagccgctcccgccggctggcggcatgggcggaatgggcggcatgatgtaatctggtctgcccagacccactcttgaagttctgagagaataagaccggccccggagctcacgctccggggccgttttctgtctgatgtgagattaccggaagggggcatctcgataaagacaccccgccgtgctctcagagatcaaagaccttcttcagatcatccgtcgtcatgccggagtaaatcgcgcggtactcacccttcgcggtccggaaaacgccgaacgggatcgtgcgggtaccgttccggcggacgatcttggagtttgtccagaccttcgcgcggatcttttccggcagcttccacacctctttctgatcaacgggcaggccgcggaacgcggcgtcatggaagtggtcctcatgctcgaggaatttcttccaggggtcagaagccgagagaatcatggagccctgcggctcggaattgatattcagcaccgcgaccgggcaccagatgatgcgcaccttgctgtagagaggcgttgccgcgcgatggagcttctcgcaccacgggcactgcgggtcgaaagcgatgtaggcggtgggcagtccttcggttccaggcgcagtcactccggtgccgtccttcgcgagatcctggtacatcccttccccataccagccttcgggcactttcggccagactttcttcggagcacctgaggcttcagccgcgagggctgcgggagcggccgccgcggcagcgatcgccgcaagcatctgtcgacgtttcattcttcttttctccttgagtccgcgccgatgggaattccggcgcaatgacttaaatatcccacgatccggaagaatctgcctcgcgtcgaggtaacataaggtaatttttctgattcatccgaacttgacgacatgaaattcattgatcagcttgaggcccgctggaccgggtcggacaccatgctctgcgtcggtcttgacccgaatcccgcgagactaccgaagaccgcatccggcgccgctgtcccggtgtacgacttctgccgcgacatcatcgacgcgacagcggacacggtctgcgctttcaagccgcagttcgcttacttcgccgccatgcgggagcttgacgcgctggagcgtctcaccgcgtacattcacgagcgtcacccggggatcccggtgattctcgacgcgaagcgcggcgatatcggctcaactgcccgggcttacgcggtcgaagcgttcgaagtgtacggggcggacgcggtcacgctttccccctacatgggctttgataccgtagagccgtacctcgagtatgaggacaaaggcgtcttccttctctgccgcacgtcgaaccccggcggtgcggatattgagatgctgcaggcgggagaacgcaaggtgttcgagcacgtggccgcgaatgcctctgaacgctggaacacgaatggagaaatgggactggtggtcggtgcgacattccccggggagctcgctgcggtgcggcgtctcgctccgaagctgccgttcctcgttccggggatcggagcccagggcggcgatatcaacgccgcggtccgcgccggcgtcacatcgtccggctggggcatggtgatcagttcaagccgggccgtgatttacgcagggaacggtcctgacttcgctgacgccgcccgcgcgaaagcgattgaaacccgggacgcgatccgggcagcccaggcctctctcaaggcctgatgactgattttcttcaggaagcggaggagccttcgggctcctccgtttttttggcgcctgagagcggaatcgcgagcaccttatcgatgcggcgtccgtccatatcgaccacctcaaacttccagtccgcccagtcgaccgagtcgccttcacgcggcacgcggccgagcagcagcatcaccatgccggaaagcgtgctgtagcgatcctcatcctcttccggcacttctcggatcccaagccggtccttcaggtcaggagtcgaaatgatgccgtcaagaagccaggatccatccgaacggcggatcgcccactgatccccggtgttctcgggcttgaactgccccgcgatcgcttccagcacgtcgcgcggcgtcacaatgccctgcacttcgccgtactcattcacaacgacagagagcggcgtatcggtctttctgaagtgatcgaggagctccatgccggtgagtgtctccggcacataggtgacaggcgtcagcgcgctgttgaagtcgggctgcccggtgtgaagaatctgcttcatcagcatcggggtcgagcagatgccctttaccgtatcaagcgatccatccgcgaccacgagcctcgagcggtgcgagttcagaatcttatcgatcttcacctgctgcggatcgtcgaggttgatccactcgatttcgcttctcggagtcatgagagagctgatctgacggtcatcgaggcggaacacgttcttcaccatatcgcgttcctgaggatcaatgacgcctgactcactcccttcttcgatcatcgcgtggatttcctcttccgtcacctgcggtccgatgacgtttcctttcagcactttcgtgagcatcacgttcgtggaccaggtgaggagattcacaaacggcttcatgatgaaggacaggaactcaagcggccgcaccactttgcgggacgtgtcctcaggagaaatctgacccagacgcttcgggaagagctcgcccatcacgatcgagaagtaggtaatcagcatcacggcgaggaagagggcaaggccggttgccaccgcggaaggcactccgaggtattcaagcgccgtgctgatcgggccggcgagcgccgtctcgccgatcataccggacacgaggccgatgatcgtgatgccgatctgaatcgtggacagcgcggcagtcggattatccatcatgcagagaatcttcttcgccactccgtcaccatcatccgcgctcggctgaagcctggcacggcggcaggcaatcagggccgtctcactcatggtgaaaaagccgttgaggataatgagtgcgcagagcaccagcaaactgattatcgctgtcataaaaggttgagttcttttttaaattcctgcgttatcagggagaataacgcagattatgtgtccttcagagtgaagtttcattaatccgtttaaggagcccggcaagagcctgtctcacagtactctctctcaccgcagcacggtcccccgtgaaatggcacgtttcggattcaatcacaataccagaagccgttctttccgcaaaaccgaagcacaccgtgccgaccggcttatcgggttccgcaccgtccggaccggcaattccggtgacggccacggtataggccgcgtcagaccggtcaagcgcgccctgcgccatcgcggcggccacatcttcagaaaccacgccgcgggaacggatcacgcccatcggaacccccagcatttcgatctttgagcgttcggtataagtgacaaagccacggtcaaaccagccgctcgaaccgggaacggatgtaatggcgtaagaaatgccgcccgccgtgcaggattccgccgttgcgatacgggcaccgtgtttgagcgccgcgcgccccagctcttcagcgagagactcaatgcttttttcttccattctttttatctcctatatcggaatctcagacgagagcgagtcccgtcagacgggcaattgcccaaagagccgcccacgcccagagcgccgcgaagaggtcatccagcatgacgccgaaccccgtatgcagcttccggtcaacgatcgacgcgggcgggagcttaataatgtcaaaaacacggaaagcggcgaatcccgcggccgccgtgaggagacccggcggaatcaccgcgagcagcagccacacggctgccacctcatcaatcacgatggcgcccgcatcctgaacgccaagatcatccccggtgcggccagcggcccagacgccgatcagaaaggcgagcacaccaggaacccagagcagtgaagccggaatcagcgtttcaaagaaaaggaaaacgagtgccgcggcaagcgacccccaggtgccgggccccggtctcaggcatcccgcgccgaaaaagagcgcgatcgcgtgtgatggcgccgaaaaggcaaagcggaaccccggcctcagccggtaggcagggttggaggaagagtatttttcaagcatcgtcagtcatcctccggggatcgcaaggggctgctgtcaggcaaagtgatcgaatccgccgttcttcagaatgacagcggcaccctttgcgtcatagaccgtaagcgacgtgccgtcaccgtcagaaggcagaatttcgcccacacgggtgacaagggtatccgccgcaatgccggcctcgaacaccgcctttctgagcgacggaggagccgtgaaaatcaattcgtaatcgtcgccccccgaaagcgcagcctcacgctgctcctcttcaggaagtgacatcagggcttcggacctcggcacgtcgtcccagctcacgcgggcgcggacgtgggagcgttcaagaatatgggtaaggtcctgggagaatccgtccgagacatcgatcgccgctgtcgcgagcggcagaagcgcccggccgagcgcgttccggggctctgggcggtccatccggcggctcatcagccggacagcttcaggtgccgcggcccagtggccccagcggtacttcagagcggcataggcgtcgccaagcgtaccggacacccagatatcgtctcccggcttcgcgccggctctggtgaggccgagtcccgggggaagatcccccatcgcggtgatcgaaaagacggcaggagaatgttctcccgtcacgggattcttcggcgtacggaccgtatcgcctccaagcagcgcacagccggcttctttcgccagctccatcagcccctcggaaaaggcttcaatccatgcgtcatttttatcgggaagaccgatagagaggaaaaaggcccggggtgtcgcgccggcggccgcaagatccgaaagattcacggcaagcgttttgtagccgacattccgcggatcagcgtccgggaggaaatgcgttcccatcgccagcatgtcaatcgtgacagcgatccggctgtcgccgaaatcgataatcgcgcagtcatccccaattcccttgcagaaccagggccccgccgcagaaccagaagaaaagaaccggtcaataatcgaaaattcgccgctacgctccgccattgatacgcctcattccatactgctggatccggacggaagaacttccgtccggtctttcagacatccggtcaggcagcccggccgcgggccgtttcttccggacgcagatcgcgcgcgaccttgtcgagcacgccgttcacgaacttgtagccgccttcagccgaaccgaagcgcttcgcgagctcaaccatctgatcaagaatcacgaggtacgcggtttcggggtgatagcggagttcggtcgtgccgagcagcagaatcgcatgctccaccgtgctcacctgcttcagcggacggttgaggtactgggagaactcggcttcgagctcttcgcggttcgtgatcgcttcggtcagcagagcgcggaagagctcctgatcgcagtgatcaaattcctcaggcgtcaggtcgcccgcttcggtgtcctcctggttgatcagggagggaacaatcagagcgagcgcttcaggcgagctgagcggattgaccagccactcgtagagaccgagcagcgcgaactgccgggcaaaagcccggtcacggttcgtcgggacccgggcggcttcagtcttgttgctttccgtcatgcttattcgcctgccttttcttcttcgtcttcggcttcttccgtctcgtcatcctcttcgccgtaggcggggaattcagtcgcaaggttcgccatctcaaccgccacctgagcgcaggccttcgccttgccctcaatgcggtcctcgcactgttcgtcgtcttcggtcgtgaggatgccgttcgccaccggaatgttgtagtcgagagcgacgcgggtgatgcccgacgcggactcgttcgcaaccagctcgaagtgataggtctcaccgcggatcacggcgccgaacgcgatcagcgcatcgtattcgccggtctgcgccatctgctgcagcgcaaacgggatctcgagagcgcccggcacatggcagacagtaatgtcctcttccgccacaccaaggcgcttcagctcgccgaggcagtactcatactcgccccgtcctgcatactcgttgaaacgggcgataacgatgccaatgcgaagaccctttccatccaggttctgggggatttcatcgactgccatttctgactccaaaataaaaaatgattcaacgcggcaccggtgtctcaccggtgccgcctatatgcttattctatcgcagggcaggggttttaagcctcagacaccgggcttttgacgactgtcctgctgtgccggcatctcttagagaatgtcgtcgccctcacgcagctccatgttccgctgaacatagcgggcgatcaggtcaacctcgaggttcacgaggctctgcgccttcaggaagtgaagcgtcgtcacttccatcgtgtgcgggatgagattgatcgagaaacggggaccgacagaggtgtcttccacttcgttgatcgtgagggagacgccgttcaccgcgatcgaacccttgtaggcaatgcagggggcgagcttgcgcggggcaaggatcacgagcttatagctctcagccacctgctcaagcgacaccacctgcccgatgccatccacgtggcccgacaccaggtgtccgtccacacggtcgccaaggcgcatggccttttccagattcacggggccaaaggtatcgagtccggcggtcttcgagagcgactcagccgacacatcgatccggaaccagtcgtcgcccttctcaaccaccgtcatgcaggcgccgttcacggcgatcgattcgccgataccgacctgatcaagcccgagatcgggagcggaaatcgtgagccgcacgccgttgccgagcttctcgggttcgcgcactttgccgatcgcctgaataattccagtaaacattagtctttcctctgattgcgtaagtcaaagcacaggtcttcaccgagacgcgacacggagcggtaagcccagcgctcagcctcggcgagacgcttatagggaccgacgctccacatcccgcgcccttctccgatcagaatcggggcggtgtagaccacaatttcatccaccagtcctgcgtcaagcagcgcgccgttcagcgtcgcgccgccttccgcaagaagatcattcacttcacggcgtccgagttcggacaccagggctctgagatcgacccggccgtcacttcccggaagctcgatcacttcagcgccccgcatttccagttccgccttccgcttcggatccgctttcgcgcagacgatcagacagagcccatcctcaccgatcacgcgggccgtaaccggcgtgcggagcgacgaatccaccacaacgcggagcggctggcggatttccgccggatcccgccccggcagcctgacattcagccggcagtcgtccgcgagcaccgtaccgataccggtaaggatcgcgcccgactcggatctgagccgctgcacgtcctggcgcgcggcctctcccgtgatccactggctttcgccattcggaagcgcggtgcggccgtcaatcgacgcccccaccttcagcgtgacccagggcgtgccccgcgtcatccgggtgaagaacccccgattgctttcccaggcctcttcctcaagcacgccgcaggcggtcgggattccagccgcttcgagcatggcaagcccctttccggcgacgagcggattcggatccttcatggcggcgacaacgcgtcccacacggtggttgataagcgccagcgcgcagggcggcgtgcgcccatagtgagagcagggttcaagcgtcacatacaccgtggcgccttcgatattcacaccgcgcctctccgcgtcggtgagcgcttcaatctccgcatggtggccgcccgccttctgcgtgaagccgctcgcgatgatttccccgtccctcacgatcacacagccgaccgccgggttcgggggcgagagcggccttcctttcgcggaaagccgtatcgcctgctccatgaaatagctgtcaggatgctgcatccgtcttctccctcggctcaagcgcctcgcgaaggagctcggcgaacgcctcgggcttctcaacgttgaagtagaccgacgcgaaacggatgtaggcaaccttatcgagctgccgcagctcatcgagcacaaactgcccgacgcggtcgctcttcacctcgcgttcgcccagcgccatcagacgctgctcaatgcggcccaccgcctcgtccaccttctcacgcgggaccgggcgcttgcggagcgcgagcgtcatcgatgcccgcagcttgtcgcgcgtatattcggttctcgcgccgccccgcttgatgatggtcggcatagcaagctccacgcgctcataagtcgtgaaacgcttgccgcacttcgggcacttacggcgccgccgaatcgtccagccttcttccgaagaccgggaatcaataacctgagtatctggactgtgacagaaagggcatcgcatgataaacctcaggcaggcggtcctcagaacggggccggcctgccggaaaaagcaggcagccttcctttctgacgggggctgcctgcctgtgtgctgctacaaagaagcgccgtatcagcgggcgtagaccgggaaggccttcgtcagcttggcaacctcagccttcacgtgctcgagcacctcggcatcttccggatgatccagcagctcggcgatcagatcagccacttcacgcacctgctcttccttgaagccgcgggtggtcatggcggcggtgccgagacggataccggaggtcacaaagggcttctcggggtcgttcgggatcgcgttcttgttggcggtcatgtggccggactcgagcagagcctgagcggccttgcccgtgatgtgcttcgggcggaggtcaaccagcatcacgtggctttcggtgcggccggaaacgatacgcagacccttcttcgtaagttcgtcagccatggcggcggcgttcttcacgacctgggcgccccaggccttgtattcgggggtcagggcttcgccgagagcgatcgccttggcggcgatcacgtgcatcagggggccgccctggatgccagggaagacggccgagttgatcttcttctcaagctcaggcttgcagaagatcacgccgccgcgcgggccgcgcagcgtcttatgggtggtcgtggtcacgatatcggcgtaggggaacgggctcgggtagacaccggccgcaatgatgccggcgtagtgagccatatccaccatcaggtaagcgccgacgctgtgagcgatatcagcgaaacgcttgaaatcgatgcggagcgagaaagcggaagcgccgcagatgatgatcttcggcttgttttccttcgcgagacgctcgacctcttcgtagtcgatgtcttcatcggcattcaggccgtacggcacgcagcggaagtacttgccggagaagttgaggtgcatgccgtgggagaggtggccgcccgcgtcaagagacatacccatgaagcagtcgcccggctccatcagcgcgaactgcacagccatgttggcctgagcgccggagtgcggctgcacgttcacggccatctcgacaccagccggctcgcagaacagcttcttcgcgcgttcctgagcaatgcgctcaacgacgtcgacgttctcgcagccgccgtagtagcgcttgcccggatagccttcagcatacttgttggtcagctgggagccctgagcagccataactgcgggggaagtgtagttttccgacgcgataagttcgatgtagtcttcctggcggttgttctccgcttcgatagcggcccaaacctcagggtcttcggctgcgatggagatcggctgatacataagtgttgccctcacttaaaaaaataaaaaattcttcccccgaccccgattcgaggtcaaacaggaaagaatatcaatcaagtctgtagattataggagaagaacggctgccgtctgaagcggattccgtctcttccatcaattctttggcgcagcgggaagccggagccagatcgtgacgggaccgtcattcgtgagcgagacttccatgtgggcgccgaacatgcctgtctcgacggggatgccctcggctctgagcgcttcggtgtactcctcataaagcgcgcgcccgagttcaggatccgcggccggcgtgaagctcggccgtgttccggaccgggtatcggctgcgagcgtgaactgtgaaacgacaagcgcctcacccttcacgtcagccagactccggttcatcttccccgcctcatcctcaaagatccgcagccgggcggtcttcgacgcgagacgcttcgcgagatccagggtgtcccccttctccgcgcagaaaagcacgagatacccccggccgcaccagccgacggtttcacccgccacccggacttcggcctgggacactctctgaagaagcgcgatcatcgggcagccgttacttgacggaaaccttggcccacttgcgcttgccgacctgaacaatgaagttcatgccggaggtgatcttcatcgtgcgatcggtcaccttgtcgccgccgatcttcacgccgccctgatcaatgttgcggttgccttcggaggcggaggcgacaagaccggcttccttcagaagcttgccgagcggaatcgagccgccctcagccaccacggtgacttccggaatgtcttccggcatttcaccggacttgaagcggcggttgaactcttcctcagccgcgacggcctcagcctcgttatggaagcgggccacgatttcgtgcgcgagagccgctttcgcgtcacgcggattgcggccctggttctggcactcatccttgatgcgggcaatttcctcgttgctcttcagcgagagaaggtcgtaccagttccacatcagatcgtcggaaatcgacatgaccttgccgaacatgctgtcagcggactcggtgatgccgatgtagttgtgcttcgacttgctcatcttgttcacgccgtcgaggccgaccagcagcggcatcgtcagaatgcactgcggttcctgaccgtactggcgctggagttcgcggccgacgatgaggttaaagcgctggtcagagccgccgagctcgagatcggagtggagcgcgaccgagtcatagccctgcatcagcgggtagaggagctcatgcatcgcgatcggcaggttttcacggaaacgcttcgcgaagtcatcgcgctcaaggaggcgggcaagcgtatagcgggaagcaagctgaataagtcccacagaaccgagcgcgtttgaccactcggagttgtagcggacttcggtcttattcgggtcgagaacgcggccggcctgatcgaggtaggtttcggcgttcactttgatctgctcaaaggagagcggtggacgggtcacattgcggcccgacggatcaccgatcgacgcggtgaagtcacccacgaggaagatcacggtgtggccgagatcctgaagctggcgaagcttattcagcaccaccgtgtggcccagatggatatcaggggcggtcggatcgagaccgagcttgcagcgcagcggcgtgccggtttctcttgcccgtgccagtttctgcagaagctcatcctcaatcaaaagcgtatcggcgccgcgcttgatgagtgcgagcgcatcccggtcttcctgagttacggtgtatttcttcacctgatctgtagctttctgttcttctgccatcggtgtatctaaagtcctgttaacgacctttgccaggtctgaatcaagagaataaaagcctgtcggggcttatggtatgtccagccggcaggcctgctcggggcgggcgcgcgtcactcggcgccggatccgccctcgggcggtgccttgtcttatagcagaaaaagaccgctccggggcgctgagactccggagcgcttttcctctcaccctcctgccgcttccggcggagagacctgaggcgcgcccgaaacaggctagattatcctccaaaaaatgtaaaaaagatttacatctgacatttttctggtttcgctgtccgggttgaggcattccgactgttatactcggtaggttttccaattcatctaattatttccgtcacttcatgctgccccactcgatcatcgccgagaagttttcccgcctcagggaaggtgcagctgtgctttgccggaggatccgggtcacgtgccgccgcaggcacttcacccgagggcagatcgccgttgcagccattgtcgctgccctcccgctttccgctgctcttgctaccctgacggtcagcacgagtcccgagacggaacaggcgccgtcggccgcgcctgccgcagcagttactcctgccgctccccgggatgcgtcgctcattattaataatgctgagacggcttcttcactcatggcccgccttggcatcaatgaccctgaactcgaaaagttcatctattccaaccctgacgccgcggtcttcgcttatccgagacgcggacagtttgctctcgcccgtgtggccgggaacggtcaggtgatctccctctcgatgtatgtcgagggagcccggaataaaaacatcaagaccactattacccgtgatgcaaagggtctctccgttgcatccgctcctttcaagttcgacagccataactcgatggccgcgatccgcgtgggccgctctttcgcggctgaagcgcgtgaggcgggggtccccgctgacatcatcgcggacgcgaaccgtgtggagtaccgcaacagcccgctgcttcgcaaggcgggccgcggtgacaccgtgagcctgatctacgagaaccgcttcattgacggtcacctcgtcagcacgggccgcctcctcggtatcgagctccagcacggcaaggaagtcaccccgctctactggtttgaagacggcacaaagggcggcggttactactacgcaaacggcgaaacgacggagcagacattccgccgctacccgctgaactccttccgcctctcatccccgttcacgacgagccgccgcaatccggtgaccggacgggtccgggctcacgaaggcgttgaccttgcagctccccggggcaccccggtgtactcggtctctgacggcatcgttgaggccgcggacagctcgctctccggctacggcaaccgaattgacatcaatcacggcaacggctactccacacgctacggccatctgaagggctacgcgaaggggatccgtccgggcgtcttcgtgaagaagggacagctgatcggttactgcggctccaccggtatttccaccggcccgcacgttcactttgaattccatgtgaacggcaccccggtgaatccggtcaaggtcgcgatccagacgaacgacaggattccgtcccggtactacgccgcggcccgtccgcgggttaccgcgctcgcgcgtcagatgaagcagcttgacgcggtgcagaccgcttcaaacggcaagacggttcccgtgatgagcgcggaccaggtgaaggcggcacttgccgcagccgacaccccggccgtgaaaaagaaacagcagggctgatcggcgaaaaccggccagccccgcattcaggccctgcccagacgctaagatatggctgaaggcagggctttttactgcctgacaaaaaccttttctctcggacattcccccttcgccatgacgacatccgaatcctttatctgcatcggcatcatgtccggtacgagtctcgacggcgctgacgctgtcgccgcagacttttcctctcctgtgccggtgatccgcgggcgcgctcacgagcctttctccccggaactccgtgctgagctgctcagcctctgcgccccgggtgagaacgagatcgagcgatccggagccgcctcggtgaaactcgcccaatgctacgcgaaggcggttgagtcgcttctcgcctcaagccgtatcccgcgcgaggaaatccgcgcggtgggggctcacgggcagacgatccgtcactgccccgatcagcatttctccatccagctcaattaccccgcgctccttgcggaactcacggggattgatgtcgtcgctgatttccggagcgcggacctcgcagccggaggccagggcgcgccgctcgttccggcgtttcacgccagagccttccgctcggacaccttccgggtgatcgccaatatcggcggcatcgcgaacctcaccatccttcccccggtctcatccggcgctcctgtggcgggttttgactgcggccccgggaacatgctgatggatgcctggtgcttccagcggaccgggcggttctatgacgaggacggtgcctgggcgagaagcgggcttccgcagccggaccttctcgcgtcgctcctctctgacccctacttcagtctccctcccccgaagagcacggggcgcgagcgcttcagtctgagctggctgaagtcccatatcgcggaatgcggaaaccgactcatgagaacgcgtgacgtgcaggcaacgcttctcaggctaacgtcacaaagcctcgccgaagccgtgatccgctacgcgccggccgcggaagaggtgtacctctgcggcggaggcgcgctgaaccctgcgctgcgggaagacatcgcgcggctcctccccacgcagcacgtcgggacaacgtccgaactgggtattccgcccatggatgtcgagggactcgcttttgcctggctcacctacgcgagactcgccggaatcccgggaaactgcccggacgtgacgggtgctgcaggaagccgggtgcttgggtcgatttacccggcaccccgaaaataaaaaaagaacctgaagcatcactctgcctcaggttctcttcaccggaaacgcgccggccggtgtatcccgccggcgttttttccgcgcggtatcagacgttgaacgaagaaccgcagccgcaggtcgtcgtggcgttcgggttcttgatcacgaactgcttgccgtcaagatcatccttgaagtcaacggaagcgccgaccaggtactggtagctcatcgagtcgacgaggaacgtcacgtcacccttcacgatacgggtatcgtcatcctcagccttctccacgaactcgaagccgtactggaagcccgagcagccgccaccctgaacgaagatacgaagcatcagattcacatcgggattcttcttcttttcttcatcgaggagccccttcacagcatccacagcggcatcgctgaactggatcgggtcgggcatcgcggcgaaatccggaacttcgccctcagtattctgcgcaacagctttttcctcagccatatctctcttaattcctgtattcgtcgtactgctgtttccggtctgctggccaggccaatattctgcgtccgacggaaacctgccctcgggggatctcgagggaatctcttataaaactgcgtgctaataatatcagttccctgaaaagaccatgaggctttgtcgggtattctgcccgcggcacgccgcgggtaaaaaaaacgcacccgaaggtgcgttttttctctgccggggatccggagagaagccacacggagcggctccggtaccggattccggagaagcgtattagcgcttggagaactgcttcgcgcggcgggccttgcgcagaccaaccttcttacgttcgacttcacgagcatcgcgcgtgatcaggccggcgtgagaaagcgtgggcttgagggcggcgtcgtagtcaacgagggcgcgggcaataccgtggcggatggcgccggactgaccggtttcaccgccgccgctgacgttagccatcacgtcgaaagcttcagcgttctcagtgagaacgagcggctgacgaacgatcatgatgctcgtttcgcggtggaagtagttggcgatatcacgaccgttgatgacgatcttgccggaacccttcttcaggaagacacgggcgacggagctcttgcgacggccagtgccgtagttgtaattaccgatcatcattcaacctcagatatccagaaccttgggctgctgcgcggtatgcggatgctcagcaccagcgtagacgtgcagcttcttgatcatggcatagccaagcgggccgtggggcagcatgcccttgacagccttttcaagaacgcgacccggatgcttttcctgcatctgacgataagaagtctcgtagatgccgcccgggatcatggagtgacgatagtacttcttcttctcttccttgccaccagtaacgacgatcttgtcagcgttaatgacgacaatgttgtcacccgtatcaacgtggggcgtgtattcgggcttgtgcttgccacgcaagcgcagcgcgatttcgctagcaaggcggccgagcaccttaccggatgcatcaaccacgtaccattcgcgcttaacctcagccggctttgccgagaaggtcttcatttgcgattcacctatattcaggaacttggtgcggcatggcgtccgcgccaaaaagattaaaaacagtcttgaggaacagtttcctcagagcgtctagcttccccgctccgctgcggcatccggtgttgcaacactggaaattgagctgtccgcggggataattaactgcctacccgaccgggcaagtggaattggggcaagcacacagccagtggacagtcaaggcgcgaattttacaataaaactgcgccctttgtctagccggcttttttatacgccgctccaggattccgctctccggccgtgaggccgttttccttactcagccttatcggccttagcggcgggagcgtcggcttccgcttcagaagcgtcgacttcttcagtctcgtcttcttcgtaatcgtcttcagccgtgtcttccacgtcttcagcggtttcagcgtcggcagcgagcttttcctcggcggcctcagcggcgcgttccttcaccttgcgggtgagttcaatcacgaggcgcagggcgtcgttcacgtccttcgcggtcgggaagaaagcggcgacttcgctgtcgatcttcacgatctgacgcttgctgtagtcttcgcgatcctggaagcggccttcaccgaaagcacgggcacgggggccagtcttcgagctgtaacggtcgtcgcggttgaaacgcggacggtcgccgccgaaacgcggacggtcatcgcggttgaagcgcggacggtcaccgccaaagcggcggtcgccgccttcaaagcggttttcacggttgaaacggggacggtcttcaccaaaacggtcttcgcggttgaaacgcgggcggtcattgccaaagcggtcttcgcgattgaagcgcgggcggtcttcaccgaagcggcggtcggaacggtcagaattccattcgcggcgtccgccaaagccttcacggtgagagtcacgattttcccagggcttacgatccatcatttctatattccttattaatcagtatgttaatttttcagtatgctcgtcgagcgaaatttgaaaattaattatttttaaactgcagttaaataaatgcgcttttttcggttgcgcgggctacactatctatagcggagaccgaattcaaagaccgattcagttactgaaaagctatttgaaaaggtttgcgccataacacttgcttctataaaaaaggaggtctcacatgcttcagacgcctcaggttgttttccacggcatttctcgttctccagcagtcgaggctgctatcaacgaaaaagttgaagctttaactaaattcgacagccgccttggtgctgtcagggcaacgatttcactggacggacatcagacgaccaatgagttcaatgtgcgccttgatttcgtcacttccggcaaaaacgttgttattaaccgtaagggcaccgatgttattgctgccctcaatgaggccttcgatatagcggaacgttccattaaggaagaagccgcgaaactgcgtcagccgtaaatcaccttagctgactcagtaggtcaagagccgtccaattccgggcggctctttttttacccgggctcaagtataccttctccggataaaacaaagggagcccattcttgagctcccagtgtaaatggcgtccccaagcagattcgaactgctgtaccgaccgtgaaagggtcgtgtcctaggcctctagacgatggggaccttttaaattttggtggagataaacgggatcgaaccgttgacctcttgcatgccatgcaagcgctctcccagctgagctatacccccaaaagaaccagtattatatctatctcagagtcaaaaagcaagtgatcagcgaaaacgcttactgctatctttctcttgataagatggggtttctgtcgtcaggcagaagctccaaaaaatccgtggtggagataaacgggatcgaaccgttgacctcttgcatgccatgcaagcgctctcccagctgagctatacccccacagaggattgacattatatgggtgatttttggaaatagcaagttttttgaaaaatattttcgcctaaccgctttttcccttttcctcccgtctcttagagaggttaatctttcgctatgcttttctcttatccgcggggctttcccactgataaaagatcttctgacacagcggctgaaaaatatcaatgacacgcgttcgtaaaaacctgaaggcagacagtctgccagtctcttccgcagcaaaaatttccatccggggcgcaagacagaacaatctgaagaatatctctgttgattttgatctcggaaaactcaccgttgtcaccggtgtttcaggttccggcaagagttcgctggtcttcgatacgctctacgccgagggccagcgccgctatgtcgagacactgagcccctacgcgcgccagttcctcgaccgcatggaccggcctcatgtcgatcggattgacggcgtgccgcccgcgatcgcgattgatcagacgaaccccgtacggacatcccgctccacggtcggcacgatgacggaactgaacgatcacatcaagctgctcttcgcgaagtgcgcgtcgctctactgtccgaagtgcgggaagaagattgaggaggagacgccgaactctctctggaaaaagatccgggaggcggccgaagccgcgtcggaccccaggctcattcttacgtttacgtctgttgtgccgagaaaattcggcctgaaaaaggcgattgattcactctcagcccagggcttcacccgaattcataagcagaccgccaccgcctcaggctggacgctcgaagtcatggtggaccggttccgcgcgagccgcgttgaggaaagccgcgcgattgaggcgctcgagcaggcgcttgaacggggccacggctcaatcgcggtgcacccgctgaatgatgaaggcgaagaggcggacacctggaaatacacccgggggctcgcctgcgctgactgcggcatcagcttttcccaccctcacccctcctccttcagcttcaattcgccgcttggcgcctgcgacacctgccacggtttcggccgcgtgatcggggtggatttcgggctcgtcattccgaacccgcggctcagcatcgcggagcactgcgtgaagccctggagcactccgtcctttgccgagtgccagaaggatcttgagcgctacgcgaagaaagccggcatcgcgctcgatgtcccgtttgaggagctcccgtccgaagaccggtggtggatcctcgagggggatcctgactggacgggcgactgggatcatcagtggtacggtgtccgccactttttcgagtggctggaaacaaagtcctacaagatgcatatccgcgtgctgctctcccgctaccgcagctacacgctctgcccggactgccacggcgcccgcctgaagcctgagtcgctctactggagagcgggccggctctcagacgccgaggctgcgctcctcccgcagggagaagagcggaagctcgagcggttccgtccgaaaggcatgaccgttccggacgcggtgctgaatcagctcccggggctcacggtccacgacctgatgatgctgccgctgtcacgcctccgccgtttctttgacagccttgctgccgatccggacctcccgcctgaagccgctccgattctgaaagagatccgctcgcgcgtcatcttcctctgcgcggtcggggtctcgtacctgtcgctcgaccgtcagagccgtacgctttcaggcggcgaaatccagagactcaacctcacgacggcgcttggcacctcactcgtcaacacactctttgttcttgatgagccgtcgatcggtcttcacccgcgggatatggaccggatcaacgcgatcatgcgccgcctcacgaaagcgggcaatacgctcgtcgtggtggagcacgatccccaggtcatgctgaaggcggaccgcattattgatatgggaccaggggccggcgaaaaaggcggcaacatcattttctcgggttccccgaaagagatcttcagcgcgaagacgctgaccggcgactacctctcgggacggcgccgcattgctctcagagggcagaagccggtgtcaaagaaagcaccttccatccgtctcaccggggtcaccgcgaataatctccgcgatatcgatgtctcgttcccgcttcactgcctcacctgcctcaccggggtgtccggctccgggaagtcaacgctcgcgcaggaagtgcttgtcccagcgctccagaagcggctcggcgttccgactgaggccccgggaccctataaggacatcaagggatttgatctgatcgaaggggtggactttgttgaccagtccccgatcggaaaaacctcccgctcgaaccccgtgagttacgtcggggcctttgacccgatccggaaacttttcgccgccactgacaccgccaaaatgcagggctggggtccgggaaccttcagtttcaattcgggcgacggccgctgccccacctgtatggggtccggttttgagcatgttgagatgcagttcctctcggacgtctatctccgctgcccggactgcaacggacgccgctaccgcccggaaatccttcaggcaaaacttgaacggaatggccgcagcgcctcggtcgctgatgtgctcgaaatgacggtgtccgaggcgtgcgacttcttccgggatgatctcgaagtgatttcgctccttcagccgctgatcgacgtcggtctggagtatgtgcagctcgggcagcccgtgccgacactctcaggcggcgaagcccagagactgaagctcgccgggttccttgccgcggcgcttgccgaaaacgggcgccggaagccgaaggatgcgaagggccggctcctcgtctttgatgagccgaccaccggactccacttctcggacgtcgagaaactccttctcgctatgcggaagctgattgccgccgggcattcggtcctcgtgattgaacataacctcgacgtcatcgcgaacgccgactggatcatcgatctcggtccggaaggcggtgaggcgggcggctgcgtggtcgcggccggcaccccggatgacatcatggcggtctcccgctcctacaccgggcaggcgctgatttcctacgaaaaggcggttgagagcggcacgccttatcaggaggacttcacctccaccgagattgacgccgaagccgccctccccgcccaggctcatatcgcgaagaagggcgaaatctcggtgctcaatgcccgggagcataacctcaaggatctctcagtcgacattccccggaatgaactcacggtggtcaccggactctccggctccgggaagtcgacactcgcgttcgacatcgtctttaacgaaggccagagacgctatctcgagtctcttaacgcctatgcccgttcgatcgtgcagccctcgggccgcgcggatgtggacgcggtgctcggcattccgccgactgtcgctatcgagcagcgcacgtcgcgcggcggccggaagtccaccgtgtcgacgatgacagagctctatcacttccttcgcctcatctatgtgaagctcggcgttcagacctgtccgaactgccacgtggaggtgcggcctcagacgccggccgccattgtggaggcgatccgcaaggccggaaacggaaagaaagtgatgctcctcgcgccgcttgtcacgcaccgcaagggtatctataccgaactcgcgcagtgggccgtgaagcaccactacgacacgcttcgggtggatgggaagatcgtcgacgcgcatcacttcccgaagctcgcccgctataacgaacacagcatcgaactccctgtggcggagcttgatatctcggagcggacgcttcccgaactgaaggctcacgtggcaaccgcgattacgctcggcaagggccaggtcgcatccatgattctggagaacggcgaacccgtaaacgataccttcaagatctggtcaacccggcgcgcctgcccgatctgcggcacgagcttcccggatccggaccccagactcttctcctataacagcaagatggggtggtgcccgacgtgcttcggcaccgggctgcagctctccgggtttgatgccgagcagacgggggaggaatccgcctgggcgaaggctgagggcgaagaggagaaggtctgccccgactgccacggtctgcggctcaatccggtcgcgctggccgtcctgttctgcggaaagaacatcagtgagctctgccagatgagcgtgaaggaggaactcgcgttcttccacgcgctgaagctcgacccccgggatgaggcgatcgcgcatgacgcgatccgggaaatcatttcccggcttgagttcctcgatcaggtggggcttggctaccttacgctcgaccgcgcggcgccgaccctttcaggcggcgaaacacagcgtatccgcctcgcctcgcagctcggctccaacctcctcggtgtctgctacgtgctggatgagccgacaatcggtctgcatccgaaagataacggcattctgctgaacgccatggatcatctgtcgaagaagggcaacacgcttcttgtcgtggagcatgacgaagacacgatccggcgcgcggaccacgtgattgatatcggtcccggcgcaggaagcgaaggcgggcgcctcgtcgcagagggctcggtcgaagacatcatgaagtgcaaggaatccgttacgggccggttccttgcctcccctgaaatccataacggcattccgcaccgcccggtgcgcccgggaaagacacccacgattgccgtgctcggcgcctcgctccataacctccggatcccgaaggtggagttcccgctgaaccggctgacagtcgtcaccggcgtatccggttcggggaaatccagcctctgccgcgacctgctccttcggaatctccaggacgcgctacgggcaaaggactccgctccggtctggaccggatgccgtgaaatcacaggctgggaagctgtcagccgggtgctggaagttgatcagacaccgatcggaaagacaccccgctcctgcccggcgacgtatgtcggcatctgggacgggatccggaagatcatggcggaggcgagtctcgcgaaagagcgcggctacaccgcgagccgcttctccttcaataccaagggcggccgctgcgaaacctgtctcggccagggactgcggacgattgagatgaacttcctgccggaagtaaaggtgctctgcgaaagctgcggcggcaaacgcttcaacccgcagacgcttgaagtgctctggaagggaaagagcgccggcgacatccttcagatgcaggtccgcgaggcggttgagttctttgcgtcaacgccttctatccagcggccgcttaagctgcttgaagaggtcggtctcggctacctcacgctcggacagccctcccccacgctttccggcggcgaggcgcagcgtctgaagctcgtcacggagctctccaaagtgaaggatacggagtatgtgtcggaggatgaaaacaccaccggtacgctctacgttcttgatgaaccgacggtcggtcttcatatggcggacatccagaagctcatcaatgtgcttcataagctcacggactccggaaacaccgtggtcgtgatcgagcataacctcgacgtgatgtcagaggcggactggatcatcgatatcggtcctgaaggcgggacagccggaggcaaggtggtcgccgcgggagccccgcttgatgtcgcggaaaagggcaccgcgaccggtgacgccctgaaggaatttttcgggacgcataaaaaagaagcggctgcgtaaagcagccgcctcctgatccgcttccgcctgtctgtcaggcggaagccggcttcgccgcggaacctcccgcggctttttccttttctttctcggctttcaggcgatccgcttctttctgatcctcgaggaacgtgagaagccgggccatatcctcgatcgagatcttctgcgtctgattgctgcggagacgcacgtcgagctgcgggaacggcacttcgatcccttcctcatcgaaacgcttcagcacattgatcagcacctgcgtgcggaggcccactgtgccgtcaccgacattcggcacccagacaccggcttcgaggtcaatcgcactgtcgtccagcttcgtgataccagtccagcccttgcggttcttgatcacgcgatccggcttattcgcttcctcattcaggatctgaagcgccttgttgagatccgtgccgtaggccaccgacacccggatcatggcgatacagacgttatccgtgtggtagtagttcttcactgagctcgtcacaaacgtttcattcgggacaatgtcctcaatgccgttccagtcactcaccacggtgtagcgggtattgatttcggtgacgataccctggaaaccgccgatttcaacgaagtcaccgatcttgatcgagtgatcaagaagaatgatgaagcctgaaatatagttgctcgcgattttctgcagaccaaagccgataccaacaccgagcgcgccgccgaagaccgagagcacggtgagatcgatgccgactgaactcattgcgatcaggatcgcacagaccatcagaatccagcgggcgattcgcgagaacaccacctgcagattcggagcgagccccttcgttcgtttcagcacgccttcaaggacgttcgcgatccagttcgcgacgcccagcgtgagaagcgcggagacgagacccgagaagagcgtccaaagcgtgagattctgagtcccgactggaatcgactgatcgcgcatgaatttcacgatagtcggcagaatgcccgcgaattcgaggactaccagaatccagaacacccaggacacgacggtggcaagaccatgcgtcaccaccttgtcgcccagcatgccccgcaggatgtagagcatgatccgcaggaacgcgaaggcgtaaagcaccatgtagccgagttcggcgaacacgagcactttgtgatcaggaaggatatccgcctcgcggagcgtccagtcaagcatccagaggatcgaggcaccgatgagtgagaatgacagatgagacgcgatatcgatcgagtagctcttcacgcggtcccgcagccgaccggaccccggtggcggcagcagcttctgcagcttcgctttgaagcgtcgggaaataaagagcgacagcagtaccgctacggcaaacgccgcaatctgccagatgtagtccgcagtccatcctccctgcagcacctgcacaatctggtgaaatatcgcctctgtttcaccgatcttcgagatcgaggaagctaccgtcattcagtcaatccttgttgttttggggttaaaaaatcaattgccgggacatcaccgccgttcgaccttggcgatcgccacggctgcgagtatgagtgttaccaatattggtgttatggccgccataatcggcgggaacgtactcaggataccaatataagagaacagattgttcagcgcgtagaacgcgatgccgatcatgacgcccacaaaaatcttgagcgacacgccgcccgagcgggtgctcaggtacgcgaacggcattgagagcgcgagcatcacgagaatcgagagcggatagaagactttcttccagaaagcgacttcatagcggctcgtgtcttcgtgattctgtttcaggtgatgcagataggacccgagatccagaatcggcatgtgatccggatccgccacaatcacggaaagaatcctcggcgcgagcgtcgtgctgagcaccatgctcggttccgtatgccggacgaccggcttcggtatcgctttggggtcgccaccgagaagcgacgggaagtcagttaccaccgcgtccttcagcacccagccctttccttcctgataggagcccgagggcgcctcaatcatccggtgaagctcgtttccggtcgtgaattcgtacacccgccagccgtttgcttcctgcgcggcgcctgacttaaggctctgcacattcacgtaacgggacagcacgagtttcttcgaattgtcatacacctgatcgcgggcccagacgccggagtcgtaacccgacgcggtgagcggccggctgtaaatcttcagctgaacttcctgacggagagcgtcgctctccggcgccacgaattcgccaagcagataagtgaagccaaccagaatcagaccaggcaccatgagcgaacgcgtaagcgaaagcgggctcatgccggccacacggagaatcgtgaattcggaattcgcggcccagcggctcatcgtgtaaacggcgccaagcagcacaccgatcggcatcacttcatagagatgcgacggaatggagaatccggtaatcgccagagcctgcagcatgccgtagctcgaaccgatcttatccacctggttcacaaggtcgaagaagaggaaaagaccgatcagcgccatcagcacgagactcgtcgacaggatgatctgagaggtcagatgtcgtgtaataacccgcataattttttcctcactccatccgatcgcgccagtagccgattgtcagttcccgcggcagccagcgctgaagccagattctccggatgaacaggaaggcggtcagaagcagcacggatccgtgaagcgcgatcaggcccgaccaccaatgccaccgtccttccgtaatccagctttccataatgttgatgaagttcagatagagaataaagacgagaaccgccaccaccacattgagagacttgccggctctcggattcgtgaatgacagaggaatggcaaaaagcaccaggttaagcgccatcagcggccacgagagccgccagaagaactgaccgagattcttcggactcgggtcattcaggagatagctggtcggaagcgaatgcgccttgtcaggcgacagaatctggtccggcttgatatccagacggatcccataggttccgaaacccgtcacccgataggacttggcgtcaggagcgatttcgtaccgctttccatccgtcagctccacgtagcggtcaccttccttattgatacggagacggccttcggtcgacgacacaacggttgctttcccgttccgattcaattcagaaacgaagatgcctttgacgttctgcgtatcctcgctcacctgctgaataaagaacacgcggcggccggaactcgactcgatgaactgtccggaggcaatacggctcgtgtcgtcacgctgcgaaaactgcgctttgctcacatccatctgaccgcgggcccagggcgtgatcgcaagcgccaccaccgcggtgagaagcaccacaggaagcgaaaagcgaagcaccggacggatccaggagaggagcgacagaccgcctgacgagaaccagacaatcatttcgttctgctgccagctgcggatcagcgccatcagaatcgcgaggaaaagcgacagagcgagcagaggcgccaaagttgtgagtgacgtgtaaagcaccatctggaggatggccccggcgtcagacttaccgaccgccacctggctcatcacccgcacgatgcccaccgtaagaacgatagaaaacagcacggtaaaaacaccgcctgctgtattcatgaattctgagatgagcgagcgcctgaaaatcataaaaatggatcccaaagctccccggcagatggggagaaaagcggccacgaaaagacaaacttacattttacggcatgaaggaagaatctttgcggaaaggcctttttggttcaaaaattcttgcaacagattcttactaagttctactaaaatagggaaattcaccaagtggatcttacccctcaaatccagaagtctataaaagcaataagagcagccttccacggtggatgcctttcctgtttatctactttcggaaaatgaaaaaatctgacttcggtgttatcgccgtcctctatctagtaggaatcgcgttcctggtcatgacgcttaagcttcccacaggagccatgcgttatccccttttcctcacggtcgtctttctggcgctggtctcgatttatctgattcagcaggtcctgcactacatcaagacccgcgagatcgttgatgacctgaagcagaaattccaggacttccaggctgtccagtttttcggagtctgcgcgttctgcgtgatttatctcattctgattcagaagctcggctactacctctccagtgtgctctttatgctgggctgtatgctgttcctccgcgtgaagccgctcttcgtggtcctctccaccgcgatcctgatgggcatcatttatggtgtctttaccgtcttcctcaaagtcccgcttcctgtgggacttatttttggctaggccccgcggagattaaccaatgcaagaaactctgagtctcatggggcttggcttcgtcaatgccgttaccccgatcaatcttctcatcatgttcctgtcgaccgccatgggtatcaccatcggctgtctgccgggactttccgccgccatgggtgttgcgctgctcctgccgatcacgttcggcatggatccggcttccggcctcatcacgctcggcggtatttactgcggcgctattttcggcggttcaatcagcgccattctgattcatacgcctggcacgccggcttctgccgcaaccgctattgaaggctacgaactcacgaagaagggacaggccgcgaaggctctgaccgtcgcctgtgtggcttcctttatcggcggtcttctttcctgcatctcgctctacttcttctctccgcttctcgcgcagctcgcgctgcagttcaagagccctgaatacttctggctctcgctcttcggcctcacgatcattgccggtgtctcgaataagtcactcctgaagggcctgatttcaggcgtcctcggcctgctgatctccacgatcggcatggatccgatggaaggtgtcgagcgcttcatgttcaatcagagcgaactctataacggcatcaacgtgacctgcgccctgatcggcctcttctcgatgtcacaggtgctggtgctcgccgaaggaaagatcaaggagcgcggacgtctcccccagaagatcggacgcttcggtctctccaaagctgaaatgaagcagatcgcgccgaccacgatccgctcctggatcatcggcaacatcatcggtatcctgccaggcgcgggcgcaacgattgcgagcttcattggttataacgaagcgcgtcagttctcgaagcataaggaggagttcggtcacggctccattgaaggcgtcgcgggttccgaagccgccaacaacgctgtgacgggcggctctctcattccgactcttaccctcggcatcccgggtgaatccgttaccgcggtgctgatgggcggcctcatcattcatggcctgcagccggggcccgagctcttcaccacgtacgccgacatgacctatacgttcttcgcgggcttcgtgctcgtgcagttcttcatgctcgtgatcggactctttggcagcaagatgttcgcccagatctcgcgtctctctgacgccattctgattccgtcgatcttcctgctctgcgtggtcggctcctacgccatcaataacagcacctttgacgtcggcgtcatggtggtcttcggtgtgatcgggtacctcgctcaccacttcgacctcaataacgccgccattgtgctcggcctgattctcggtccgatcggggaaaacggcctccgccgttccctcatgatcagcaacggagatccttcgattctgttctcgtccgtcatctgctgggtgctgatcgcgctctgcgtggtcggtattctgtcgccgctcttcttcagtagaatggagaagaagatgaaggattcgaactagaaccttatcggaaggggataggcgtcgagcctgtcccctttttattttgcgggctttgcggcccttttctcacacaggaagaacttatatgcagaaaagaacctttctatcgatgcttgtagcgggtgctgtttcggtccctctgtcgtcgcacgctgcctgggctccgtccggcgaagtttcggttatcgttgcttataaggctggttccggcaccgacgtgggcgcccgtctgctcgcctcggaagctgagaaatttgtgggccgtccgctcgttgtgaacaacgttccgggcgctgacggcaagatcggctggacgcagctttcccgcgcgaagccggatggccgcacgatcggcttcatcaatctgccgaccttcacgactctggccgttcttcctcactccccgctttccacctccaagatcgttccgatctgcaaccacctgaaggaaaccggtgtcgttgtggtccgtgctgacagcaagtggaagaccctgaaggatctcgtcgctgaagctaagaagaacccgaacctgcgcgcttccacgaatggcgtcaaggcttccaaccatatcgccgctcagctgcttgcccgcagcgccggctttaactacaaggccattccgtacggcggcactgctgaccagctgctcgctctgcgtcagggcgaagtgcagttctcctgcgcaaagatcggcgacgtgctgaagctgtccaccggccgcagcccggtcttccgcatcctcggcgtcttcgatacgaagcgtgatccttccctcaagaatgttccgacgctgaaggaactcggctactacggcaagtggtacggctccgcccgcgctctcgtcgccccggccggcacgcctcctgaaatcatcaacttctacgtaaacgctttccgccgcacgctgactgacaaggcgaacatcgccgctcatgaacgcgccggcctctccatcgacttcctcgataacaagcagctcgcagctctgatcaaggaacaggaagagttctcgcgtgaagtgacgaagatcttctgatctgctcccctgaatgccggctgatgccggtacagaaagagcgaagcccgaaaggttctaatgccttccgggctttttctttgcctgtgctagggaggactgaaatcggggcagtgcccggtttcatctctgtcaataagagccttggagacctgggagagatcttcttcgcatttaatcggagatagaccgataaaaacgatatgctccgcgatccggcccctgtctcttatcgctattgaaatccgaagacagagaaaggaggagcgcgagctcctcctttctttttccctggtttttcaaaagcgcataaaacaaaaccctcgaaagaaaactttcgagggtcttgaagggggagcctgacagtgacctactttcaccggaaatacaaccgactatcattggcgcgagagcgtt

SEQ ID NO: 1273 - DNA, 176232 bp, Unknown; identical to SEQ ID NO: 1272
  gut microbiota DNA sequence

SEQ ID NO: 1274 - DNA, 1460 bp, Unknown
  gut microbiota DNA sequence
cacctaaaaaaagtgggagtcagttttttatgaaccgaacaggaagaccaacaggtagaccaagaggtggaaccaatcacgacccaaaaatcagggagaaactgcttaaattatttcagcaaggcttaggccagactcgcgtagctcacataacaggaatgtcacacgggtatgtgggcaattggtggactatatacttagctcatggcaaagaagcccttttagagcctatgaaacagcataagtattcctatgaaacgcgtttggcagccgcaaaagccgttgtcgacgacaagaaagatgtcgtcagcgtgatgagagcctacagcatcttttctccctctcctttgtaccaatggtgtgctctttaccgtaaaggcggggccgaggctctgatccagaaaaagcgcggccgccccgaaggttacaaagtcgagaaagagccacttacccgtgagcaggaactcgaagccatggtcagacagctccagatcgagaatgccgtcctaaaaaaagtggcggccctgaaggcttcaaagtccttggcaacagggacaaagcggaaataatcaaggagctttcagggcaatttcctgttaaagagattttgaaagctgtccagctttcaaaatcaacttattactacctttgcaaacatcctctgaagccaaccaggcctgagctcagagagcacgtcgtggaaattttttctagaacagccaatggctgcggctaccggcagattacgatgtgcctgcgtcatgagcagggtgctgtgatcaatggcaagactgtacggaagatgatgcgcgaacttggactgatttgcaccatccgacgtgagagaagaactccgtatcgctctttcaaaggagtaaccgacaataagcacgagaacctgattaagcgcgattttgaggctaagcatccttgggtcaagctcgggacggatgtcactgagtttgctcagccctggggtaaggcgtatctggctatggtctacgactttgcgacaaaggaaatcgtggcctgggctatctcccgctctccaaatatggagcagcagaagaaaatgctcaggatgatgcttaggacgatgcccaagggcgtgcacccaatccttcactcggatatgggctggcagtaccagcattggtattgggtacggaccctgaagagcgcaggaatccggcaaagcatgtcaagaaagggtaactgccttgataatgccgcgaccgaacaggtttttgggcatctgaaggacgaattctttcttgatcagacatgggactgctatgaagattttgaaagagacctggatcgttacattcagcactggaacaacagaagaaggcagatgaaattaaagggactgaccccggtagaataccgaaatcaatccctttctatcgccccttaggatttttatttaacaagtcctaaatttggggagcagttca

SEQ ID NO: 1275 - DNA, 53003 bp, Unknown
  gut microbiota DNA sequence
ctatgagaaataattctcatatgtgtatgttttaatttattttatttaaaaatacgaatagaaatttgtgagacgcatactcattcaaatgcttgaaaatcccaaaatcatcgagaacaggaatcggttttatcttctctgtcggatcattcagacataaaaaaagcagctcccaacggagctgctttttcagtaaggcggaggaaccccttcgccagacttctttttcagaaaagatgattcacgaagatacgggccttgtcctgcaccgtctcttcatcatcgggcatcacggattcaagatagcccggcccgaattcatcttcataccaggcattcaggatcccgcggacccgagccttgatttcctcacccttcccggcatcatgggaattgatccacttcatcagggactcatgagcctcaaaggtttcgtgattcatcgcgaagagctcttcaataaagcgggccaccaccaggcgctcaccgcccagctctttcgccgcctcacgcacctgggaggcaaacttttccgggagtccctgacggataaggccgtccaccgtgaacggaatctgctgacgggaaacgtcgcggagcgagcttctcatcgtacggatcgcggaaggcagcagcaaattgatatcgcgcatcagcatgtcttgtgactcctcattgccgggttactgccccggctggtactctgttgaaagtattattagtcaggctctcttattagccgcttaaatgccattgattatttccaaaagacacctctgttacatcgtgaaatgtcttaagattcaggcatctgacagccatacggaaaagctgtactaaaaatctacctttcttgtatataacttggtttatttgttttacgtaaaacattattcacgcatttttcgattttttcaaccccctttaggagtagctcttaggcgcaatggcacggatgacaccacagccgtttcagaaaaaagcggttaaatccttaatcagaatgcctgatggcgactaaaatatttcacaaagtatgctcagggtacccgctcggaaacgggcccaggagatgagaagaaaatgggagacggtcccgagataacgtctccttccgataaagagacaaaattggacaatctcaagcctttgatccgcgtgatcgatgacgattacgccatgcggcgttcctgggccttcctgatcgaaggggaaggctgggaagtcgtgacatactccaatgcgctcgcatttctcgctgcgaacgatttctcccgcccgggctgcctcctgctcgatgtgagaatgccccgaatgagcggtcttgagcttcagaatgccctgaaggacaagggcgttgatctccccatcatctttatttcaggacacggcgacattgatatggcggtccgcggcctgaagagcggcgcggtggatttcctgcagaagccggtggatgaccggaagctgctggacgcaatcagcaacgcggtgctgaagaatctgaacgcccgccgcgctgacgccgagatttcaagcttcaagacgaaacttgagtccctcacgcagcgcgaacgcgaagtgatccgcatggtggcccagggcgcatccaataaggctgtggctgagggactcggcatttccgaaaagaccgttcaggttcaccgcggttcggcctaccggaagcttgagattcataacgccgctgaaatcgcgcggcttcttatgcgctgcggcgatcctctgtaattcttgaggaccgcagaaagaaatggcatccggggctcactcctccgggtgccgttttttatcggctgaccggggcgcctgagaaaagcgcggcccaccccgaaatcagatccgaggccttctcaggaggcaccacaccgccgcacgcctggatctcccgccagagactccgtacaaagagttcggacgccgcccggatcgcgctcgcttcaggccgcggcccaagaccgagctgcccgctgaaattcttccagagatacgcctccagcctctccggattccagttctctgtggttccaaaggccggattcccgcctgagagggtatcctcgagccagttcacgagccgcgaatccgcagccctgatatcgtcttccgtcagagctccggctctcagagcctcggctctcgccgctgtttttctgaacgcctcggaaaagatttcttccagcacagcgggcgatgtcagctccggcagcctctccacctgcgatgggaaatttccccgcagcctgaccggccggatgggacggcggcgggcctggcgcccgatacgttttagttcttcttccatctctcctgacacactccagataatcgaaaagccgctccagcatacctgaagcggcttttacaggggaacttaccgaaccctggattacttcttggcaggggccttttcagcagtctcctcaaccggagcctgaaccgcaggctgagccgccacggccttctgaacacgatactcatagaagtcgatcgcgctcatacggatggcgaaaacgggatccttcggcgtcggggtccagatcaggtcggtacgaccggaacagaagcccgtgatgaattcctcaaagaccttcggagccttgggggagtcagtaatcagctgcacattgcgggttgcagcaccatggcccagcgtaagaatatggacaaacttctgagccggggctgccttggcggcagtcttcggggcctcagtctttgccttttcgtcagctttgtttccagccattcctatctccttgctacacatcaactaaagttaaagggatccggggaggatgatgtcgggcttccccttccctacaaagcggtccgtccacttgacgcaaaggtcatgaagaagctgtccctgtttctcaattgccttgtccgcgtcagtctccgggacgtggttgatttcactcaccatttcctggacctcatgcatgaagcggatcgccgcaaacatgatgacgccgtcggttgaagagagcatttcctgggcctgacgcgggagtttcgatatatccccggagaggtccgcgatcagactgcgggcgagaggcgcgccggtccagccttctttcgcctccaccccatcgatgccgccgagaagcgcctctgtgagccattcattcacgttttccatgcgctgctcagcctgctcgcttgtgatttccccggtcgacgcacgaacgaagatttcactcacgttttcaataaacgcaaagcagatctgatagacgtcttcagcgttcccgagtgaaagcgaatgcttctgcttcgcttcatcgttcggctgattcgtaacttcagaatttcctgctgctgcctgatctggcatctcttcttaaacctcaatcaaaaggacactttgctgtctgacatacattgccatcggacaggctaagcgcctaagtaattcgaaattctactacggcaccggattttttacacctgccgcgttaggttttgcgcttccgcccttcacaatcgccatggaagaggtgatcagactggcgagatctcccatgttggcgggcacaacaagcgtgttgctctgctcagcaatcttcgcgaaagcatccacatagcgctgggcaacctgcagattgacggcggtcataccgcccggttcctcggttgcggacgccacctggcgcagggcctcagcagtagccttcgcgatcgcgactgtagccgcagcctgaccttctgcgatgttgatcttcgactgcttttcgccttcagaccgcgccacagcggcagcgcgggcaccttcagcgaggttgatcgcttcctgctttttgccttcagaggtggccacgacggcgcgcttctcacgctctgccgtgatctggcgctgcatggcctgcagaatcacgttcggcggcgtgagatccttgatttcgtagcggagcaccttcacgccccagttaagagcggcctcatcgatagccgaaaccacggagtggttgatcgtatcgcgctcttcaaaggtccggtcaagctccatgcggccaatcacagagcggagcgtggtctgagcgagctgcgtgatagcgatcacgtagttgcttgtgccatacgacgcccgctggggatccgtaacctggaagaaaagaacgccgtccacggagagctgcgtgttatccttcgtgatgcagatctgctgcggtgtatcaagcggcacttccttaagggagtgacgataggcgatccggtcaataaacgggatcacgaggttcagccctggattcagcacagcgtgaaaccgtcccagacgctccacgacccatgcggtctgctgcggcacgacgcagatccctttataggccaccaccgcgacaatcgcggcgagcaccaacgcaaaaataaagcctgaagtcataatctcgcccacctctctaagaagcccgcagaaaagctgttcccgtaaaacttacccgtttttgcgtgacggtgcaatgacaagccgcggcccctctgtccgctcaatcacccagcgtcccggcaccagttccgctcctggcactgcctccgcaagccattccgccccccggtactgtacacgtgccgtgcggtcttcagcccaggctttcacctcgaccggctgcccgatatcgaaggagttgtcaccaggcttctcagcaagccgcccggccttatgacggcgccagaggtacccgcagccaagcgatgcggcgacagcggccacgacgacctggatcgtggccccgaagccaaggagagacgctgcggccccaaaacaggccgccaccgccagaatcagcatgtagaaggtgcccgtcaggagttctgccactccgagcaccccagccgcaacaaaccaaatccaaaccggcatcgtccgcacctccctgcactgcctataaaaaaagctgcagcggcttttcagctgctgcagcctcttatccatagtctaccgggttatagcggcagtggatggatgttaagcgcggttacttcgcgagacgacgccaggtgctcacaacggtatccggattgagggacatcgattcgataccctgatccatcagccagcgggcgagatcctcgtgatcggaggggccctgaccgcagataccgcagtacttgccgcggcggcggcaggcggcgatcgccatcgagaggagcgccttgacggcctcgttgcgttcatcgaacgaggcagccaccagaccggagtcacggtcgagacccagcgtgagctgcgtcagatcgttggaaccaatcgagaagccatcgaaaatgtcgaggaactgatccgcgaggagcgcgttgctcggaatctcgcacatcatgttgatcttcaggccattctcaccctgcttcagaccatgggaagccatgatcgcaacagtcttcttcgcttcatcgatcgtacggcagaacgggatcatcagctcaacgttggtgaggcccatttcatcacggacgcgcttcatagcgaggcattcgagctcgaagcactcggcgaacgaattcgagatgtagcgggaagcaccgcggaagccaagcatcgggttctcttcaaccggctcgaagagcttgccgccgatcagcttgcggtattcgttgctcttgaagtcggacatgcggacgatcaccttgcggggatagaacgcagcggcaatggtcgcaacgccttcagcaatcttgctgatgtagaactcgcgcggattcgcgtagccggcagagagacgctcgacagcgtcacggagctcgcccggaacgttcgggtactcaaggcaggccttcggatgcacaccgatgttgttattgatgatgaactcgagacgggcaagaccaacacccttcgccgggatcttctggaactcgaaagcgagctgcggattgccgacgttcatcatgatcttcacggggatctcggggagagcgccctgcttcacttcttccatgttgaagtcaagcttgccctcgtagacgtggcccgtatcgccttcggcgcaggacaccgtcacttcctgattctcagcgaggagttcggtcgcgttgccgcagccaaccacagccggaataccgagctcacgggcaataatagccgcgtggcaggtacggccgccgcggttcgtcacgatggcggaggcacggcgcatcacgggttcccagttggggtccgtcatatcggtcacgagcacgtcacccggctgcacgcgatccatttccttcgcggacagaacgatgcggacgggacccgcgccaaccttctgaccaatggcacggccggtcacgagggtcttggcgcccttgctgttgatcgtgaacttttcctggacgtcagccttgttctggcggctcttaaccgtttccggacgggcctgcagaatgtagatcttgccgtcgatgccgtccttgccccactcgatatccatcgggcagccgtagtgcttttcaatcaggcggccgaactgagcgagttcaatcacgttctcgtcagtcagagcgaactggtggcgttcttcttcagtcgtatcaaccgtgcggacggattccttggcaccaggttcggtgttgaactccatcttgatcagcttggaacccagctgcttacggatgatcgggaacttgccctgttcgaggatgggcttatgaacgtagtactcgtccgggttcacagcgccctgcaccacggtttcgccgagaccgtaggaagcggtgatgaagaccacctggtcaaaaccggattccgtgtcgagcgtgaacatcacgccggcagcgcccttatcggagcggcacatacgctgaacgccggcggaaagcgccacttcagcgtgatcgaagcccttcagaacgcgataggaaatagcgcggtcgttgtagagcgaagcgaacacttccttcatgcgggcgagaacctgatcgattccgttcacattgaggtaggtttcctgctgaccggcgaacgaagcgtccggaagatcttcggcagtcgccgaagagcggacagccaccgaaatctcggcgccgtcgcgcagccagtcgtaatactcacggatctctttttcgagttcagccgggaacggggcttcctcgacccactgacggatctcggcgcccgcctttgcgagctcgttcacatcttcaacgtcgagactttcaagtctcttgttaatacgctcattcaggttgctttccttcagaaagagcctgaaagcatcagcagtcgttgcgaatccgttaggaacacggattcccgcactcgtcagctgggagagcagttcaccaagagaggcgttcttgccgcccacccggttaacatcggtatatctgagttcgctaaacggaataacgtacttgccctgcatgccatttcctctctacccccgatgtggggaatgtttagaattgaccgcattctaaacaattcgagcgaatgcgggggaagactccgccaatctccacctaaggtgttttactatggctgacctcaatcctccttccagcaccattccgcgtccggttttcatcgtttctgatggcaccgcaattacggccgaaacactggctcaggctgtgctcactcagttcccgaacctgaactatgaacagcgccgcattccgtttgtcgacacagtcgagaaggccgtagcgacggcggacagaatcaatctcgttcaggaaaagaccggtatgcgcccgcttgtcttttcaactttctcaaggaaatcaatcagcaacgcgttctgtgacgaatgcacagggtttgtttccgagcttttccgcagcttcgtgaacccgctggaagaagaactcggcatgaagagttcgcatcaggtcggcatgacgcaccggatccggaatgaggaaaactatgaccgccgcatcgcggccatcgactacacgctgacacatgatgacggccagacagacttcggtcttgatgaggccgaggtgatcctcgtcggtgtttcccgttccggcaaaacgcccacatccctttttctggctatgcagttcggcatcaaggtcgcgaattatccgctcattcctgaggactttgaccgcggaacgctgccagaggcgctcgccaaggtgcatgacaagcttttcggcctcacgatttcccccgaacgtctgcatgaaatccggaatgagcgccgcccgaactcccgctacgcgtcgatcgagaactgccgctatgagatttcttcctgcgaagcgatgatggaccgtgaaggcatttcctacctctcctccaccacgaagtcgatcgaagaaatcgccgcaacgatcttcgccacgctgcatctcgagaagcatgagcggatcggctgaggattcccatctccttctcgccgcagaaccttttttgcgatagattaggagaagagccgcagtcactgcgactgcggctttttttctgcagcggacggtgcaaaacaccctgctgcagttccggtcaaccattcttcaggagtgcccgcgaatgaagactctgcctgctgcgatactcgccgctctgattctgagcggatgttcgtccgcgaccctgcagtttgcctccgatcccgaaggcgctgtcgtccggacttccggcaatggttccgttctcggcacaacgcccttcagcgtttccgtggatcctgactcgctggcgcgctacgctacatcgcctggctgctaccgtctgccatacggctacgactttatctgggagtccggagccaaggtctcgaccgcatcgcctctcgatatgtgttcgatgacatcgggaaagaatcaggtattccgattctctttcagccggccaaaggacgcgccggggctggaaacagacctccgggtcgcgctgaaaaacgcccaggagcgggcgaggcgcgaagctgaacgcgcagcccagctcgagaacgagcagctcatgatggatatgggctggggcggctggggttggggctgggggccgatgtatatgggacccggaccgagattccgtccgccgcctcctccgcctcctccgcctcccccgccccaccgccgctagggggcagaaaaaagctttcaggcctgacacctgaaagctttttctgtttcatgagttcccgcttcagccccgggtaacgcccggaccttcgatctgattcagcccgcccgcggaaccggacttcacttcaatccggacgggaatcttctgccccacctcttcgatatgggaaatcacgccgacaagcttcccctggttccggagttcggaaagggcaaaaagcgcccgctccagcatctcaaggtccagcgttccaaagccttcatcaaggaacaccgtatcgacctgaagcgactggcgggatcctccgctgctcatccgggagaggccgagcgcgagggcgaggctcacaaggaacgactcaccgccggagaggttggtcgctgaacggctgaggcagttaagcgagttatcgaccacctggaagtcaagcggatcacccgctgccggttccagcacgtagcggcgcgagagctgccccagttcctcattcgcgaaatgaagcagccgtctgaatgtcagcgcctgcgcgaaacggacaaacttcgccccgtcttcacttccgatcagatcgttcagctcattccagcggtcaaattccgcccgagcggccgccgcgacacggcgggcgttgtccgactgcctgcggctttcctcatcagccttcagttcggtttcggcctgcgtcgcgcctctgacagcttcaagaagctgcgcctggaccgcctcacgcttcgcctggactgcctcctgggcttccgccgtaacactcttcatcagatgatcctgaagagccttctcggcgtgtttcacgcgggattccgccgctctgagagcgctctggacctcgagcgactccttctcccactcagcgatcacatcgggttcacggcgggcgcggaggaattcttcccgcgtcttgaaggagccgtgaatcgagatatccagattcgtctccagtgtcttcgaattctggcgttcttcctcggcctgtttttcgcactgctcaatccaggcttcggctttatgcttctgctcactcgcctcttcgatcttctgctgaaccgcggtcttcgcggccgttgctttatcaagctgcgcccggatcgaccggcgctcctcaaacaccacagccgtaccgaagagttcatgacgctccgcggttttcgcttcaaaggcctcagaagctgacttcagcgcagtgccggcagcctcagcggcttccgccgccttcacccgctcttcttctgcctttgcgatcagcgcccgctgcgttacggcagccttttcagcctcatcgcgatccttaagggcagaggaacgtgcctttctccgctcggagaggcggttcatggtttcttcaaccgagagcgacccttcgccgaaaccaaacgggcggacgagttcgagccaggcgtttctcacagaagcgctcgtttccttttcatcagcgactgtcttttcggcagcctcagtacggcctttagccgcggcttcctgactcctcgcggccgcgagctgcgcctggaaccccgcataggcttccgccgcctcttcagccgcagctgccgcttcctgagcgctcttcgccgtgttttcggtctttcgcgaccagttctgaatcgcttcacgggcttccgtaaggcgtctcaggagtgccacccgatccgcaaggaattccttcaggaggttagggtccgctgcgccaagccgctttaggttggtttcgcgcgttacccggagccccgagagataaggaatacggtcatgcttcagagcgcggagtttctccgctttctcaccggcgattcgggcaaagttcaccgccatttcgatacctgagcgctttgcctgtatcgctctctgatcgctctcgcggctgacccgctccgcctcggtaagctcggctgccgctttatcctgaagcaccgaaacgcgttcaatctctttctgcgccgcatcaagaagcttcgtgagagcaatctgctcatcaagagaaatcagcgcagcaatctgcccggactgagtgagcccccctcgggctgcatccgatagaagtttcgcctgagcagctttttcgcggagcgtctgcagctgtgcgcggcctttttccgcctgtctgtcagcctcacgcaccgcgtttgttgcggacgcgagcgctgcggaagcccgggtgagttcagactgagcggcctcaaggcgttcgtccgcgagacgcacctggcgggactgctcgcgcattccggagaagctttcgagcaacacatcatccttcgcggttttttccacgcgaagcgccgctgcctcagcatccgcctcagaccgcttcaggtcggaggcgagctttgagagctcttcctcacgtccggttttgatgccgagtgccttctgaacagcggcggaagccgcgtcgcgcttctccttcaggacagcacgctcttcatcaagcgcctgaacacgaggcgctacggcttcaagccgctcagaagcggcacgggcttcggaaacccgctgttcagcctcggtcgcccgggcgctcagctcttcgagaagcagcgtcttcgccttcgcactctcctgataccccttcagtttctgcagcgtttcgctgagggcgtcgtcatttctcttgatcgccgcgagctgaggctcaaactcccgcgcctttcgggcaagatcaagtctctgacggttttccgcaaagcgcttgtcggcctcacgggcatcttccagagacttcttcgactcctcgtgctcatgcgtaagatcggccttcttatgaagccagctgagcgcttcatccagcctcgcggcttccttttcagcggcctcctcacgttcctcaaacccggcgagacgcacacgcagagccttcaggtcctcggcgctgagaagccggatcccctgcacctgagcctcggcttcctcaagcgctttttcgcgggcacgcttttccgcatgcacctggcgggaaatgtctttataaatttcggttcccgtgattccctcaagaatcactgcccggtcatcgcccttcgcccgaaggaactcagcgaagctcccctgggcaagaagcacgcagcggaggaactcctgaaaccggagaccgatcgcttccgcggtcttttcccgccactcttcaagcttatccgtgcgcggcacccacacaccattcaccagttcggcgagctctcctgttttctggagcgtgcctttcttggatgaacgcgtcacgcgatagctggatttccagagccggccgcgggattcaaacacagcctcagcccagcagacccgggtgcccttcgtcatataggggcagtcatcagttttcttctgctcagcggtagatcggtcactcttctgacgcgcggttttgccgtagagcgcgagcgtcacagcgtcaaaaatggaggtcttccctgcgccggttcgtccggtgatcaggaatattccatcctgataggccggcaccgtgaagtcgatcttccacttcccggccagtgaattgatattctcaaaagcaatcgtctgaatcttcattctgcagtctccggtccgttcttcacatcagacggagaggagtcctcatccctgtctttcccggcttcattcacgcgaacaatggcaagcgcctcttcgaaggtttccatgagacgctttctggccgcctcttccttatggcactccgtgagcagctgacggaaaacatcctcaggttccatctcttccagagactgcgacaacgcggttttcgagagcgcatagcggaaagcggcctgattgcggaccgcgaggagcttaagtccccgggcgagagcaagttcctggagcttctccgtcagatcgggctgctcagtcacccccgtatagttcgcctcaatccaggctccgggctcttcgcgcgccacgcgttccatagcggcgcagattccgtccacatcgccttcaaggcgctccatcggctggaatcgcggaacatataccggttcgatatcaggagcctttccttcttccagtgtcacgatcacgacctggttctcgttcttcacctcacggaaggaaagcggctgcggcgagccgctgtaacggatgttttcccgtccgacagtctgcgcccgatggatgtggccaagcgccacatagtcccagccatcccccaccacatccggcgaaatcgcgccgagcgtgccgactgtctgtgggacctcaccggtttccggatccggcgtaatggaggttccgagcgcgaagaagtgtcccatagcgacacggggcaccgccgccccgacgagccgcgcgtcaagcgcctcacggacgcgggcatagtgcgcccggactcccttttcataaagcgcccagcgttcaccgtctgtcatgccttcgagacttagccgcacttcgctctcccgaaggaacggaacggcaccgatcccgagcagcgggactccggagtcatcccggatcacaacggcttcgctatcagggtcaggtccaggcaccacaatgccaagctgagagagcatggcagccggcgcgcgaaggaagttggcggaatcgtgattccccggcgtcaccaccacacggcggcagccagcctcaagcagtctcgaaaggaaactgtaatagagacgctgcgcctcgttggatggcatcgcgacatcaaaaacgtcgcctgatattagaaggcagtcgactgaacgctcccggcagagactgagaatccactccagcatcttgcgatccatatcgatcgtgctttcgcggatgacttccttgccgaggtgccagtctgatgtatgaagaatccgaaccacttccgtactgtccatatgtcgcggtcctgctccaagggggagcggagcagcttgccgaccgcttgaattgtttgaaatcgacgatgagactaacacgaaaccgcagcgggtaccccgccccgtattcaccattccggagcacacgcttgcatcaatttggtgcaattttgcactgttatggtgcaaacaatatttttcctgtagaattaactgtaaaatagcgataagtagaacaacctaagcgtttttaatttcatccgtattttcattcagttgcgcggaaaataccccgaaataaaaaactggcacgccgtttgcgtaatagaaagcaaaggccaccggaaaaaggggcttcggctaaaaagccaatcagacttaatcaagagggagtcttaaatgaaagtttctcatgttctgctcgccgtcctcggcgcctcaatcgcctgctccgccttcgctgcccctgcgctcgacggcaccctgaagaaggcgaaggataccggcatcttcacgatcggctaccgcgacgcgtccgttccgttctcctacctcgacgccaagggcaagtcgatcggctacggcaacgaaatctgcaagaacatcgccgccgctgttgaaaagaaggtcggccgcaagctgacgatcaagtggcagccgattacctccggcaaccgcattccgctgctcctgaacggcacctatgacgttgagtgcggctccaccacgaattcgaaggagcgccagaagctcgtcgacttcggcaccacgtactttgctgtgggcgttactgctgccgtgaagaagaattccggcatcaagtccttcaaggatctgaataacaagaacgtttcgaccaccgccggcacgacctctgtcacgctgctgaaggatctccgcaagaaaggcatcaatacccgtgtggttcccgcgaaggatcacgccgaagccttccagctgctcgcccagaaccgcgtcgttgctaacgtgatggacgatattctgcttgccggccagatcgcgaactcccagaccccggccgcgtacacgctcctgaacgagaccatctcggaagagccctacgccccgatgctccgcaaggatccgcagttcaaggccctggttgacgccacggttaccggcatgatcaagtccggtcagatgaagaagctttatgacacctggttcacgaagccgattgctccgcataacgtcaacctgaacttcccgatgaatgctccgacgaaggctgcctttgctcatccgaactcgaacggcatctgatcggttctgacagcagttctttgaaaaagtgaggatcctcccgccctgctgaggatcctcgctttccgtatttttcagaaacatcagcgggcaggcaacaccaaacaccttatttaatttggggaatgacgatatgggatttgaaatggattggtcgacgctttttgcgatcagcgacctttcggacactccctggtggcagtacatgctggggggcgccggaatcaccctcgccctcaccttttccgccgggctgctcgccctcgtggtcggaacgcttgtgggcatcatccgcacggttccgaaccgcgctcttaactttatcggcgaagcctgggtcgaactcttccgtaacgtccctctcctcgtgcagctgtttctctggttctttgtggtgccggaattcatcccgccgctgaaggcgtggatgatcagcacggatcctctttacggcgaattcttctgcgcctggatcggcctcggtcttttcacctctgtccgtgtggctgagaatgtgaagtccggcatcaaaacgattccgcgcggccagcttttcgctgcctacgcgctggggctttcgaccccgcaggcttaccgctatgtgcttctgccgctcgcgttccgtatcacgcttccgccgctgaactccgaagccatgaacctcatgaagaacaccgcgacctcactcacgatcggtcttgccgacctcacgctgcggtcgcacgaaatgggtgagatgaccttccagttcttcgtcgcgttctgcttcgcaacagtggtctacatcatcatttctctcgtgatcaaccgctcgatgaccacgcttgaaaaagcggtcgccatccccggcctcatccgcagataaggagccacgccatggatttctcttcgattaccggctcgacctccttcctgcttcagggggctgcctatacctttgagctcactgccacttccgcgatcggcgccattatcctcggcaccttcctcgcgcttggcaaaatggccaagagccgcgtgctctcgctcctctgctcgggttatatcaacctgatgcgcgcagtgccgctcgtgctgatcctcttctggttcttcttcctcgtgccggttttcattgcctggttcacggggtcgccgattccggttccggttggacccgaaaagaccgctctcattacattcatcctttttgaggcggcttactacgcggaaatcatccgcgccggcatccagtcgatttcccgcggtcagctctacgcgagctccgctctcggcctctccttcggccagacgatgcgttacgtgattctcccgcaggctttccgcaacatgggtccggtgcttctcactcagacaatcgtgctcttccaggacacgtctctcgtctacgtgctttcggccaccgacttcatgggtgctgtctccaagatcgcccagcgcgacagccagcttaccctcatgtattgctttgctgcggtatgctacttcgtggtctccttcaccctttccacgggcgtgaagcagatgcagaagaagctcgcaattatccgctaagacccttttcttccaggaagaatttctcatgacagttaatgaaaacgaagctcccatgatcgacatccgcaatgtctcgaagtggtacggcagcttccaggtccttaaaaactgctctaccagcgtcaggaagggagaggttgtcgtggtctgcggtccgtccggttccggcaaatccaccctcatcaagacggtgaacggccttgaacctgtgcagcagggcaccattctcgtgaatggcgtcgaggtgacgaatccgaagacgaacctcacgcggctccgcagccacgtcggcatggtgttccagcatttcgagctcttccctcacctctcgattcgcgagaatcttgttctcgcgcagatgaaggtgctcaagcgaaaccgcgaagaagcgacgaagaaaggtcttgctcttctcgaccgcgtcggtcttctgaagcaggctgaaaagtatccaggacagctttccggcggccagcagcagcgtgtggcaatcgcccgggcgctcgcgatggacccgatctgcatgctgttcgacgaaccgacttcggctctcgacccggaaatgattaacgaagtgcttgacgtgatggttgagctcgcgcaggaaggcatgaccatgatggtggtgacgcacgaaatgggcttcgcccgcaaggtcgctgaccgcgtgatcttcgtcgaaggaggcgagatcctggaggactccccgaaggacgagttcttcgagcatccgaagtccgagcgtacccagcacttcctctcgaagattctgagccactaatctggcttcatcaaaataaagggccgcgatcctttggaatcgcggcccttttcttattctgaaaaacagcctgtgatcagtttattaatcagaatctgtttaattcggacactcaggacttattcgtcttgatcggtccataccgcttccagacccgctccatcagccagagaatcacgaaacccacgacaccgacaagaacggcggaaaagccttccgaaatgccggtcatgatcagggcattcatcagaggcttctcaatcacgagagcaaagaagagaactaccagcacgatttcctcgataaagaaaagcgccggattgcggtaatttttgaagtcgaacatctttttatctttccccgggataaaaattcagaaatctttcagcggacacgaagcctgcggcggcgctgctcaaaaagacagacggcagcggcagcagcgacattgaggctctcagtctcggattcaataggaatataaaggcgctcgtcagcaacttcaagcgccgcgtcagagagccccggcccctcggcccccatcatccagacagtcggccctttttcccagccttcctcggcatagatgtcgtgccctccccgggcgtccgccgcgaggaaccggccatcgaacagcgtctttgcctcagagggctcaatcccctcaagaatcaccgctccgaagtgggctcccatggcgctccgcatcaccttcggagcccagagagacgcggttttacggctcgccgcgatcacccggacaccggacgccacagcggtccggatcagagtcccggcatttccagcgtcctgcactccgtcgagatacagcacatcgctcttccggattctgtcatccgccgcaggtttctccggaagatcaatctcgatcatgattccggctccatgttcgaccggagaaatctcctcaaaaagctgatcatcgaggaaaaacaccttcgtctgcacaccctggaccgtgctctcatcggcaatggcctgcgcgagatcatccgtctcggcatcacgccgtccggccttcagaatcacggcccgcaccgggacccgggcgtcccgggctgccatagcgaggtgcaggccttccgcgagcgtaaagccctccttgcggatcgcgcggggtgacgcgctcacctttttccaggtcttgaaccggtcattagacgcggatgtaatgtcgatcgcgagcatcgctttcctctctcctactcttttctttccatcgcttcccggctccagccggtcatcgtacgcacgggctcgaagctcttccggtaaatccccggaatcagaccgaacttccggatcgcctcaatatgagccgccgtgccgtagcccttatggcgggcaaagccgtactccgggtaaagcgcgtccagccgccgcagctcggcatcccgggaggtcttcgcgagaatcgacgcggctgaaatcgcctgcacccggtcatcgcccttcacaatcgcttccgctcggatatcaatcttcggaagacggttcccgtcaacgagtacgagagtcggacggattccgcccgtcagcccctcgagcgcccgctgcatcgcgagaaacgtcgcctgaaggatattcagccgatcgatttcctcgggtgttgcctcaccgactccccaggccagagcccgctcgcggatcaccggagccagctcctcacggcgcgcttcgctcagtttcttcgagtctctcagcccttcaatagggcgggccggatcgaggatcacggctgccgcgacaacgtttccgcagagcggtccgcggcccgcttcatcaattcccgcgatgatttccgaggcgtagtcctcgatcggaaaaagcggcagcgtcgccgcatccttcgctttcctcatgctgcgcccccgatggtatcgagaatcgcctgagaggcgagcgtcgccgtatcccgaaggagactctgatgcagttccgtgaagacctcttcgaggtgctcacgtctcgcgggattgagctgatcgaggagggacgccgccatgtactggggctcagcgaaatactgcaggaattcaggtacaacacgcttctgctcaagaatattcgggagactcacgaaggacgtgttccccttgctctgaataatgagagaagaaagcgcgggcatcttgtaccccacaatcatcggcttcttatagagcgcggcttcaagtgtcgcggtgcccgacgcgatcagcgccgcgtcacaggcttccagcacatcgtggctccggcccgagaacagaatcacgtgctcagccacctcacggaatcctccaagcgcctgcacgatctgtgttctgcgggcctcatcagaagccggaatgaggaacattgagtgcggctccgccttcaggacctcgcgggcggtttcaaagaataccggcgcgttccaccgtatctcgtcataacgggatccggggagcacggcaaacaccggtcctctcggctcaagccccagacgctgccttgctccatgtgtatccggtttcatcgggatcccttccgccatcgggtacccgatataggtggaaggaatgccggccgcatcgtaaatggctttttcaaacggaaaaacaagcagcatgtgatccactgagcgtttgatcgcgtgaatccgctccgggcgccaggcccagattgaaggactcacgaaatgcactgtgcggattccggatttgcggagtttctcctcgatcgcgagattgaagtccggcgcgtccacgccgataaacaccttcgggcggaccgtctcagcggtgcggatcacatcgcggcgcagcatgagaagctgcggcagctttttcagcacctcaacatagccccggacggaaagcacagacgcgtcatgccagacgctgagccctgcggcccgcatcttttctcctccgatgccaaactgcagagcgccgcccatcgcgcgtttcaccggagggatcaccagcgacgcgagcgcatcaccgctcgcctctccggcgagccacatgacaccgttcctgtgcgcctcatccggcacaggccgaaccgtggctgctgtctcttcgcttcgtttttccataaatctttccaacgataaaaaaaccggcctcccagaggccggctctttctgctgctcttagcggatgatgccccggggactttctgaaacagcctggcggaacagttcaatcagagcctcatcggcaggatttgccttttcaagctctttcatccggtcactcgcctcagccacggtgagattctcgcggtacaccacgtggtaacactgcttcagcacagcgaactgcgctgcggtaaagccgcggcggcgaagcccgatcgaattcagtccatgaggagctgccggataacccgagcagatgacgaagggaggcacgtcacgcacgacaatcgagccgccgcccaccatggcgtgctcaccgatatgcacgaactgatggacaccggcctgaccgccgacaatggcgaaatccttcacatggacgtgaccggcaagaccgacgttattcgcgaaaatcacgtcgttgcccacctggcagtcatgcgccacgtgcacgttcaccatgtagaggccgcgcgaaccaacccgggtgatgccctgatcctgcgcggtgccaatcgacatcgtgcagttttcacggatcacgttctcgtcgccgatctcaagcgcggtatcctcgccggcatacttcttatcctgaggcgtgcatccgatgcaggcacccggatagatctggttgcgttcaccgatagtggtccgccccgtcacggagacgtggctgatcagaacggttcctgaaccgatcttcaccttcgggccaacaacgcagaacggaccgatttcaacatcttccgcaagctccgcggaaggatccactactgacatcggatgaatttttgtcattgataccccttatatcaaactgcatcggctggattcctgaagcggaatcagcggaatccggccgtctttcagatcattcgtgaattgtacggcgggcgcacataagagtcgccttgcagacgagctctccgtcaaccgtagccgtgcagtcaaaccagccaatacccatgcggtccttcagatagcggccattgaagacgagcttgtcgcccggcagcacaacgcgcttgaagcgtgccttgtcgatgccggcgaagtagtaaatcgcgttcttgtcgttacgctgttcctcggtgaggcggcaggaggcaagaataccgcaggcctgagccatcgcttcaataatgaggacgccaggcatcacgggagcgttagggaaatgacccgtaaactggggctcattcgccgtcacgttcttataggcaacaatctccgtgagatcatcattgatcgactcaacccggtccacgaggaggaacggatagcgatggggcaggagctccatgatctcataaatcttcattgtttttgacatttttatcaggcggcccgggggaaaaaggtcctctctgcgggtgacgcctctccataaaagccgacaaacgccggcgtggatttaagattcgtctgaaccggaacgggcggctttcagggccgcaatttcccgttcaagcgacttcagggtctttcgcatgtcggtgaggtttcgtacgagcaccgccgtgcgttcggattcgcgccgtggctgcgcggggtaaatgccgatcatgacttcaggcttgtcaccccagctcacgatcggagtagccggacccaccatggagccggccggaatcgtaatatggccgttgatcatggcagcgccgcccagcacacagtgatctcccaccgttgtggaccccgcgatgccgacgcagccgcagatcacgcagtgcgatccgatgcggcaattgtgcccgatctgaacctgatcatcaatcttcgtgccgtttccgactactgtgtcatccagcgcgccgcggtcaatcgtggaattggcgccgatctcaacatcgtcaccgatcgtgacgccgcccacctgcgggatcttgatccattccccggagaaaggcgcgaaaccgaagccttcaccgccgatcgtggcacccatattgatgatcacacggcgtcccacgtggcagtggtcacccaccttggcctgcgggaaaagatgcgtgtgttcgccgatttcggtcttcgcgccgacataggcgccttcaccgatccacacaaacgggccgatcttcgcgccggaaccaatcaccgcgccggcatccacccgggccgacggatcgatctcagcatcggccgcgatcaccgcccgcagatcaatgccggactcgggttccggaaacgccccgccctccatcgcctggctcgcccatgcgtaccacgcatagggattcggcgtgaaaaccacgggtcgggcgaaatcctcaagcttggaaagtgattcttccgcggcgtccggcacaaccagaaccgcggcgcctgacgcggcggcctctttcagcgcctttggattcgacacgaaggcgatatgcgcgctgtcagcctcttcaatcggacggaacccttcaacacggatcgcctcagcgccatgcatcgggcgggaaggaagcctgccgcccgagagttccgtaacgcttgcgatcagatcagaaaccagaaatgaagatgaatcggccatgacgctcctttccttcagtgtctaactaggctatcaacagaaaagcctgttccggtactgccggaccaggcttcaaagaagcccggcggtacagacggcgcgctcttctcttcaggcagcaccgtcaaccgtcgggcggaaggcatcctgattacttcagggccttcaggaccttgtcggtaatgtcaacacgcgggctgacatacacggcgtcctggacgatcaggtcgtagttttcgcggcgggcgagatcctgaatcacctgattcgcgcgggcgatcacgatctggatctcttcattctgacgctggccgagttcctcacggaaggcgcgctgttcacggttcagagcccgctctgcctcagcaagatcacgctgttcattgagccgctgattctggctcatcgccggagcgttcttctggaaggcatcggcacgggctttgaagtctgcagcctgcttatcgatgtcagccttgcggcgggcgaattccttctgcagcttctcggtcgcagccttggccggggccgaatcatgaagcacgcgctcaaggctcacgacgccgatcttcggagccgcatccggcgctgcgtaagcagggctggtgcaggcgatggcgactgccgccgtcgctgcgaggatggccttggtgaaaacgttctttttcatcttaaacaaacctttctatgaaattccttcggaatacattatcccgaccggaaacactctagattctaacctgttgcccctcgatcagaagctcgtaccgatctggaactggaagcgctgcacgtcgtcgcccttcttcttgttcagcgggaaggcgagcgagaacttcagaggtccaagaggcgaaatccacgccacgccgacaccgactgagtagcgcagatcgctgaggctcacgttgctcgtatcggtaccctgattggatcctgaaccgccggaaccccagacccagccgccgtcgaagaagccgaaggcgcggagcgtccggtcagcgccaggcagcggcacatagagttcagtggagaagtcgaagagcttctgaccgcccatgttgtcgccgttcgtatcacgcgggccgagagacgaggtttcgtagccgcggaccgaaccgataccgccggcgtagaagttcttgaagaacgggtactccttgtctccgtaagcaccggcatagccgagttccgtattgaaggccagagtcacattcttcgaaagcggccagtactgctgcagctggtagctcaccttgtagtagcgaaggtcaagcaccgggagcgacacttcgccgctcacacgctgatagcggcccttgttcggagcgagagcgttgtctcgggagtcgcgcgaccagccgaaggtggctgcgatcgacttcggatccttgccgaagttatcgacgtaatcccagtagcgctcaggcgacgcgtcaccggaaccgcgggtgccgcgcagcgtcaccttggtctgctcaatcttcgcgccaaggaagatacggtcgagctcagtcaccgggatgccgtaggacacagcggcaccgagcgtctcatacatcacgttcgcgacatcgaggtcatcgaggtcgacgcggcggtcgtacacgtcaatcgtgcgggagacgccctcaggcgtcacgtacggctgcgtgagagagagcgcgtaggtgcgggtcgaatcggaattactcgcttcgatagaagccgagttgccggtaccgaagatgttgttctgggaaatacccgccgacaggatgatgccgtcagaggacgagaaaccggcgccgagggagatggatccagtcggacgttctttcacgtgaaccttcagatccacttcgtcacgggtgccgggaaccggaacgggttccgccgtcacttcatcaaagaagccgagacggtcaatacggtcacgcgagagcttcaccttatcagagtcaaaccacgacgcttcatactggcggacctcacggcgcaccacttcgtcacgcgtgcgggtgttgcccgtcacgaagacgttgcgcacgtaggcgcggcggcccgggtcaaccgtgtagaccacgtcgacggtgtgatcggcgctgttcgtcaccggattcgggttcgctgtcgcgaacgcgtagccgagaaccgagagcttatccttgatggcgctcgagacctggttcactgattcggcgttataggtttcgccgatcttcacaggcttcgtgagttcagagagctggtcattgaggccgagctgctcaccttcaaccttcacggtcttcaccttgtagggaaggccttcgtgaatgttgatcgaaataaagacgtcttccttgttcggggcaatcgtcacctgaacggagtcgagacggtagtcgaggtaaccgcggttcaggtaccaggagcggatgctttccaggtcgcccgcaagcttctcacgcgaatactggtcacgcttcgtgtaccaggtaaaccagcccggagtgctcagctgcatcacgtcacggagctcggaagccttggccgccttgagacccgtgaaatgaatttccttaatggaagaagcggcgccttcatcaacgttgatcgtcacacggacgcggttgcgttcgagcggcgagacgttcgtcgtcacttcaacgccatagtgacctttggcgaggtactgacggcgcagttcctgtgtcgccttgtcaagggtcgcagagttgaagatacggccttcagcaagacccgccgcgcggagcgacttctcaacttcctgcttatcaaacgccttgatgccgttcgtctcaatcgtcgcaacggccgggcgttcgatcagatgcacaacgacgacatcgccattctcagtgagattcacatcgcggaagagtcccgactgataaagcgcacggatggcgagcgcgcctttctcaggcgtgtattcatcacccacgcggaagggcagatgcgaaaacaccgtgccaggctcggttcgcgcaataccctcgatgcgaatgtccttgatcgtgaactgctgagccgccgccgcgagcgacagtgtcgcaaggacagccgctactgcggttttaaaggtaaaagtcttcagtgtcattggtctttatccgcccaaaacttctttcccccggcaaggagtgccgacagaaggctaaatttcgaggcattagaagctaaagctaaagtttctctattctaaccaccaaaaaggcgtgtgacgtcgttcatcagcgcaatcagggttacaaagagaatcagaaggaggcctgcccgctgcgcgatgccgatggcctgttcggagggcttccgccccacgatgagctcatagaggtacatcgcgaggtaaccgccgtcgagaaccggaatcggaaggagattcagaatcccgaggctgatcgacatcatcgagaggaagagaaggaatggaagcagccccacctgcaccgcctgccccgcatagtccgcgatcgcaaccgggcctgagaggttcttcacagacgcttctcccaccaccatctttcccatcacgcgaagcgtcagcacggacatatcccagagctttccgacacccgccgtgagtgaatcccagggaccgagtctcacccggaccacgtcggggaagcccccgacccggataccgatctgccccacattctttccggtcttcggatccttcacttcaggcacgcggatcttaagagaaaccgtatccgttcctctcttcacgccgagcgtcatttcgtctccgcctgaggctcggagagtcttcacgagcatcacggcgcccgtcaccggattgccgttcacggacgcgatctggtcccctttccgaagaccggcgctctcagccgcggatcccttcattacctcttccaccggcacggcgccgtctccctgccagggaatcagaccgacattttcgagcggattggttttattcggatcgcccttgaaattgacactccggagatcgatcgggtagcgctccgcgtgctcccctgtcttatccgcggcatcccgcacggtgatcgttgactcggtacccgcgacgcggaggagcttcatctggagatcggcgaaagtcttcacatcgccgtccccgacaccgatcacatactgtccgccctggacaccggccgcggccgcgggcgtcccctgaggaggagcggcgacacggctcgaaagttcatacgtcccgacaaacccgattccccagagaatcagcaccgcgaagagcagattcataaaggggccggcaaagacaatcagcgccctctgccagagtttcttcccctcaaagtcctcggccttatccttcgcggtgagcgccggagtcgtcggatcgcgggagtcgagcatcttcacgtagccgccaagcggcagaagcgaaagcgcgaactcagtgccgctcttcccccggatcttccagaggatgggaccgaagccgactgaaaaacggatcacccgcacgccgcagaaccgggcggcaaggaagtgccctccctcatgaatcacgacgaggagctcgagggtcgccgcaaacgcgagaagcgttatcagaaaagtcaaagtaaaagtctccggggagagatcaggaaatccggcccgagcggatcaggctgtccacgaagctgcgggcttcgcggtcagcggcataaatatcggaaagcgacttcggagccggaagcaccagcccggagagcgcctcgcggcaggcccgcccgattccaaggaagctgattttccggtcgaggaatgcggccaccgcggcctcattcgccgcgttaagcacaatcgtcgcggaatcgcccgcctcaagcgcttcccaggcgagcttcagctgcgggaagcgttccagatccggggcttcaaaggtaagaggctccttcagcttagtaaagtcaagcgccgcagcgccggactcagtccgctcaggccaggccatcgccaccgcgatcggcgtacgcatatcgggaacgccgagctccgccatcaccgcgccgtcctcaaaggcaacgcctgaatgcagaatgctctgcgggtggatcacaacacggatcctctcaggcggaatatcaaagagccagcgcgcctcaatcacttcgagcgccttgttcatgagggtagcggagtcgaccgtgatcttccggcccatcttccacctcggatgcgtactcgcttcttccacggtaactcccgtgagatccattctgcgaaggaacggaccgcccgagcaggtgagccagatcactgctttttcacgctgggcaggagtcgctgcagcaagcgactggaaaatcgccgagtgctccgaatccacgggaagcagttcagcgccgccctcccggatcgcctgctggagaagcgcgccgccgcagacaacgctttccttattggctagcagcatgcgcttgccggccttcgccgcggcaaaagcctgcggaagtcccgctgcaccgcttgccgcgagcagcacggcatcggcctcagggtcagaagccgcctcgcagcaggcagcttcgcccgcggctgcccgggtggaaagaccgcgctccttcagggccgcctgaagctcagggagcttcgactcatccgcgagcaccgcggcttcagcgccgcacgcctcacacgccgcggcgagttcttccgcgcggctgccggcagcgagaacaccgacctgccattcgccgggatgacgggaaacaacgtcaagagctgagcggccgatggaaccggtcgcaccgagaatattgatcttttttgccatagtggatggattctaaccgggacgggacgatctttcctgaaaggggagtttcggtgtggggtgccctcttttcagaaggaccgcttcacattgacagaaagcccggtttcagattttccgccttcagtcacgccgatatccgcgccgacaccgaaattccagagcttacgcctcagctgcaggcctacagaaccaatgccggagaacgtccgtccgtctttggcgcggatcgacccatcctcttccaccgtgcctgtgtcacccatgctcgccacagcgccgatcgacgtattcacctgaaccgcggttttgctgtccggctcatgaagcagcctcattccgatgccaaccggcacctgctgcagactccgcatttcacttgtgaccgcggctgatcccccgagctccgatacgagccccatcgcagaggtatcggtccggaccgcccggtaacccgcgaacggcacaacctgaacaccggtgccaacctgaatcggaagctcggcccgcatctcagcggaatagatattctgtgtcggatcgggagtaatgccagcgagcgtgagcgccaccggaatcacgcgggatgtcccttccgcccccgcgaaaccggttcccgtgaactgatagcccttccctttcatcaccccgccgtatccgtagaagccaacaagatcaagcgggcccgcgtcaacgagacggatcgcgccgtcttccttgcgggttagcgaatgatccgcttccttcagcggaggcagcactgagtcatccgcgctctcagagttatcgccgttttcatccgcggcttctgaaccggcagacaccgggacggcaaggagattgatcccctgggggtccactcccccgctctcaagatctgagagcctcaccccgtaaaaaccggtcggttccgcggtcaccgccgcgatcagagtctcaagctgcagcggcgtgaggatcggggagggctttttcgcggttttcaggcgaaactttttcccctgatctgacgccttcccgcttttaacggacgttatcggagacttacggggggtcttcttccttgctgtctgacgcgcgcgggatttcggcttatgaacagactttcctgccgacgccactttcagcagctgatataacggatcacgggaatgatgagaagccccgtaaaccgggccagcggcaacaaaaaggaacaaaaagaaaaaagtgagcatataccgaacgcaagcgccgatattttcatcactttctacctttcttcccactggcggcatagagcagaagccccttttttattcgcaataaagctaaaagataggataatagaaaccgttaatggggggtaccccgagaatttatccaacctaaggatcacagcgctatggcaaagaacgtcatcatcatgggagcgacatctgggattggagaagcgctcgccgtccgatttgccgccctcgggtgcgatctggccattgcaggccgccgcgctgaccggctccaggcaattgcttcgaaaatctcctctgaacataacgtccgggtgatctggagtgaaatcgatgtccggcgtgaagacgcgccgctcaagatttcacacctcgcgtctgaaatcggcggtgtggatctctatattcacgcagccggaatcggtcacgaaaatgttgagctcgatccgaagatcgaaatgaacaccgtggataccaatgcctccggctttgtccgctgcattgatgccgttgtcacgctgctccgcagtcagggaaccggcggacagatcgccgcgatcagctccgtagccgcaacgcgcggtctgggcgcctctcctgcctactccgcgacaaaagctctccaggctcactacctcgaggcgctccgtcagatggtgaacgcgaaagggtgggacatccgaatcacggatatccgtccgggctttgtcgatacgccgctgctcgaggggaagaagtacccgatgacgcttcctcttccctacgccgctgaccatatcgtcaaagccattctgaagaagaagaccgtggcctggatcgactggaagtatctgctgctctgcgccgcatgggtgtgcctcccgaagatcgcctgggagaatctccctgtgggtttcgtgccgttctataagccggattccggaaagaaggccgccgccgcgaaagcgcctgacgcatcgaaccctgcggagactcccgaagctcccaaggcttctgcagccgcagccgaagataagcccgaaggaaagtaaccgatgcccggtttccgtgaatccgtgcgcagctgcgcttatgagaaatattcccagttcagcggccgcacgggccgcgctgaattctggtggttcatcctcgcgctcttcctgattaactgcacgcttatcgtgatcgggatcatccttcccttcattcagacatctattctcggcggttttacgctggtgattctgagtcccttcgctgcggcgctcacgcggcggctgcatgatgtgggcctttccggcaaatgggtagccgcggctttcattatcgcggttatcgccggaaccgcgggaacttactccacgctttactgggcgaagtttgttacgccggctgcctttggccttctctttctgatatcccttttcccgggttcaaaggctgagaacacctacggtcctgtgccctgagagaaagtgtctgagaaacaaaaaagctgcagaaagttctgcagcttttttgttgccttcagactccctgcggaagactcaggcggataaaccccgcctgagtgccttctgtatgggagatcagagaatacggcggatccagccttccggcgcttcaatctcgcaggactggatcttcagcagcgtctcacggatcttgccggagatttcaccgatcttatccatgccggacgggaagtagatatcgccgtcctcagagtgaatcatgccaaccggggcgagcacggcagccgtgccacagagggcgcattccttcatgtccttcacttcggagaacttcacctgacgctcgatcaccttgaggccgaggtagtgttcgccgacatagacgagggagcggcgggtgacagacgggagaatcgagttgctcttcggaacaatcaggttattgtccttatcgacgaagagcacattggcgccgcccgtttcctcaacgtacgtatgagtggacggatcgaggtaaatgttttcagcgaatcccgcacggtgcgcttccatcgtgggatagaggctcatcgcgtagttaagaccagccttgatgtgaccggtgccgcggggagccgcgcggtcgtactgagcgacctgaatgcggatcggcttcacgccgccctggaagtaggatcccaccggcatcgcaaacaggcggaaaaggaattcgtgagcgggagcgacaccgatctggggacccgaaccgatcatcaccggacggatatagagagaagcacccgtgccgaagggcggaacccaggcggcgttcgccttcaccgtttcatcgagagccttcaggaaggtctccttcggaagcggcggcatttcgagacggcggcaggtgttctgcatgcgttccgcgttctgatccggacggaaagtcacaatgtgaccgtctttcgtcgtgtaagccttcaggccttcgaaacaggactgggaatagtggaaaacgcaggctgcctcagagagcgtgatatcgggatctgtggtcagaccaccctcttcccacgcgccgtcatgccagcgggtctgccagcggtaatcgatcggacgataagtgaacccgaggttggcccaatcaagatttttcttttccattttgcttataaccttcaaaaactttcttgctgaaaaaattctgcggtcactgaccggtttcccaaacctttctgctcagaacccggttcagcttgtgactgaaaggattcaggcggacgttatttcagatatccgcgccagaaggggcttagtgcgcaaggtcttcacgctggctaattcatttaatcgtacacccggcacgaataagtagggccgggaatcacgggaaagtgtgtataaaaaagcctttcccgcaaaggaaaggcttttcagagactctcaggatcaggctctgtgatccggaatcaggaaattgtcgtgagaagaatgatcagcacgactgccggcatcaccggcacgcaggagtccagacggtcaaaccagccgccgtggcccggaagaaggttgctggaatccttgatgccggcctgacgcttcgcggctgattcaagcaggtcgcccgccatcgagaacagcgtgagcaggagtgtcaccacaacggcggtgaggaatccggtctcggtgatcaggacagactggaatacatcagcccggccggcacatgcgatgccaatcgcgaacagcacgcaaagcccaaggatataggcgccgagcgctccttcccaggttttcttcggggagatagcaggcgccatcttcatgtcgccgaaaatctttccgccgaaaaaccggccgcagaaatacgcgcagatatccgcgctccacacgatcgccaggacggaaatcaccatctgccagctcccgatctcaaaaagccagagaatcgagtaccaggcaagcggcagcatcagaaccgccatggcgccctgcgccgcaacaggcagacggaacccggtattccgatcacggaagagaccgaccgtcagcaggaaccagaccgcggcgtctgccgccgtaagcgcgaggagcgcctgaggcctgagacgaaaccccatcacccagagcgcgtaaagcacgattcccattactgcggcaaccggaagcgcggctttgacccccagcatcctcagccactcccagatagccgccgccacagcgaaggtcatcaccgcggcgaacgcaagcggcgacaggtaaatggagcccaccagaacgatgagcaggatgatggcagtaatgactcgttgcttaagcatttgaaatgcaggccgctttcgcggcccgccaataaaaggtgttaccaggatcccgcgggggaatccctttcagctagccctggagctgttcgctcgtgagaccgaagcgccgttcgcggccggtaaaccaccggatcgcttcaagcaggtgctcttcccggaaatcgggccagagcaccggcgtgaagtaaagctcggcgtaggctgcctgccagagcaggaagttcgagatccgggactcaccgccggtgcggatcatgagatcaacgtctcccgcccagggaagcgcgagatgacggctgatcagttcctcatcgatcatggcggggtgagacgcagcgagcggctcctccttcaggatcgatctcactgcctgcacgatatcccagcggccgccgtaattcgcgcagatggtgagctgcatcgcgctgcagtgctcggtcgcccgctcggtttcctcgatcgcctttctcaggggatcagagaaggccgagacgtcacccgccacatgaagacggatatcgttctttacgagcttttcccgctggttcaccagcatcagcccgaagagccgcatgagggcgctcacttcctcctcagggcgcttccagttttcgctgctgaaagcgaaaagcgtcagcgccttgattccggcgcgtctcgcggcttcggtacagctttccaccgcggaaactcctctcctgtggccttcgactcgcggcatatggcggtttttcgcccatctgccgtttccgtccatgatgacggcaacatgcctcgggagagttttcaccggtttagcttcctccatcagttctccagtcatgccgccatcagacggtcatgatttccttttctttctcttcagtcaccgtatcaacttcagcgatgaacttgtcagtgagcttctgaatgtcgttatcggaaccgcgggcttcgtcctcggagatctccttatccttcaggagcttcttcacggcgtcattcgcttcacggcggacattgcggatcgcaaccttgccttcttccgcaagacgcttcacaaccttcgtgatctcgcggcggcgctcttcggtgagcgggggcagcggcacgcggagcgtctgaccgctcgtcaccgggttaagaccgagatcgctctccatgatggccttttcgatcggcttcacgagggtgcggtcatacggctgaatcgtgagcgtacgggcgtcagccacgttcacggaggcgcactgcgcgagcggcgtgcgggcgccgtagtactcaacataaatggagtcaagcagacccgtggaagcacggcccgtacggatcttgcggaactcttccctgaggccttcaaggctgcgcgtcatcttgcgctcggtctgggaacggatttcctgaatcgtcgtcataaaaatatcctttgctttgttttaatggttgcgggtgctcaggagtggacaagcgtcccttcttcgagccccgtgcaggcgcgcttcagggcgcccggcttgaaaatattaaacacccggatcggcagatcgttcgtgcggcagagggcaaaagccgtgccgtccatcaccttaaggtcgcgcttcatcgcttcatcgaacgtgatatcagcgaacttcgtggcggtcggatccttcatgggatcggccgtatagatgccgtccaccttcgtcgccttcagcaccacctcggcgcccatttccgcgccgcggagcgccgcagtcgtatccgtcgtgaagaaggggttgccggtaccggcagcaaagatcacgacacggttctgatcgagataacgcagcgccttgccgcggatatagggctggacgacctgctcaaggtgaagagctgactgaatacggaccggaacacccgtcttcgtgagcgcatcctgaagcgccatcgcgttcatcaccgtggcaagcatacccatgtagtcgccggtcgcgcggtccatgccgttcgcaccaagcgcaacgccgcggaaaatattgccgccgcccactacgatgcccacctgaaccccgatatcgagaatcgacttgatttcgccaaccatgtagttcagcgtatcgcggttgatgccgaactggtcgtgccccatcagggcttctccggaaagcttcagtagaacacgcttatagataggttttgcttttttctgatccgacattcgctgtatctccaggcgggctaggcacactgccgccctaataacatattagtaaggcatggggataatactgcaaagacgcacctttgcgctacggcttggcagaaggctcccataaaaaaaccgctcggagagacatctcccgggcggtttttcagccagaattccgctcctcagaagaacggaattccggtacaggccattaggcctgcttggaagcggcaacctgagcggccacttcggcagcgaagtcgtcagacttcttctcgatgccttcgccaacgacgaagaggtagaaggcagcgcaggtggcacccttgctcttcagcagctggccgacggtgatcttgtcgtccttcacgaagggctggttgagcagcgtcacttccttcaggaacttcttcacggagccttcagcgatacgctcaacgaggttctcgggcttgccggactcgcgggccttttcgatagcgatacggcgctcggactcgatcagctcagcgggaacgccgttctcatcgagagccttcggcttggaggcagcgatgtgcatggcgacgtcgtgggcgagttcatcgtcgccgccgatcatgtcaaccatagcggcgatcttggcaccaccgtgcacgtacgtgtcgagacggccctgggcttccacgcggataaagcggcggaaggacatgttctcaccgatcttgccgacgaggcccgtgcggatctcttcgagggacttgccatcaaccgtcagggcggagagggcagcgatgtcagccgggttcttttccgcgacgaggcgggcaccagcttcagccatggcgacgaagtcagggttcttcgcaacgaagtcagtttcagagttgacttcgaagagagcgccgagcttgcggtcgtcagacacgtaaacaccgacaataccttcagcggcgacgcgagcggcagccttgttggccttgttgcccagcttcacgcggaggatttcctcagccttggcgaaatcgccttcagcagccacgagggccttcttgcactccatcatcggagcgtcggtcttctggcgaaggtctttcaccattgcggcggtaatagcggccatttaattctccagatactaataaatttgatacgtttgaaaatcgaaagggggcgcacccaagactgagagcgccccctgaaatgcttcggcaggaacgcctgctgaatgactgattaggcctgagcggcagcgtcagcagcggtttcagcggcttcgacttccacgaactcttcagccggatccttgtcagcaccttcctggtgttcagcggcgccggcgatgacggcgtcagcgatgcaggaggcgtagatagcgacagccttgccggcgtcgtcgttacccgggatcacatagtcaacgccagcggggctgctgttggtatcgacaacgccgataaccggaatgcccagcttgttggcttcctgaatggcgatcttgtgatagccaacgtcaatgatgaacagagcgtccgggagggaggccatgtccttgatgccgccgatggaacggttcagggcttcgatttcacggttgaagtcgagagcttccttcttcgtcatcttctcaaggccgccttcagcgacggtgtcttccatttccttgaggtgcttgagcgtgttcttcaccgtcttgaagttggtgagggtgccgccgagccaacggcgatcgacgtagctcatgccggcgcgctgggcttcagcagcgatgatctcgcggccgccgcgcttcgtgtcgacgaacaggatcttgccgcccttggcagcgaggtcgtgcgcgaacttctcggcttcagcgagcttcgcaaccgtcttctcgaggttgatgatgtggatgtggttgcgggagccgaaaatgtactgagccatcttcgggttccagaaacgggtctgatggccgaagtggcaaccagcttcaagcatttcacgcatgctaaccatgttgattctccaaggtttggtctgacatccgggtctcatgcctgcttgcataagcgggcacctcggtaaacccggatgcgctatttaaggctcccgcccagaggacggacagccagaaaaaaggttaagtttgtctgccccggttggagcaggcgtgcaattataggataaattgagatcccgctcaagcgttttttatgaattttctttgagctttagccgcacttccctgccccgcccccgcctctggtgtaccatgttggctaactctggttttcaatatgacctgcgccgcgggaagcggccgggcgtcctgcgcccccttcctctcttcccgcgtccggggacaatttaaaaatggcaaaagaacagatccctagcattcatatctgcacgccggaagaaatcgaaggacagcgcaccgcctgccgcctcgcttccgagctgcttgactacatcactccttacgtcgaaccgggtatctctacccttgagctcgataacctcattcaccgctatacggtcgatgtccagaaatgccgcccggcggaccttgggtatccgaacgctgaaggagtccctttcccggccgcttcctgcatctcggtgaataatgtcgtctgccacggtatcccgtcggaaaagaagctgaagaaaggcgatatcgtgaatatcgacgtcacgagcatctggaacgacttctacggtgatacttcccgtatgttccttgtcggcaagccgaccatcgcgggagagcgtctcgcccgggtgacctacgaatgcatgtggcgcggcattgaggccgtgaaacccggcaatactttccgcgatatcgctgttgcctgtgaaaaggtggtgtcagatgccggttactccacagtgcgcgagtacggcggccacggtatcggcaaaggtgttttccacggtgagccctgggtgtctcactatcccctttccccgaaggatttcccgcccgcgggcatcgtgtttgagcctggcatgatgttcacgattgagccgatggtgaatgccggccgccgccacattctggatctcggagacggatggacggtggtgacgaaagatcattccctttccgcgcagtgggaacacaccctcgtcgtgacagaaaccggttacgaggtgctcacgcattcggatggctgcccgaagccgccggaatgggcgacccagaagtggtaagaaatcgctgagcctctcgctcagaacaaaaagccgcggaataaaatccgcggttttttctgattttaggcagacgttatccccgtgatcaggccttcttctccgcgaaagcccaccagtagacgagcgccaccatgaaccctccgacgaggtttccgagcgtcacagcggagaggttatagaagatccccggaatcgtgatgaccgaggggtcgaatcccgcgggagccgggaaaccgctcgaagcgagaaggtatcccatcggaaggaagtacatattggccacacagtgctcaaacccaagcgcaacgaaagcggagaccgggaggagcacagcgagaatcttgtcagctaccgagtgagccgcgaatcccatccagaccgcgaggcacacgagcacgttgcagagaatgcctttgaagaagagtgtcccccagccaagcgacaccttgccggccgcaatcttcatcattgtggctcccatctgcccaagtttcggggtatcagagaggtagacgagtgtcaccagaatcactgcgccgaccaaattgaatatccagacccagatccagttcctcagcatgccgcccacgggaatcttcctcgaggcaagagccccaatcatcaaggagtttcccgtaaagagctccgcgccgcagatgatcacgagagcaaggccaagcgagaacatcagggctcccgcaaaacgctgcaccgcgaaggacagcgagctgtcagccatgaagagcgtgaagtaaagtccgccgagaccaataaaaaagcccgcggcgagcgcgagcggtatcagtctggaaagcgtcagggcatttttcgtgaccccgatcgactccgccttccgttcaatcgcggcaggggcaagcgaatcaatcgaaatcacgggctgcgaggcggcgccctctttcttcaaatcagtcattccttattctctccttaatctggaagtgctgaagaatgatgattttaaaggaaaattacattattcaaaaggctactgaagtatcaggcggcatccctactcaggggcatgccgcctgtcacttatggtgataccggatatccgtcatgccctctgatggactacagaaaattaggaaagcgcggttccggaatacgtaccgcgtaccgtaacctttccttcccgcttcaggaagacgccgcgcgacatcacatccgtcagttccccgttcgagcgaaggaaacagagatccgcgtcccgcccggtttccagccggcccttcggtatcaggagactgtcagccacattgctcgtaaggaaaggcagcgcgcggcggatacctatctcgtgcgcgagaatcttccaggcgcggaaattattccggatgtcgagagtctgcagtccctgcagcgtcccgtcttccgcgtaaaccggcagagcgccatgaccgtcagtggagagcgtgatgcggtcttcgggaacacccccggaaattgctttcagaacggcatccgcggctttctcgggctcatccgtcgtgaaatcgagcatcccgcccgcgcggccgaactcaatcgccgcatccaggtctctcgcgcagtgcgtcggtctgaaatgctcaatcggaattcctcgcttgaccgcgtccataaacatgccgaacgcgccgcccagcgttccgagatggatatgaaggaaaccccgcttgccggccaggcggcctccgagcctgatttcggagacgagccgcatcagctcttccatcgtcataaaggaagcgcgtgtatcggccatggcaactttgaccccaaggcactcgggaattgtgtagagatccagcttcacggagccggtaagcgtggtcggaggataggcgtagtttgaggtccacatccaggtggagagaccttcccgcctcaggccgcggatcttcgcgagcagagaaaccaccgggcgggaaatgacatcagcccccagaacgccgactacagtcgtgtcgccgcactccgctgcttcctcaacagaaagctccggcgcccgggtatgctctccgccctcaccgcctccgcctgtcacgtgcacatgctgatcgataaatcccggaagcgccttcgctcctgacatatcaatcttctgaagccctgggattcccgggtcaagcgagtcgccgattgcggcgatccgcccctcgaccacgagaatatccttcactccccggtaatccggggcatagagctcagcccgctgaaaaagaaaacttgccattggatttctcctttcttttttcgatgcgggacttcggagacggcctcccggtctacttcgaagactcgcggttgaaaccgtagacccggaccggccgttcctcgacaccgccgataccgcggagcctgtcaagaacctttttcgcgttttcgaccactggattcgtgctcgaatcgcttccgatctctttctgcttcgtttcacgggcgattgtcatgaagagcttcacgcggttcgcgatattcgcctccgagctgccggcttcaaagtcgagcgccatcaggttggattccggatagcggccgcggattgccttcgcaacccccttgcccgtgatgtggttcgggaggcagccgaaaggctgcagacagagcacattcggaacaccatgattgataaagtcaatcatctctgccgtaaggagccagccttcaccggcctgttctccgagcgacacaatgcctttcaccgaggtctgcagttccttgaagtccgcgatcggcatatagcgggtgccggcgagcgcttcgcgcatcgagcggcgcagagactcgattcggcccataaagaacttcccaaccatcgacttcaggaaagagccgcggcggaacttctgctctatcacgctgtcatccaggcagtagaggaagaagtccgtcatatctgtcagcaccggttcgccgccttcagccagaatcatgtccgtcaggtgacggttggcgtccgggtgatacttcagcagaatctcacccacgatgccgacacgcggtttttcgatgtcatcctgcgggatggaaccaaactcgcgaaccatcgggatcatgtcagactcgaagtcttcgacgctgttacggaagctcacatcgcgggcccgctcgatccactcgtcaagcttctccttcgcgtcacccttgaagagctcgtgagccttggtcgcgtagtagagcctctgcagcatatcgccgtaaagggtcgcgatcatcgcgcggcgaagtgcaagcggcgaaatcgagaaacccggctgttcattcagagaaccgccagagagcgacacaaccggcacctggctgaaacccgcttctgccagagcgcgatggagcagcgcaatgtagttagtcgcgcggcacggaccgcaggtctgagccagcatgagtgccgtatggtcaggatcctcaacgttttctttcagcgcgttcaccagctgaccgatcgtgacgatagccggatagcaggcgtcgttattcacgtacttcagaccagtttcaatcgcgcgcggcgacgcaaccggaagaagcttcagcttgtagccgcttgcggaaagggccttttccagaatggcgaagtgaatcgccgacatctgaggcgccagaatcgtatgggtttcgcgcatcgaacgcacgaaaaccgcaggcttcgccggtgcctttgcaggcgtctcgtcagactcgtctgccttaggcatgccacggcccgccttgcgctcttccaccgttgcgaggagcgacgcgatacggatcttcgcgggtccgagcgaatcgccctcgtcgatcttaagaagcgtgtaaagctttcctgaccgctgcaggatttcggccacctgatccgacgtgatagcatcaataccgcagccgaaattcgtgagatggatcagctcaacacagggctcggtcgccgcgagcgcggccgcacggtaaagcctcgagtgataagcccactggttgacaacacgcagcttaccgggttcaggcgcaagctgcatcacagagtcttccgtcacgaccgacacgcccagagacgcgatgtagtcgggaagcccgtgattaatcagcggatccacgtggtaaggacggcctgcgatcaggaccaccgtcttgccggcagcctgagcctctgagagaaccttctcgccctcggcctcaagcctctgcttccaatccgccagcgcgtcgcgggccgcatcataggcacggtcaactgccgccccgtcaagctgcgggaaatacttcagcatcacgcgcttcacgaccttcttgtcgctcaccagcacgaaaggcgtcagaacctgaggctccacaccggccggaagatccgcgttcaggcggaccacttccgggtagcccgcgaccacagggcaggcaaaagtgttatccgactccttgaaaactttctcttccttagggatgcaggggaaccagatccgcttcacaccgtgcgtggcaagccacgtcacgtggccgtgggccagtttcgccgggaaacagacagactgagatggcatcgaggaaagtccggagtcaaaaatggacttcgtggactccggtgacagcacaacacggaaacggagtttcgtgaaaagcgtgaaccagaacgggtagtgctcgtaaatattgagcgcgcgcggaatgccaatcacaccctgaggcgcgttctcctctgcgagaggctccccttcaaacaggtgctgcagcttccaggcgcagacgttattagtcggctcttctttctttttcgcgccgccccgggcaccgaagtcgcagcggttgccggaaataaacttccggccattgctgaaccggttcatcgtcagcatgcagcggttgttgcagcccttgcagcggaagctgcgggttaccacttcgagcgcctcaagagaagcgacatcaagtttcggtgcgggcagattcctcatctgcaccttttcacgcgcgatcagagcgcagccataggctcccatcagaccggcaatatccgggcgaagcacgggcttcccgagatgcttctccaggactcggagcagtgcgtcattcaggaaggatccgccctgcacaaccacatggtcgccgagctcttcagccgaacggagacggagcactttgtaaagcgcgttgcggatcactgagtagcagagaccggccgcgatgtcaccgacatccgcgccttccttctgcgcctgcttcacacgggaattcataaacaccgtgcagcgggtaccgagatccgcgggattcttcgcaaaaagcgccttatgcacaaattccggcagtgtcaggttgaggctcttcgcgaatgtctggatgaaggcgccgcagccagaggagcaggcttcgttgagcttcacctgctcaatcacgccgttatgcgtcttcaggcacttcatatcctgaccgccgatatcgatcacataggtggtcttcgggtcaaggaatgtcgcggcgcgcagatgcgccacggtttccacttcactcagcggtgttccaaggacagatgccgccagatcagcgccgtaacccgtggtgcagataccccggatctgagcgccttccggcatctctttcagcagctcaatcacatgaggaagaagcgtcggcagcacggaacccgtgttgctgccataccaggacttcacgatgcgggattcgctgtcgagcacgacagccttcatggtggtggaaccgaggtccacacccatccagagatcccccttcgcttcggcaatcggagcccggggtgtcaccttgcggctgtgatccgcgaggaacttctgatactcctcttcactcgtaaacagagggggaaggctcgaggtgcgctttcccgtcggacggctgcgctcaatacgttcaatccaatcactgagcagaataggacctgcgcggttctcattctcaagccgcggggaaagtgagcagagcgccgcgccgtaggccacgatgaattggccgtcaggaatatcggctatcgtttcatccgtaagcttcagcgttgctataaagcgtgcgcgaagctgatccaggaagtgaagaggaccgccaaggaaggcgactttccctcggatcgggcggccgcaggccagaccgccgattgtctgatcgacgacagcctgaagaatagaagcggccacgtcctcccgccgggacccggcattcagaagaggcacaacgtccgtcttcgcgaacacgccgcagcgggacgcaacgggatagatcgtcttcgcgtcggccgcgagtttattgagccctgacgcgtccgtattgaggagtgacgccatctggtcgatgaacgcccccgtgccgccggcacagacctcattcatccgaagctccatcccatccgagagatagagaatcttcgcgtcttcgccgccaagctcaattgccacatccgtatcaggggcgacgagtttgatagcgcggctagacgcaatcacttcctgaatgaatccggcgcctgctgaaacggcaagatccagagcggcggatcctgtcagcatcagttcaaaggcggtatcggggtatttgacctgcagctccttcaggagcgtcagcgctgtttcctttacagccgcgccatggcgacggtaatcgctttcaaggatctttccttcgctgtcaacaactgcaaacttggcagtcgtagaacctagatcaagaccaatccctagaatcttcacaacttgactccaaaaccgtccaattccccggttacagaccggggaaggctgctgttaaacgatggaccggcaaaaaaacctgtgtaaattttgacaaatcggcagttgtataagaagcaaccagaatacaggtttacccttatcaaaaaccgaaccgtatatcgtcagacttcagcctggtagacgcttctgtaaatagtgagcacatcagaggcttcaagcggcacaaagtgtcccagagtttttcctccggtcacactctgagcaagctcttcaagcggcgcgtcaccagctccgagtgccgtgagagaatccggcattcccatctcgcggtagaaagccttcagccgggcaatgccttcgcggatcgcctcggcatcatcctcctccttcacttccatcacattgcgggcccactgtgccacgcgcttcggatttctgacaccgacaaaagcgagataccccggaatgatgaccgcgagcccttcagcatggatgatggatggcttccatccggagagagcgtgttccattccgtggcaggcccagtcctcctcctgtccgaggccatagaaaccgttatgtgcgaaagtgcccgcgagaccgatctggctccaggcgctgtagttcttgggctcgcggcggataatgcggccgaaatgcatgatggagcgcattgcggcttctgcctgaccatcaataaaacccgtatcagaagtattcgtgaagtagcgctccatgatgtggctcatcatgtccaccacaccggaggctgcctggacggcaggcagcgtaaagaagagctccggatcaatcagcgacataaaggatcggatatgctggctcgcagtccccagtttcttctcgccattcgtcaccacgacgcgcatggaaagttcggagccggccgccggaatcgtgaggattacggagatcggtgtagctttttcgcagacagcccggccgataaagaaatcccagacatcaccgtcataaggaattcccatcgacgcggccttcacggtatcgatcactgaaccgccacccaccgcaagcagcacatccggccgccattcgcgcgcctctgcgatcagttcacggataaagccaacctccgggttcggatgcacaccgcctttttcccggacacttaagcccgcatcaaggagtgactgctttacccggtcataaagtccggttcgtttgatggagcctcctccgtacacgagaaatacctttccgccggggaaacggcgcgccagacgtgtacctatttctgtctcaactccccggccgaataccagttccgttggagaacaaaaatcgaaattctgcatttaagccccttcaatctgaaacacatgttgcgatcagcttacaacaaaatttgttacgcgctaaggatcccggatacctaacctgaggggcattatttccgcttcaaaagtacccccccgaaagtgggatgcgggttattttcggcttgactttgactgtctgaacgtctatctttcaggccatgtcaaaaacggcctatctgatacgcgggggactgcaccggtctctgccgcgcacttttttcgcctggttccgccgctgcgggaaccagcggtcgccgttttttcaaggaatcttccctttgcgggaagattttttttgcgtccatgacaagcgccgcagcccgcgatcggtctttcggaccgtactgcaggccacttcgggacccctctcccgcaggcgcatcaattctcccatcactcatttttaatctgaggcaagctctatgttggaaaaacccctgacggttcgagacctgattgaacccgccatcatgaaggctggcggctgggtgaacacccatgcccatgcggaccgtgcctttactctgtcagacaaggtgctggaaatccgccgcacttatacgctgcagcagaaatgggatgtgctcgatcagctgaagaagaactctaccgtcgaggattattaccgccggttctgccagttctttgaactgatgatcagccagggcgttaccgccgtcggctcctttgtggatatcgacccgcagtctgaggaccgcgcgatcacagccggtctcaaggcccgtgagcactataaggatcagctcacaatcaaattcggcaatcagacgctgaaaggcgtgattgatccggaagcccgcaagtggtttgaccgcggcgcggaactggtggacttcatcggcgcgcttccaaagcgtgacgaacgtgattacggccgcggcgaagaagcctttgacatcattcttgaaaccgccaagaagtacggcaagatggtgcatgcccacgtggaccagttcaattcgtctgacgaatatgaaactgaaatgctctgcgcgaaaacaatcgagcacggcatgcagggccgcgtcgtcggtatccatggtatttcgattgccgcccactcacagaagtaccgtacgcgtctttatgaacagctgaagcgcgccaaggtgatgatggtgacctgcccgaccgcctggattgacacgcgccgcagcaacatgatcagcctttctcacaactccatgaccccggtggatgaaatgattccggcaggtgtcacggtcgctctcggtactgataacgtctgcgacgccatggtgccctggtgctcgggcgatatgtggcatgagcttcagcttcttgccacgggctgccgcttcgacgacttcgaaaacctcgtgaagatcgcctccgtgaatggccgtaaggttctgggccttgatccttacgattctgaaactgcccctgttaccgctaataagaaggagtgatcacaatgactgaacctctgaacaatacccgccatctcaccgcttcctccccgcttgcgatggagattacggcggagaatctgcttcagatcggagcggtcaacttccttctggatcagccgatccgtctgaagtccggccttgttaccccgatctacgtggataaccgtcagctgatttcccacccggatgagtggcatgacattatcgaaacgatggcctcctgcattgaggctctgaaactcgacttcgactgtgtcgcaggcgtcgaaggagctggtatcagccattcggccgctctggcctaccgcatgaataagccgaatctctacgtgcgccgcgctccaaagacctacggtgaccgctcgcgctttgagggcggcacggtggccgggaagaaagtgcttctgattgaagaccatatttccaccgggctctcgtgcctcgacgcgatcgacgcgctccgtgccgaaggcgctaccgtaacggactgcctctccatcacgaattacgacatgcctgaaactgaacgtcttttcgcaaaagcgggcgtcgctacttatgccatgctgcccttcagtttcattctggataaggccgaaacccttggcatgatcaatgccgctcagcatgaagatctgaaggactggcttgctacgccgtggacctggagcatgcgccgcggaagcgctgtgacaggcgcggaaaactgaccctcttccggatctcattttcctgatcagacgccgcgattcattcgcggcgttttttcgttcgctgtttgtgtttttcctttatgatgtacgccgttggcatctttttcagtctacgtaaaactccatgcagctcactcgttataccgactacagcctgagggttctgctctaccttgctgtggatcagaatcggaatccgccggtcaccgtcgacgaactttcccagcagtttcagatcagccgaaaccatctggtcaagatcgtgcacgaacttggtcaacgggggcttttgctgaccgtgcggggccgcgggggcggagttcgtcttgcgaaagacccgagtgaataccggatcggtgacatcatcgagcagctggaaggcggccgcgctgtcattgactgcaagaagatcggctgcgttctgactggaaagtgcggcctctccggagcgctgtggcgcgctatccgtcatttttttgatgaactgaatcagtacacactcgcggacgccatggatgccgaaacagtcgccgcagtggaagccctgcatccgacgcttgaagttctgatgcacagccgcgaaatctgccgccatcaccctgacgccgaagccgctgacaaaacatctgcccagaaaaagaccggcagaaaatcctcttccgccggccgtatcaaaatttacgaagttccgtaaatctctctaagactgcttcacttcctctgtcttccgttcctgtgaccgggtcacggaagacttgggaatgccctgtgccggtgtggccgtattctcaataaattccttacgcttcgtccacagataggcgaacgcgataatctgcacaatacctgcggcaatcatcgtcgcgcgaagcgagagcagcgaagcaatcgcgccgcccgccagaggtccgatgatggaacccgcctgctggaaactgaacgaaataccaaacgcgcggccgcgctctgttgatggtgtgtatcgcgtcaggagcgcgttgatcgacgggaatacaccggcaaaggctagaccgccgataaaccggagaacgatgaacgggtcaagagtgcttggaatcgcggagataactgcaaaaaggccggcaaaaagcattgaggcgagaagcaccggtttaaagctgaaagtctgacccacccagccccaaagcggcgacgcgattacacctgcgatacccagcacagcgaagacatatccggaaagcgcgacgatattatcttcagacccctgcagaaacgccacgtagaacgtgaagatcggcatcgcgagcgtgatcgacacctgggtgaggcaggctgaaatcagcagtccgcggataacgggcattttaaagagcgagggcttcttctctttcttttcctcagcctttgccgctttcggggccgcctttctcggcggatccttcacgaaaagaatgatgaccattgttatcgtgaaaagcgccgcgccgccgaaaaagaaagacgtgcgcataccgaaatactgagcaagaacaccgccgatcagaggtccgatcacaccgcctgccgtcacggccccctgcataatccccatagaaatgccaagcttctgctgcgggcagttcgacgacatgatggcgagcagcgcgggccagagacctgcagcaatgccctgcagaacacggacaaaaaagagctgagtcggcgtctggacaagaccgcctagcgtgtaagcaagcgacagcagcacggcagaccggatcgccatcagcttccggcttcccttgtcagacatcgcgccccagatcggagccataaaggtactgaccaggaaggtaaccgagaacaccgctccggaccagagattgacgtgttcagtaacgccgagctctttcgtcagatacaccggcagaaacggaatcagcatggtgtagctagacgacatcagcgtggccgccagtgtcaggatggtcagcagcaccttccaattcatcatctttggaggtgtcttttcaattaattgattattcatattcagatcctgcacataatttctttctgccgcatttccgctctcataggctgaacggaataaatcaaacagatgaaactatcgaggcgcttagtttaaccaattgtgaggatacacttgacgcatcacggaaaaacaattctggcaaaatttctgaattccgtgacaatagaaacaacccgggcggtttctatcgagccccgcaatatgatgagaaaggtttagcagtgaatcagattcaacaaagtaccttggaacacctgaaagatgccgtaagccatcacgctgtgacgcttgtcagtcattttccgggtgaaccctctgcgaagctgatctcagaatgtttcccggactttacgctggtcagcggtgaatccatcaaagtctggaatctggcagaaaatctcccccgcgagtttttttctgtttaccagacacctctgatttttgacgcctgtgagcgtgttcccggttttctaagatacctgtcagatgagctgccaacactcaccggtcctctgattctgatcggaaatccagatccgattcctgaagtccttctgaattcgcctcaattcagcagaatctgtctgtttccgaccgcctggcccgaaacagaatcttttccgccgatcggagaggatgtgtccgagacaggcacagtttacgaaatgccggctgcaatggcagaagaaagaaccgcagccggactcgccagaacccgtggatctgacagtattggctcttacagtttctggtctgactggatgaacgaatttattcgggatacagcgataagtacccttaaggtacgagaccaggcggcctttttcaggtttctgaaaacactggctgcatctgccgggcaggggctgaacgcgcgagccctcgcgaaacaatccggcgttaccgcaatgaccgccggaaactggattcagaagctgaagtcccagcagatcattcagctgattcagccggttccgcagcctgaaaatcaccgtcacatcagacgtccgaaacttctttttaccgataccggtttcgccgcgtatctgctcgacgtgtcgtcctatgacatccattcgagtccataccgcgatgcgcttcttgaaaacgcatttgcaatagaactgatgaaacgtttcagtccgtatgacaacgcggaattcttttactatcaggacaccaatcacattgctgtcgatctgatctgcgaactttccggaactttcacacctattgcagtcgcgacagatgaggcttcacttttgaagaaaattcgggacttcagaattcttcctgcgctgggcttgaaaaccggcctccccgcactgattacgctgaaatctctcgcggaaaaagatgaagtaaaggcgcttcagccggatctggtgctgctgacctgatccggatctcaaacagtccgaaagtgaaaagggaggagcgtgagctcctcccttcttttttcccggatgttctgaacgcgcataaaacaaaaccctcgaaagaaaactttcgagggttttgaaaggggagcctgacagtgaccta

SEQ ID NO: 1276 - DNA, 1869 bp, Unknown
  gut microbiota DNA sequence
tgatccactcgtccctgagagaaaaaagaaatattgggacaactcctattataccaataaatctttaaaaaacatatttttaataatttttttcaattttaaagtttggtattggtactgaaacgatgttcacattcattttcaagctaagtagaatcgcagttaacatcgccggattgcactccccgtccggactgtagccgcacggggacttccggccagactgcctctaataggataaataaatggagatcgccccttacgccgccgggtggctgtcgattctgccccccatcatcgcaatcggactcgctcttgtaacgaaagaagtgctgtcctcgctgctgctcggtgttttgtccggatcgctgatctgggccattggaaccggcgcgaaccctgtcatgggaaccgtgtccgccaccttcggaatcatggtgaataagcttgacttcaccatcattctctttacgtcaatgcttggcgccctggtgtactgcatctcgctctcaggcgccaccaaggcctacggacactgggcccttggcaaaatcagatcgcgccgcggcgccctgatggcgacgaccggtcttggtatctgcatcttcattgacgactacttctcctgcctcacgaccggtacggtgatgcgtccggtgacggacgcgcaccgcatttcccgcgcgaagctcgcttatctcgtcgatacgaccgcggctcctgtctgcatcatcgccccgatctcttcctgggctgccgctgtcggctcctctcttaagaccacgggcgcttttgaaaatgatctcgccgcgtttgttgccgccattccgtggaacttctacgcgctgctcgcgatcggtcttgccctctttatcagctggacaagctacgacatcggtccgatgaaggcctttgaaaagcgcgccatggaaggaatcgataacggcgccggcaccggtgtggtgaagtctgacgctcttgaccgggctggggaaaaaggcacggttgccgacatgatcatcccgatcatcgctctcatttgcttcgcggtcttctgtctgctttactcgggcggctactggggcaaggatcccaagttccacaccgtgttcgccgcgctcggcaacacctccgcttccaccgctctcgtctgggcctgcttcggtgctcacatcgtgacgctcatcatgttcctcagccgcaaggtgatgtccttcaagacctatatggatgggttcgttgaaggcgtgaaagtgatgcttcccgcgaatatgattcttgtgctcgcctgggctctgtccggtgtctgccgcgatatgcttcagactccgcagttcatccagggtctggtgcagtcgggttccgccaccgcgctcttccttccggccgccatcttcgtgattgccgcgttcctctccttctcgaccggcacggcctggggcacgtttggcattctgatcccgatcatggttccgatcactcactccgtcatgcctgacatgatgattgtggctctctccgccacactcgcaggttctgtcttcggtgaccactgctcgccgatttctgacaccacgattctttcttcggcaggttccgggtgtaaccacatagaccacgtatcaacacagctgccatattcgctcactgtggccacctgcgcgatggccgggtatctggttgccggtttcactcacggctcctggattgcctctttcggtacgtccgttgtgctgatgctcgttgccgtgaccatgcttcatatgcgtcactccaaagccgcgaaagctcaggcgtaaaaatcagcgtctgctgaagctctgaataaaaggggccgggtttagactaacccttaaagtttagacactc

SEQ ID NO: 1277 - DNA, 938 bp, Unknown
  gut microbiota DNA sequence
caatatggataattgctgtgtggaagtgaaattcagcgacggcagtatgattgcgattgacactatcgccgttgagaacgagattgctgacaatatgtatcagcggtcagagctggattatttgatctacaacgctcctttggagtatgcagaccttatcttgaacggcgatcccgaaacctatttgaaaactgtaacagaatacaagccttgggatagctgacaacacgctgcccgcaggagaaaatcctgcgggcgtttttctgtttatattatttccctccgttggatctcaatttaggaaagaagatgacaatcttgaagccctttccccactgggaagctgcttccagatgaagatttagatcgtcggccatcttcttaaccaggtaaagtcccataccggtagccttctttctgctgtcagtagaatccccggtaaagcccttttgaaaaatgtacggcagattatatttttttacgccaatgccgttatcttcaacagaaaggatatctgcggtctccgaatgtatcacggaaattgtaagcatgggactatcgctgctatatttgatggcattgctaacgatttgtcccaacataaactgaagtcctctacggtctgtatagactgtttcagattgcagtttgttgagaatgacaaactgcttctcttcaagaagtggggcatagtcctccagaacttcacccaagcagtcattcaaattgacatcctcaaatcggtaatcctttgtactgctcttcaaccgggcatagtacagcatctgcgtgacatcctcctgaagctgactgcggacataatccagctttgcttgcagggaaggagagatttcatcgttccggttatccaagagcatggtcagcaacgataggggcgttttcgcttcatgtgcccagccctccacatattcttcata

SEQ ID NO: 1278 - DNA, 1145 bp, Unknown
  gut microbiota DNA sequence
gaagtcttttattcagtaactttgcacttgatttgataattcaccaaataatttccgcgcagttgaatctatcccgaaagggatattttccgtaatccaattattgctactggagcccccatgaaatcctttcagatcttccttattgctgttgtggtgctggcagccgcggtgtatttcacagccggacgggcaaatcgtccgaaaggggtttctgcgatgaagctcgaagcgcttgcggatgccgcggagaagggaaacccggaggctgcgctcgaagctgcggtgaggtacggctttggcatccggggtgtgaaggaggattggaaagagtcttatgtctgggcctcgcaggccgcgaaggaaggaaatgaagatgccctggccgcgaaagccgaaatggaggtacgggggctgggagccatggaagagggacaggccgcagtggatcagatatccgctctggccgcaggaggcaacgccggagcgctgtatgcggtgggattcgggaaaatgatgtctgaaaacgcccctacgcggcgtgaaggagctgctcagatcagagcggcggcagataaaggtctgcccagggcgcagtatctccttgggctcctcatgctgaagggagatccggatgcggggatcgataaaaatgaagcggaaggagcgcggctgattgaaaaggcggccaagggggcggagccggacgcgcttgcggctattggactctgctacctgaagggaatcggggtgccgtcagattcgcttgaagcctatacctggctcgcggtggccgctgaggaaaatgatcggtggcagaaagccaaaacagaagccgcatccggtatcagcggagaagcggagagggacgcactgccggctgtaacctttacgcgacgcgaatatggccccgggaaatatcacccgaatctcgcggctcatgccgcagaatataagcgtccatttcccggatttcccggagaataaaatttcaggcggactggatatacaggaagccggttttaggatacctggcatctgatttcaaaccccaggcggatagtggcaatcagcccatctgcctggggtttttaattgcccccggtcatgaaatacctgaattcccgatttacttatacatagcg

SEQ ID NO: 1279 - DNA, 47397 bp, Unknown
  gut microbiota DNA sequence
gacggcatcaccgcgaacgccgaacacacgaaggacctcgtgatgaactccctcggcattgtcacgctgctcaagccccacttcggctacatgctctgcgctgaaatggcgaaggaaggctacaccgaaggcaagtctctccatcagatcgtcgttgaagaacgcaagctgatgacggaagagaagtggaacgaagtgttctccttccagaatctgatcgctccgaagttcgagatgtaaagaattagaaaaccgcccctccgggaagcactcacccggggaggcggtcttctgatatccccgggaggtcacccggtttttccgctccaggggattcgttttaaaaagcccgaaaaatactttgcacggcagcagtcaggccgcagcaaaaataacttcaaaggaactgggattccggagctgctccggatgaacagagaaaacagatgagtatcgtggtgattctgcaaatcatcgtcctgctcggcgcaattttcatcggcgtccgtctgggcggtattggtatcggctatgctggcggcgccggcgttctcgtgctcggcctgcttctcggcatgaagccgggcaacatcccctgggacgtgattctgattattgcgtccgtgatctcggctatttccgcaatgcagctcgcgggcggccttgattacctcgttcagattgctgaaaggattctgagaaacaatcctaagcacatcaactatctcgctcctatcgtgacgtatgtcctcacgatcttcgctggcaccggccacaccgctttctccatgatcccggttatcgtcgaagtcgccaaggaacagcacatccgtccggtctgcccgctgtccatcgctgtggtcgcttcccagatcgctattaccgcttccccggtgtccgctgccgtgatttacatgagcggcgttctggaacccttcggctggagctaccccacgctgctctgcatctggcttctgacgacgttcgttggctgcatgctcacctccttcgtgatgagccacatccagaatatggatctcgactctgacccggtctacaaggaacgtctggccaagggcctcgtcaaggctccggatgcttccagcatgaacaaggctctcaagccgtttgccaagcgctctgtcgcgatcttcctgatcggcgtgctcgcggttgtgttctatgcctccgctatttctccggctgtcggccttatcaagcatgtggttgtcggccgtgacgctgccattatgagcctgatgctcctcgttggctgcctcatcaccgtcctctgcaagattgagctcggcaaggtcgctgataccagcgtcttcaagagtggcatggtggcctgcatctgcgtgctgggcgttgcctggctcggtgacaccttcgtgtccggccacagcgctgagatcaagaccttcgctgccgctacggttgctcagtatccggctctgcttgctgtcgtgttcttcgtggctgctatgttcctctactcgcaggctgctaccgcgaaggccattaccccggctatcgtggctgctctcggcatcaccgctgccaacccgggtgattcctacatgctggttgcctgcttcgccgctgtgagcgctctgttcgttctcccgacctacccgaccctcctcggcgcggtccagatggacgacaccggcaccacccgtatcggcaagtgggtcttcaaccacgccttcttcctcccgggcgtcctcgcgattgtgttcagcgtcgcgctgggcttccttgtgacgaagttcttctaagcttcgcgatcattcagaccggatactctccggtctgagagtgaagaaagaaaaaagccagctttctaaagctggctttttcatgtctggaagttcccggtgccgatcaggattcggcgtcagacggagtgctgtcagatgcggcgtcccggttcttcacgcggcggttcgaccccgcgacgagatcaaacttgaagaaacggcattcgagaggaccattgaagagtaccgtcttccggccttccttcagatgcatttcgcccggcagatgacggtcggaggtgagcatccaggcggtccacccggcaaagttatgcttcaggttgtcagcaacgtgacgcatcatcgagccgaccgtcgcgcttcggggcgtggactgttcgccgtacggcgggttagcgacaatgatgcccggagtctctgtcggcgggaggacatttcgggcgtcacacaccgagaacttgagatttccggattcaagcagtccgccgagaccggcgcggagcgcgttcgcctcagccttgcggacaacgatcgaggaaatgtcacttgccgtgattgagacctcacggtgcaggttcacttcactcttcgcgtcttcgcggagttccgtccagagttcacggtcaaagttgaggagcttctcgaagccgaacgaacggctgattcccggaaccaggccgcaggcgatggaggccgcttcaatcgcgatcgtgccggaaccgcagaagggatccagaagcggcatatcgggcgtccatcccgaaagcttcaggaggccggccgccatgttttccttcagaggagcctcacccttatcggttcgccagccgcgcttgaagagcgattcgccggagagatcgatgtaaagcgtgcagtacttttcatcgaggaacgccgcaatctgcacatcaggcgactcgcggctgatgtccgggcgggtgccggcgagctcgcggaaccggtcgcagacagcgtccttgatgcgcagcgtcgtgaattcgagagacttcagcggcgcgcggtgagcggaaattgaaatgcggaacgtctgatccggcgtgaaatagagctcccagggcgtacggcgggcctgctcataaatgtctcggctgtcccagtagtcatggaaagacacctccatcatcacgcgggacgcgatccgggagcggaggcacgcgaggtaggcagtctcgatcgtgccctcaaacatcacgccggaaggtgtcttgcgggagcgcttagcgccgcatgccgcgagctcttcctcgagcacggcctcaagtccccagggacaggcggcgtaaaagcggtggttcttcttatcttgcatttttttcctaacaaaaggggttccgggcggaggccgctctagcggcggccttcgccatgtccgaggacaacgaatttctggctggtgagcccttcaagtccgaccggaccccgggcatgcagcttatcggtggagatgccgatttccgcgccaagcccgtattcgaacccgtcagcaaagcgggtggaggcattgatcaggacggaggcggagtccacttcccgcaggaagcgctcgccgcgcgtatagctgtccgtcacgatggcgtcggtgtggtgggagccgtgttcgttgatgaagtcgatcgcttcatccaggctctccatcaccttgattgaaatgaccggcccattgtattcggtatcccagtcttcgggggacgcgctgatcgcggcaaaccctgagttctgaataatatcaaggctcggatcgtcggcccgcatttcaactttcttatcgtggaagatccgggcgatgcggggaaggaagtcagcggcgacccgctcatggacgaggagcgtctcagtcgtgttgcagggcgagaagcgctgcgtcttcgcgttatccgtcacttcaaccgccatgtcgatatcggcgtaggagtcgatatacgtgtggcagattccgttgaggtgcttgatcatcggaatgcgggacttttccatgagacgcgagaccagccctttgccgccacggggaatcacgatatcaacccactcagggtgagtgaccagctgatccaccatatcgcggtcaggggttgccacaaactgcaccgcgtcagccggcagtccggcttcttcaagcgcttcagagacaattttcgcgagaatccggttcgtccggatcgcttcgctgccgccgcggagaatggcggcgttgccgctcttcagcgtgagcgccgcggcatccactgtgacattcgggcggctttcataaatgatcgcgatcacgccaagcggcacgcgcatgcggccaaccagaatgccggagggctggggttcgagcgactgaatagcgccgatgggatccggaagcttcgcgacctgagcgcagccttccgccatcttcttcaccgtgtcttcagtcaccgtgaggcggtcgataaaagcgtccgggtaacccttcagcttcgctgcctcaaggtcttcacggttgacggcctggatttcttcagaccgctcgaggagaaggcgcgaaagcacggcaagcgccttgtccttcggcgcccggcgggctgccgccatcggtttcgacgcggcgcgggcacgggtcccaaggtcccgcatatagtcgagcgcggcgcggcccgattcgttttctgtcacttcagacatgttttcctcacttttgcccggaaatatccaggcggcggcgtgactgtcaggccggatgtgcggggcaggagaggctccggttaccgggcgatgaaggccgcaacggacttcagttcaacccagggatccgtgtcccgggaaggaaccgggatccccttatagattctgtcgatatccgcgcagacggtcagcgcgttctcgagtttcctcgagctgagcctcgcggcgcccgaggcgactgcgtccgcgatgtcacggggccagatccggagttcccgggcggcgctctgtgcggtctgtccggtcgcgtccatatggtgccggaccgcgatcatcttgcggatattctcagagaaaagatacatcagaaggggcagcgctgcgctctgatcaaattcggcgcggatgccttcaatcgcgcggcacgcgcgggcggcatctcccttcatggcggcgatcccgaccgaagcgaagtcgaagcgcgaattgtcgagcaccgagctctgaacctcttcgagtgtgagaggcgtgcttccctcatgaaggagcgacagcttccggacttcctggctcgcggcgagaaggttcccttcggtctgttccgcgaggaacctcatcgtttcatcgtcagccgacaggccttcactcttcagcctggcgcggagccaggaggggaaggatgcgatcggcaccgggtcacagctgacgagaaccgcgcctgaagtgagttccttgaaccacttgctcttccgtacccgccagtcggcctcgggaaccgtcacgatcacgatgaccgcgcccggatcaatcggcgtggagccgagagccgcaagcgccgcgctcccacgggtgccgggggagggacttgcaagacggacttccacgattttctttgcggcaaaaagcgagatcgcggcaaccgcgacgctgatctgattccagtcactgttcgcggacagcgtgagaacttcgcgctcttcgtagccgaggccgcgggccgcagctcggatcgcgtccgcggactcgagagcgagcagaggctcttcatccgcgatcacccagagcggagcgattccgccccgtttggcgtcagaggcgagtctcggaccgagtgacgcgctacttagctgctgcatgggccttcgccttcgcggcctcgatgcggcgcatcagctgcaccacaatgtcccgctcgatatcgcggtaaagcgtggcttcttcggtttcgcgcgacagatagttgcggatcgtgtacggaaggtcgcggcgggcggaaagtgtcgtgggcgggagatattcgtagccgtcaggggcggcgagtttgaaggtcacatcccagccgagacggtattcacgggcgtcgccgatatcgttataagtctgcaccacgcgggaccgggactgagacacgatcgaaaggatcgcgtcagcgtctgccatctgatccacgacacgggcattggtttccgcattgatgtggcggcgcagctcccacttcagagtcgactgatcgctcatctgcaggtacacggtctcaaacggaacagtgaaccggccgcggggcctgaaaccgcacccggtaagagcgagcgatgcggcggccgcggcaagaagcgcgcggcgattgagaccggtggtatgcataagcggaaattccttcttttcgcggcggtgtaagaacatccctacattatacggagagggggagagggtgaaatgcgaaagaaatgccccagacggggaatcccggctggggcaatagaggaaagaggagacctttggcggactcctctttcagacccgtgggtcagatcaggccttcggagccggagcgacgatattcacgagccgcttcggaacgatgatcaccttcttcaccggggtgtcgccgaggaagcgggacacatcggcgtcagcgagagccgtcttttcgatctcttcccggctggtgtccggagcgaccatgatgcggccgcggagcttgccgttcacctggaccacgagctggatctcatcagcggcgagcgcttccggatccaccttcggccacggggagtcgatgatttcgccgagttccttcacatacccgagctcatcccagagggaagtcgtgatgtgaggagcgagcggatagagcacgcgcagcaggagcgagagcgattcgcggagcagcgctgcgctgccggccgaaccatcgtccttgaagctgtcgatctcgttcatcatcttcatcgcggccgacacaaccgtgttgtactgcatacggtcaaggtcagccgtcgcctgagcgacgttctgatagagcgaacggcgcaggctcttctgatcggaggtggcagtcttcgggtcaaaggcaccggcgctggcgagctcatcgcgcttcgaataggtccagctccagaggcggcgcaggaagcggaaggtgccttcggcgccggcattgctccaggccgcggactgatccgggggtccggcgaacatcacgaacgtacgggcggtatccgcgccgtacttcttgatgatgtcacgcggctcaaccacgttgcacttcgactttgacatcttctggatgccggccgacttcacaggctggccgtcttccttggaaatcgcgccggtcgggcggcccttttcgtccgtcttcacctcgatttcatcggggtagtaccagcggatgtgcccatccggaagctcgcggtagaaggcttcggcgcagagcatgccctgcgtgaagagacgcttgaacggctcatcaaacttcacgagcccaaggtcacgcatcaccttcgtccagaaacgggcgtagaggaggtggagcacggcgtgctcgataccgccgatgtactggtccatcggattccagtagtcgttgcggctgtccaccatcgcggtgtcgcagtccggcgagcagtagcgcatgaagtaccagctcgagtcaacgaacgtatccatcgtgtcggtttcccgctgggcggggccgccgcacttcgggcaggtcacgttcaggaacgccggatccttggcgagcggattgccggaaccgtccggaatttcgttctcaggcagcacaaccggcagatcttcttcaggaaccggaaccgcgccgcacttcgggcagttgatcatcgggatcggggtgccccagtagcgctgacgggaaatggaccagtcgcgcagacggaactgcacgtgcttttcaccaaggcccttcgccttcaggtcagccgcaatggcgtcgatcgcctcatggaagtgaagtccgtcatacttgccggaattcacgcagtaggggttcagcgtcttgtcgccataccattcctgccagtgatccgtcgtgaattcgggaacgccgtcgaggttcactgcctggcggatttcgataccgtagcgtttcgcaaacgaaaagtcgcgttcatcgtgcgccgggacgcccatgacggcgccttcgccgtacgtcatcagcacgtagttgccgacccagaccggaacatcagcacccgtgatcgggtgacggaccgtgaggttcgtcttgatgcccttcttttccttcgtcgccatatcggcttcggaaacgctgcccttcgcgcactcagcaacgaaagcggcaaccgcgggatcgctcttcgcggcgtattttgcgagcgggtgctcggccgccacggcgacgaacgtcacgcccatgatcgtgtcagcgcgcgtcgtgtaaacgcggagctgatgctcttcgccttcaagcgtataggggaaggcaaagtccacgccttcgctgcggccgatccaatggcgctgcatcgcgcggacctgatccggccagccgtcgagcttatcgatgtcgtccagcagctcctgagcgtactgcgtgataccgaggtagtagcccggaatctccttacgctcaaccacggcgccggaacgccagccgcggccatcaatcacctgctcgttggcgagcacggtctggtccaccgggtcccagttcaccacctgagtcttgcggtaggcgatgccgcgcttcagcatctgcaggaagatccactgattccagcggtagtactccggcttgcaggtcgtcacttcgcgcgaccagtcaaaggcgagccccagcggcgccatctgcgacttcatgtcagcgatgttcgcgtacgtccactgcgcgggcggcaccttcttggcaagcgcggcgttttcagccggcaggccgaaggaatcccatcccatcggagtcatgacgttgtcgccgcacatacggcggtaacggtacagcacgtcattcagggtgtagttgcgtacgtggcccatgtgaagcttcccggaaggatagggaagcatcgagcaaacatagtatttcggtttttcatggccggaggcatcaagcgcatgctcgaccgcgcggtagacatcctgtgccttccacttggcctgaacttccgcttcgacgagttccggagagtaggtctcacgcattggaggattcccagtcttaaggaaataaagagttagattagttagtatatcccgcggaacgggctgtaacgtcagtcagcacgcccgggacacctgacaggcagatggtccgcgtctcatttctgcctttccccgctctttccatgcgggtagaatttcaaccccctttcagcgaaggatccgcgtccgagcggtttccgtgcggctccggtctcattccgtcagagaatggacacccgagcaacgcttcgccccctcttacactcaatttggacagacgacctatgacagatcccttactcgacggcctgaaccctgaacagcgtgaagcagtgacgctgcctgatcagaatgcactcgtgcttgccggcgccggatccggaaagacccgggttctgacgtcccgtatcgggtggcttatccgcgaaggacgggcaacgcccggcagcatcctcgccgtgaccttcacgaacaaggcgtcacgcgaaatgctgtcccgaattgagtctgtgttgaaagtgaatacgcgcggcatgtgggtcggcacgttccacggtctctgcaaccggatgcttcgggtgcatgcggcggacgctgggctgccgtccggttttcagatcatcgatcaggcggaccagctctcggttgtgaagcgggtgatgaagtcggccgggatcgataaggaaacgattgagccgaagattgtccagcacttcatcaatcagcataaggaagccggagaacggagttctgacatccggtcgctggatgcccggacgccgaacggcgccgtgtcgcttgaactctaccggctttacgaaaagctctgcatggctgagggcgttgtcgattttgctgaactccttctccgttcctacgagcttctgcagcggaacgaactgatccgccgccactatgagcggaagttttcgcatatcctcgtcgacgagttccaggacacgaacgtgcttcagtaccgctggctgaaaacactggccggttacggaattcccggcatggcgcgcgaacccggcatcacgaattcaatcttcgcggtgggtgatgatgaccagtcgatttatgcgttccgaggcgcgaatgtcaagaatctgactgacttcacgcgtgaactcggtgtggatcacgtggtgagactcgagcagaactaccgctcgaccggccatattctggatgccgcgaacgccctgattggcaacaacacagggcgcctcggaaagaatctctggacggactccgggaagggcgaaaagcttcgtgtcatgccgaccgggagcggtgaggcggaagcccagtttgtggcaaacgaaatcgaggctgagcacctccggggccggaagtacgaggatttcgcgattctctaccgctccaacgctcagtcccgggcgctcgaatccattctgatgtcagccggcattccttaccgtatctacggcggacaccggttcttcgagcgtgctcacgtgaaagacgcgctggcctatctgcgcctcgtggagaatccgaatgacaatacggcgtttctccgtgcggtgaatactccgacccggggtatcggtgcgaagacgcttgaagggctttccgccgcggcggaaacagccggcgtctcgctgatgacagccgcgaaaaacagcccgaccaaggccgccgctttctctgaccttattctgaatattcgcgacaaaatcgcggacctcccgcttgtcgaagcggtgaaggttgtgattgagagctcgaccctccgtgcggcggtcgaagcggccgataagaaggaacacaccgcgaaggctgaagaccttgatgaaatcgcgaacgcggcggccgctttcctgaagaacgctgagattgatgaaaagacgccggctcttcttccggtttctgaggatgagctttcgccgctttccgcgttccttgctctcgccacgctggaagctggtgacaatcagtcggaagccggtgcagatgctgtgcagatgatgacggtgcatgccgcgaagggcctcgaattcccggtggtcttcattacgggtcttgaggagaatcttttcccgcacgcaagcgcgatgcgcgagaacggtgactcaggactcgaggaagaacgccgtctgatgtacgtcgcgattacccgcgcgaagcgccgtctctatctctcatacgctgctgtccgctttatcaatggtcagagacaggatgagatgccgagttcgttcctcgatgagattccgcaggagcaccttgagtggcttgcggatccgcaggcggcgtcccgcgagagctgggcatcgagcagcggttcctggggccggggcggcgatgaaccgcaccgcggccgcgcgagctatggtcattggggcgagcggcgcagcgattccgagagccgcggctccggcgaccgcggtaccttcaccggaaacgcttacacatggagtccgaaggggaaggacgcgagttacaacggctcgaaggatgagcctctcctcaagaagagaaaggcggggcccgatggatggcaggccggtcagcacgtgaagcaccccaaattcggcaagggggtaattgtttccgtaatcgatagcggcgatatgacgaagctgcaggtggcctttgtcggaggcggcgtgaagcagcttctcgcaaaaatcgccaaactcgaaaaaatctgatctttcccgccctctgccgcttccggtgcatccggtgtatgacgaaacatacgccggattgctttcctctcaggtatgatgagagacatcaaaatgcggtaggtgcgtgctgacggaattcccgtgtttcgcagtctaaaacgggaattcttccgcgcaattgggcaatggatacattctttctcgttattctgggttttctcgcgcttctagcggcgattgacctttttgtcggtgtcagcaacgacgccagcaacttcctcaattcggcggttggctgccggattgctccctataaagtccttgtcgcggttgccggtcttggcattctgcttggcgccacgttctccggcggcatgatggagatcgcgaagaagggcgtcttcaatccgggaatgttctcgttctcggacgtgatggcgatctacttctccgtcatggtgacagacgtcgttctgctcaacttcttcaattccatggggcttccgacatcgaccacggtgtcaatcgtgtttgagcttctcggcgcagcggtcggcgtggaagtgaaccggatactggagcgtggcgggtcgcttgttgaagtcggcgcctatatcaataacgagaaagcgctgacgatgatttcggcgattcttgtttcagttgtggtcgctttcatcgcgggtgccatcgttcagtacattctccgcgtgatcttctccttccactacgagaagatgtaccggaggatcggcggtatttacggcggcttcgcagtcacgatgatcttctacttcctcgtgatgaagggcgcgagcggcgcctccttcatgacgccggaaatgatgcagttccttgacacgaacacctggccgatccttggagtgctctttatcggctccacggtgctgatgcagctcgggctgattcttttcaatctcaatattttcaagatcgtcatcctcgcgggcactttcgctctcgcttttgccttcgcgggaaatgaccttgtgaacttcgtcggtgtgccgatcgccgccctcgacagctatcacatcttcaccgcggctcagggcgccgatccgaacaccttcgcgatgggggggctcgctgacccgattccggctccgacgcttcttctgattctctccggcatcatcatggtgctcacgatccgtttctcgaagagcgcccagcgcgtgatcgaaacgtcggtcaatctttcttccagcaccacgggtgaaaaagagcagttcggcgcctcgatgccgggccgtatcatcgttcgctccgcgatgtcggtggagaatgtcatctcgaaactgacgccgtccccggtgaaaaagtggattgacacgcggtttgaacccatcattccgccgaccgggactgagcctctgccgtttgactatgtccgtgcgtcgatcaacctgatcctcacggctattctgatttcgtccgcgacctccctccagctgccgctttcgacgacttacgtgaccttcatggtcggtatgggatcgtctttcgctgaccgcgcctgggaccgtgaaacggccgtttaccgcgtgtccggcgtgctgatcgtgatcgtcggctggttcctcacggctcttaccgcgttcgttgcggctggtgccgtagcgactgtcgtgctctggggcagcaagggtgcctgcatcatcctgatgctgatcgctgttgccgtgatcgtgaaggaaaacttcttcgccagcgatgagaagcaggccgctaccgagacccttcagagcctcgaccgcttcggtgtccgcaagcttctcaataaggctgtggcgaagaactttgaaacgtcggtgaccatcttccgcgacatgatccgctgcttcctcgacgataacgaacggggacttcgcgaggtatcaaaccgcgcgggtgagttcttcgacaatgtatcggaaggccgcgcccggtactaccagatggcgcagcgtcaggggtctcacagcgataacgatgcgaagttcttctactaccgcagctacagcaatatgcgcgaagtctgccgcacactgaaacgcacggcgattcaggcgcaggagcatgtggcaaaccgtcaccgcgttttcaagggtgagattgccggaagccttgagcagcttgtgcaggtgcttgaggtgttcgagcaggatatccgggatttcagcggcggctggagcgatacaacagagctccgtgagcgctcgaagaaagtgtcggatctgatggatcagtatcaggagctgctgctttccgatattcatcactatgatctctcgctccgcggctgtgagctctacatgatcttcctgcagttcgcgcgtgacctcctgaaccgctacgacatggtagttattttgcagaatcacctgaacgatatgtgtgaaaacgaaaaaccgttctccataccggcagaaggaaccgaaccgccggcctccggaacggagggcagtgagccttcggaacaggctgtgaagcctgcgggaggtgccgcagcatgagcgggtcggaagaaatgacggctgggccggttcccggcgtgagggaggaggtcaatgccttcctaacgcgggaagggattccgtttacgggtttcattcatccgccgatcatgacagtcgcggaaggggctgagatcgccaagcgtacaggaggtctctgctgcaaaaacctctttcttaaaaacaagaaaggcggtttcttccttctcatgattccgcactggaagcggcttgacagcaaggaactcgcgcgtcagatcggaagcgcgagactctccttcgcaggtgaggaggacctgagacggcttcttcacctgtaccccggtgcggtgagcccgatgggactcatttttgatcgggagggagctgtgcaggtgctcctggatcgcgagatcatgaagcacgcgttggttgactgccatccgtgccggaatgatgagacgctgaccatgacaccggatgaccttgtgaaccggttcatgccggcgaccggacaccaggtgcagtgggtggatattccggagccggaagaaaagccggaatcctgatatcgataaaaaccgtgaggcatcagcttcacggtttttttctggaggaaaaacggtgtttcagcctgcaggcggctcccagccattcacatcgccgagtttcccccgctccagaagcacggtgatcggggcgagttccgcggtgttatgaacatcaagtttccggtatgcggagagccggtgtacctgaacagtccgctcgctgatatcgagttttgccgcgatctgacggttcagcagccctttggcggcaaggcggataatttcccgctcgcgtgttgtcagacgcccgaaccgggatttccgttcagcttcatcaatagggtgctcgcggctgtcacagtccttctgaaccgaccgggcaactgtcgtgagaagcctgtccggctgcacgggcttctgaaggaattcttcagcacccgcccggatcgcgaaaactgcggtgtcgatatccccgtgcccggtgagaaagatgatcgggagcgtgattcccctttttttcatttccgcctgcacttcgagtccggaaacgtccggcattcgaagatccaggatcaggcagcctgggcgcgacggccggtcattcacgaagaaatcgcgggcggaggtataggccgcgacatcccagccttcgccgcttagcagcgcttcaagagaaatcagctggtcttcgtcatcatccaccgcacggataagcggtgtttcgtgttcagtcgtcatgatggggatgccttgtctttcggttggggaacagcggcggcgcgcggttcaggcgaagctccctttgcctcttcaagcggaatcgtaacgcgggccagcgtaatgccgcctgcgcgtgagagttcaagccgcccggatatcttttccacgagtgtcttaacgatgagaagcccgagcccaagaccgtttcctttggtggagtgcagcggtgtgggggagagcggggtgttcgcctcggactggtccccggacccgttatcctcaactgaaaggatggcagaaccggccttttcactgagagtcacggcgactcggggcgcggggttggacgcacaggcctctgcggcgtttttgatgagattattggcgacgagctccatttccagttcgtcccatgcggcaaaaagcggcttttcggggagtgacagcgtgatatggatatcgggatgcgcgagacgccgcatagaggcaacacgctccagagccgcggaaaaattcaccggcacaagttcccggttccggttcttcgcgtagcctctgacccgctcaatgatttcggaagaccgccagcactgtttttcaatcagcgccaccatgcgcgtgacaaccggggcgggcggcgttctttcaaacagacgttcgagcgtgccgcagcagttggaaatcgtggacagaggcccattcagttcatgcgtaatgaggcttgagatcgcgccgatcacgcttacgcgctcaaaggtctccagtttcttttcagcctcgagtttccgccgggtggcagcctcctcggcgagccttgatttctcgagttccgcggtccgctcttcaacgagccgccctgatcgccagctgtggaaaatgaggagaagaatgagaagaacaccgaagagaatcggggtccggtacttgcggacaaagtcgccgaccgactcgacccgaaggtaagcgtaagggccggctttgagtgttctgaagagcccgtccacccgggcgaagtccgatacgacgccccaggctacgccgtgacttgtctcaggcatcgtgaggagcgcgactgtgacagcgcggcttacaggagccgtggcggtctgagtcgaaataaaagtccagtacgggtagagatccgttgatgtgcggcagtggaaaacggcgtccggcttcttcaggctgacagcccggaactgcttcgcatattccggtgtcgtgctctcgagctgctcaaaggtgcaggtccgggcgagcgcgaagtcggcgtcacctctctgcacagcggccagcaggttggtcatcggagatccggcttcgacatagtggaaatagtgatcgggcgagagtccccgggcggcgagctccccctccgggatatagacgcctgaaaacgcctcgatccagctcacggctgcccgctttcccttcaggtcttcaatgctcttataaggggaatcgtagggtacaagaatgagagaccccacggcttcactcgggtttggggcctcacgggtgatcatcgtcgcgatgtctcgcagcccctgcacatacacgcgccggtagaaaccggcggtctcaagaaagaaatcgacttcgccatgccggatcgcgtattcgagccccggaattgtgtagttccggatttcaatctgatactgcgggagttttttcttcagccacgcaaaggtggcaagaatatcggggcgctcttccggcatgaagcttcgttccacgtaaccgatgcggacgatcctccggccgtcagccgcgacaggggaggattttgcggaaaggctggatacgggagccgaggcttccgtgtcggaggcagctgcggccgggagcggctgccagagaaacgcggcggtgagaagcccgaagagggctgtgagcagaacgcggcccgaaagaccggaaaatccgcagcgccaaaaccttgattgtctgtctctaagccgcatcagaaggatctccccggtagcttcacccatcatagcggggaaggaatcggggagcaggagagattctgagaaaaaagcggggaaaggaaaggagatgggagacaccttctcccttaaatcctttccccggcttaggtaaccggtcagaaacagcggttcgctgtgatgcgctgaactctctgtttctgttgaaaaagattctaggggaaggggctacttaggtagcatgttggagaacaagccaaagcgtttttgtttcttcggtcccgatcggagcggcctcgctccgggaatccggtcccgcatcccgaaaaagtcctgctgatacgtgtataaatgagctcacatcggtcccgaagtctggcacggggaccgccttggagaatttcagcatgacgacgacgctttaccggaatggaaaggtttttacggggacaggcccggatcacttcacctcggcgtttgaggtaactgacggtgtgttttcctgggtaggggaggagagcgatgccccctacaaagccgactcagatgtggatctttcgggagccactgtaatcccggggcttattgaggctcatgagcatgcgctgattgtcgccggcatcgcgaattccacagcctgtacgattccggcggtaactgatattccgtcgatgattgaagcactccggaagaatccctcctatgggaaaggaccggatcggtggatcacgggatgggggtacgacgaaacgaagctcgcggagcatcggactccgacccgtcacgatctggatcttgtcagcaccacgcagccaatctatatcatccggtcagactgtcactcaggcatctgcaacacgaaggccctggaactcgcgggtgtcacccgtgatacgcctgatcctgcggtaggagccttcggccgggaggcggacgggactccgaacggcattctctttgagcttgaggcgaacgccagggtgaggagcctcgctgagaaaccggatttcgagagtgtcgtgaaggtgatcgcgggatccgcccggcactttcatgaacgcggatattccgttgtcacggaaatgatggcgcgccgttctcctctgaatacgcttgaagcgttccgggccgcggagccgctggggtttgacctgcaggccgcgctttacctcgtatgggaaggcggggaggatgatcggggcatggcagacatcacggagaacgaaaaaacgggccgcatccgcatcgcgggggtcaagctcttcgcagacggctcggtttccggccgtacggcgtgggtgaatgaaccgtatcaggatgggacgaccggactctcgactctgaccccggccgcgatccgggcagctgtttccttcgcgaaacgaaatggcgtgcagctggcgattcatgtgatgggggatcacgcaattgatcagattctggaggtgcttgagggcgaaaccgactggcttcaggggattccaagcgtgcggcttgagcacgtgacgctgattacgcctgagcagctcgagcggatccggaggagccgcctgacgttcggcatgacgactcaggtgatcttccccttcgcggagattgagagctatgaagcgtcactctgcccggggccttttaaacgcatgtatccggtaaaaactctggagaaatcggtggaagcgctggcgctctcgtcagacagccctgcgaccacctggatggatccggatgatccggcagtgtcgcttgaagccgcggtgcggcgtgtggcttataacggtcatccgattaaccgggaggagggggtgacactgggtaccgcgctcacgctctacacgggacgggccgcgaagctatttgcgaaagagtcgcctgccggtgtcatcgcgccgggggccgaggcggatttcagcgttctggaagcggatccctttacgatgcccgaagaccggattcatgagatgcgggtgaagcgcggcttccttcgcggcgccgaggttttccgcagggaagactgacctggcgggtcagaagaaaccggacagaatcttcgcaaacaccatgagaccgagagcgataaagagaatgccgcttatccggttgatgatgagagacgcgcgggtgccctgaagggcaccccgcgctgctgtcgcgatcacggcgtacgcgctgtgaatcagaatgagaaggaggctgaaaagcgcgatcaggatcgttgcctgtggccagaaggggctttccttcatgacaaactgaggaaagagcgcgaagagaaagagaaacagcatcgggttcgtgccctgaagcagaaccgcgttccggaagagcgtccactgggattcagacgcctggtcgctcgctgaggcgagccgcatcagatcaaagggcttcgcccggagttcctggattccgaggtagatcagataaagaccgccgattgcctgaagtgttgtgaaaaggacagggcttgcggccagcacggcaccgagccctcccgcggtcagaaatgacacgataagaacaccaaccgcgtttccggccacacagggccaggcgtaccggacaccgtatttcagcgacccggtcacggtgtaaagcacaccggcgccgggggtcacgatcgtagtgaagcaaagcagaaggtagagcggaagcagcgaagtcatttttcttcagaatcagaaaccggaaaacttttccgttgcaatccattctatgaaattcactacggaaaatgggtttacggtaagcgttaaaattttttaatactgatatcgctgtgcataaaacaggtgaggtcatcatgggaaagcggccggatggaaaactttttgaagcgcttgaagcttttgcggcggcttctgatgagcggagtctcagcaaggcggcaaggattctcggccgctcaaccccgaccgtggcatcgatgatcacgcgtctggaatccgatatcggagtcaggcttctgcggcgcaccgcgcggggcgtgtcgctcactcccgaaggcgaggcgctgctccccaaagcccggtctgtcgtcaggctggcctctgagtttgagcgggatgcggtctcagcaggccgtgaagccattcgggaggtgccgatcggggcagtggaagcctgcctattccaatttctcccggacttcatgcggtaccttgatcaggcgcttcccggtgtcaggctccgggtcacgctctacgacaccgcggatctggtggcggcgcttctcgccggtgaaatctcaatcgctttcgggcggttcgcggaactttccgtacgaggtatttcacttcagctgctgagtgaggagccatcggttctcatcgtgccgcgggatcatcctctcagtaagagaaaggctgtgacgtgggaagacgtccgcgatgaggaatggatcatgacactcccccgggtgaatccgggttacgcggcagcgtttgtcagagcctgtcggacggagggctttgagccccgtgtgcgtcacagaccggaaacgattcagcatcagatcgcctatgtcgcctgccgggaagggatagcgctgattcctgagtcttatctgagctcaattccagctgcggttcgcgcagtgcccttcgagggacctctcccttctatccgcatgtcagccgctgtcagccgtctcaggactgatccgctcagggatcagattcttcagaaggctatccggttcgccagtgaaaaaatttctttccggcaataaaaatccccggctttcggaagaaagccggggagactgcatcaggcaaaaagtctgatggaattacttcgcggcagcggagctggccggagcggaagcagcggcagaagcagcggcggagctggcggcagcggaagcagccggagcagaagcagcggcggaagccggagcggaagcggcaggcgaagtagcttccacagaagcggcagcagaagaagccggggcggaggccggagcagaagcctgcttggagcaagcaacagccatcatggcgatagaggcggcggcaacaatcttcagagcggtatgcatgttgaaaaacatccttaaaagtgacttcccggccgtataggcagggagaaaacaaaacagagttctgttcccgacctggaacgcggagaggcacttaagtctgcgatctcctgtttcccgagaacagttccgattctagataaaccatttgggcttatccacaagagttagtgttttcgccactagggatttccttttggggtaagaactgatttaaaaacaaaaaaattatgactgaattatgtgccctgaagaacggaggaaaagtgatttcggtaatacctgtgcggtgtcaattcggaaagtaatacctatttggtgtaataaagcgccaatcggtactgttcggtaaagggagcgcggatctataccgatccaaagcctcttctcagaaaaatcctacggctggcaaagaacagccggacagaatcaaaggaaaaccgaatatgaaacgccgcgcactgctccagacatccattctgctgcctctgacactgattgcatcgaatccggcatttgcctccgcgaaacgcctcaggatcggggtgacgtccggccctcatgcggatattctccgcgccgctcttcccgtcgcgaagaagaacgggctggacataaaaatcgttgagttccaggattatgtgtcgccgaatgaagcgctcgccgccggtgatctggatgccaatattttccagacggagtcttaccttggtctcatgaataagcagcgccgctatgggctcgtgcctgtcggccggacgattacgctgccgctcgccttttattccaaccgttataagagtttcaatcaggtccctcagggggcccgggtcggaatcccaaatgatccgtcttcagaaggccgggcgctttacgcgcttcaggacgcgggaatcatcaagctgcggccatccgcaggccgcgaaggctccccgcttgatgtgatatctaacccgaagaaactgaaatttgtggagctcgatcccgcgcagaccgcccggtcgctgccggatctggatgtttccgcggtgaacggcaactacgcgttcctcgctgggatcatgggaagcggaaaggcgattctttatgaaaagcccgcttcgctttatatcaatcacatcgttgtgcgcgaaaaggacagaaatgctgcctgggtaaagcctctcgtgaagtcctatcaggacgcctcggtccgtgattacatcaggaagacttatcacggcggtgtcgtcgcaaatttctgacggacataacccggggggcgggacttcagcggtaatacctgagcttcatcaaatgttgctggtaatacttttttgaacgcggctctcccttcaggtaacttttgactcaacgggatcccctgatgcgtttctcctccgtgcgatggggattccccgcaaaacaaaattcccggcagccggcactcactctctcaggtgacggcagctgaaaagctatataaaggacaaacatcatgcttcgccgctcacttcttatctctgcattcgctgcatccctggccttcgcgattcccgctcaggcagcccccgttaagacgctgaagatcggtgtcacggccggcactcacgctgaaattctccgtgccgctctgccgatcgcgaagaagaacggtctcgacatcaaagtgattgagttccaggactatgtgtctccgaacgaagctctggctcacggtgatctggacgcgaacatcttccagacgctctcctatctgaagctgatgaacaagcagcacaactatggccttgccccggttggcaagtcgatcaccgagccgcttacgttctactcgaagaagtacacgaacctctcccagcttccgaccggcgcgaagatcggtatcccgaatgatccgtccaccgaaggccgctcgcttttcgtgcttgaacaggcaggtctcatcaagctgaaggccggtgtcggccgtgagggttccccgctcgacgtgatctcgaacccgaagaagctgaagtttgtggaactcgatccggcccagacgccgcgctccctggatgacctggatgcggctgcggttaacggcaactacgcctacatctccggtctcacgaagacccgcaagggcattctcgttgagaagcccggtcctgaatacgtgaactacatcgtggtccgcgagaaggataagaacgccgcctgggtgaagaccctcgtgaagtcctatcaggatccgtctgtccgcgctttcgtgaacaagtcctataagggcagcgtgatcgcgaacttctgatagagaagcccggtttcagaatccctttgacgccctctggctttgccctgcccgcacttccctcgggcaggagaggccggagggcgttcttcgtaagagatttattcccgacagatgcggtaatacctgagacgcgtcaagcgtttcaggtattacttttttgagttcagcagatccttccggtaatttaattctcaaggacgggctggagcgagtctccctccctcttcgaaaatcattcaaagacatcattgctttttcagccggcacttcaagcggctggagagaaaaaaggaaactgtcatgcttcgccgtactcttctcatctctgctcttgcttccacccttgctctcgcggtgcccgcccacgcggcgaccaaaaccctgaaggtcggcgtgacggccggcctccacgcggaaatcctccgccaggccctcccgatcgcgaagaagaacggactcgatatcaaagtgattgagttccaggactatgtgtccccgaacgaagcgctttcccacggcgatcttgatgccaatatcttccagacactttcttacttcgagcttctgaataaacagcggaactatggtctcgctgccgtcggcaagacgattacggcgccgctcaccttctactcgaagaagtggaagagcttcagcgagatcccgaccggtgcccggattgcgatcccgaatgatccgtcgacagaaggccgcgcgctctacgtgctgcaggaggcgggcattatcaagctgaagccttccgcgggccgtaccggaacgccgcttgatatcatctcgaatccgaagaagctgaagattgtggaactggacccggcacagacgccgcgtgcgatcgatgatctcgatgccgctgccgtgaatggcaactatgcctacatttccggtctttcgaagacccgcaaggggattctcgttgagaagcccacggcgaactacatcaactacatcgtggtccgcgagaaggataagaacgctgactgggtgaagactctcgtcaagtcttatcaggatccgtctgtccgtgcgtacatcaataaatcctataagggcaatgtgatcgccaacttctgattctgaagaactcctgaggtcgcagcccccgcagtgtccggtatggtcttcctccgtgccggacattgcgggggtgttcttttgggtgaagtttcatgcacatgactttaaagtgaccgcaatcccctatttttgaagggttatcagtagcattccatatgataagatttgatctcagatacttcggaagaatgatgcaggtcggtcatttccccgcggctgcggctgtcgggagcgtctgattcaagagggcttacgccccgcagaagacccgggaagaagctgagaaaactctcggcaccattccataaaagcagtcgggcattcatcaaacgcgagcttccaggtacggcgtctggagccgtttcacacagggcggagccagccgtctggccgccgtaaccctcggcatgcagcgagtccgggaaacctccggacagagccggggtcgtatcatctggttcatttcagcacgcgctcgggcgatcagtctcacgctttcccggcagagcttcttcaccgatataccgcacgcggaaaccgacagcggataaaggaaagaacggccagattttggttttcggcgaatttcaatatctggagaataaaaattatgaggactccagcaaacgaacagtttcaactggatcagctgaacgactggcgaatgcttatcgacgtggtgaaagccaggtcgatgaagattgccgctcagaacctcggcgttgacccgtcaaccgtcacgcgccgtatcgacaagctcgaaacgaccatgggaacgaagtttcttctccgttccaaccaagggcttgaactcacccccgaaggacgcgtagccttcgcgaacatcagccacattctggcggaatacgacgcatttcttgcctcattccagcgcagccagaaagagcccccgcagaagatttccattacctgcccatccgtgcttgcggactgcgatctgatcggacttatcacggatttccagaagcgctatccgcagacctattttgagatctacgacacaccggaagaaatcaagggtgaacctgatctcagctactggtttggaacgccggcctgccgtgataagagccgtctgcagccgatctgctcatttcatcccgtgctcgccgtagcaccctcttatatagagaagtacggggaaccgaaggaaccagaggatattctgaaaacgcccgttttcttcttctaccgccccacgggcggggaagggacgactctgacgttcaccaagaacggcgaaacacgcgatgtccggattgatccgtcgctgcgctccagcgcgtatctgccgcttgtgccttccgctcttggaggcgaaggcgttctcgcgaacattaacagtttcatggttgataactatctgaagaccggtgatctgaagcttattctcacagattggaagctccccgcggttccgatttatcaggaagtgaatccggcccgtgagcgggatcccctgatcagtcagttcattgaagaggtgctgacgaacgtccacggcattatcaaggacatccccggcttcatggggtacgaagaaagcccgggcggtattttctgaaaacagcccgataggccataaaaagaggagaacatcaatgttctcctctttttttcaggaaatttttcttcagaagagaaaatcggacaagaaatagcgaaaaaagacccactcggagtaggtcggaatcggtatgcttataccatacgtaatcagtgtggatagatagaagggaagaatccgaaacggtttcatcctctgtcaatcaccgcggcttaaggagagccttgtaatggaaggtttatcgaacgaagcgaacgggctgctggagcggcttcgtaaagcgctggaagatgtggcgcctcaggggcgttttgctattgcttattcgggcgggctcgacagccggttcctctctcatgcctccaaactttttgggttcacgccgactttgctgcatgtcaccggctcccacgttggcggaaatgaggaggaagggtatcgctgggcgcgcgagaacggcttcgaaatccggactcttgagctggatcctcttaacgtgcctgaagtgcacgacggcaccaaataccgttgctacggctgcaaaaaaacggtcttcacggcacttcttaaagaagccggtgaccttccgctctgtgacggaacaaaccataccgatggtgaagccggcgtctggcgccccggtatgattgcgcttaaagaactcggtatccattcgccgctcgctgcagcgaacctcggtaagcctgagattcaccgtctcgcggccgaaaccggaatggaacgcccggaccagctacctgagccctgtctccttacgcgctttccttatggcatgactccgactgaacctgtgcttcagaggcttaagaaggctgaggaggcgatcagaaaggcgctggaagcggaaggtatgggagcgatgacctatcggctcagaatcgtgtctgaagggcatcctgagattcattttgaccttgccacctggactcatcttacggatcgggagaaatccgtgatccgggacgccgtggtgaagacggatccggagtttttcgcgaacatcagcctcaggggtttggaaaaactgtccgggtactttgatcgggtaacagggatcgtctgaagtctcccgggcgcggctttccaggaaatcaggcctcttacaggggcctgattattttttaggcagtcttttttaatcttgctctgttttcaggttaagcaacttatccagtgatttttccactcttctgtggataacttggaaacttacgcaccggagagcctgaaaccggctttccggagggtttcccggaaatgtaaagatgccggttttcttttcctgacatcaaatgaaacaggattaagactggtataccgtccggtttataaagaaaaaatgctgtaattactcccgttaggtgccgcaaattgtgcctgacgctcctcatatatgtttttatgaagcccgcccatccgtaatggatctgagcgggctctctttttatcagcatcagaatcagatgaaaaaacctgccagcggaaatgaccgcgggcaggttcttttatggatatcgcagaccgaaattattcggcaagaggctttctcgcgtgggaatccaccacttcgcgcatttctttacccggcttgaagtgaatagagtacttcggcggaaccggaacactctcgccggtacgcggattgcggccgatacgggcagggcggtagttcagcgagaaggagccaaaaccgcggatttcaatccggcggccgctcgtgattgcctttcccatttcttcaaagaggatgcgcactgcttcgtcagctgacttgttcgacagtacggggaggcgttcattcagcatggaaatcagttcggagcgggtgatgggggacggcatttcaaaatcctagaagcattaaaaatcaaaaaagggctacgaatcataggacttcagggattttttagcaaggcgaaatgcgataaaacgatgtttttgattacgcttcctcttccgtgacctcatctgaccggtctctgaactgcgcgagcacggcggaaccgcccatgatgacccccatggcgatgaagatccagaaaacgcccacagcggaggcgagaagaccaaaaccggtcggaagcaccgtgtggcagaggtttgtcagcatcgtgcggatgccaagcgcctcaccgacccgtccctttgggctctgagtctggaggagactcatgacgtttggctggcttgctccaagcccgagaccgagaatgaacgcgacaacaagcagcggcccgagctctgtgaagaacggaaaaagaatgtaggcgaagctgccgatcgcgagaaccgcgacaagaaactgccactcagaaatgcgttttgagagcagcggcataaggaatcggaccgcgaaagtcgccgcaaagaacatgccgatcagccagccaatctcagtcgcggagagcccgatcgcatgtccgtacaccgggaacataaagatttccagatcccaggccatggaaacaagggcggaaacgaagagcacgttccgcactcttgggtgcgagagcagctcaaaggcccctgtctttttatcgcggagacgcgcccgttcccaggaggccgggagcttattgcggctccagtaaaaggccgctagccccaggagagccgccgcggtgccgtagaaaaaagcgtaccggtgaccgaacgcgtcaatgatcatgccggaaaggatcggcgtgacaagacccgaggctgcctgtccggttgcgagccaggcaaagtttgcggttcggttgtgagagttggagtagaagcccaccagctgctgtgacaccatggaggtggacatcatgccgataccggtgagggcgcaggaaaaggcgagcggtgtgagaccgaaatgagacgtcggaaagacagccgggatcatgacgcccgcgagcagaaacagcccgccgaccgcgataggcagacgggcgccgacccggtctacaacacggccccagggcatggagaggaaggtcggaaaaagcgcaagaagactgatcagcaaaccaacggtgaaagatccatagccgtgggagagcgcgtcaaggctcgcagtaacgcgcacgaccgaaaaggtcatgtgaaacgcaacggtaaagagaatgacgcggagaatcatgggatcacataaaaaagacaggcagtctgatccaatatacgccgttcggatgaggttttgaatcgtttttccggggaggaaaagtcaaaaaaacagcctccgggaaaactgtgttcccggaggctcactcggttttgcagatggctttgcggccatcagaaggcggtatcagtcttcatcctcggcttcagtcccttccggggaaccgatcgggacgccggccttcgcctgacggtcgacgacttcgcgcatttccttgccggccttgaagtgcacggcatacttcgccgggacttcaacgctctcaccggagcggggattgcggcccttgcgggccgggcgatagttgagcgcgaaggagccgaagccacggatttcaatccgacggccgcttgacaccgcacgcgtcatttcttcgaggataagccgcacagcctcgtccgcggttttcgccgaaatgccgggaatccgttcgctgagaagaagcataagttcagaacgagtcactgcagccatttattaaacttcctgaaaattcaaaaattaaagagtgagatacgaatcttaagacgcctgtggaaaaatttccaccccttgacagaagaggattttgtatacgtctgctactcagctctttgaagaagttgttttcggtttggaatgtggtccgaacataacggaagagcgggggtaaaactgcgccatggcagcagtcggacaggaggacagtttttgattcaatctgtgagacagaacctgatggtcttcccgctaagcctaagagagtcacggaggtcagacatatcaaagcggcgcgtcccttagtgggaggcgccgctctgagagaagacagtcagttctgccgctgctcttaaaagaagcgggaaacggaaatcacctttccgatcggcacgccgccagtaggcgcacggtcttcttttgcgtaaacgacagcatccttgccgtctttgcccggcatcaggaacgcgtagatgccgatggtgccgcgtctcggatcgccggcagcggtattgatgacaacgatgtcgcctgagcagatgctgtactcgggaatgtcttcacccgcgatcagccccttcagatccttcggctcaaatccgcggtcagcgagatagagacgggggtagacgacggaaggataacggacttcatcgagggggtggaaatcaggcttcccatcagtgaaagagacagtgcaggtcggggcacgggagaaagtacgcgacttcgtgcggcgctgacgaagctcaagacgttcttccggagaagcgtcgtcgagagaatggtcctgatccatccagccggacgggagattcagtttctcctcaatcaggcgggccaggaagtgtcccatgttgcggacggtgcccttcggggagcacgcgcggatcttaatctggcggagggtcggatcggtacgttttttgccaatagcctcggaaattgcggcaaggctgccgcactgatcgacaagccggagaagattttcccttcgaatttcagtaataattttcatagtttaaaggtgttcctctgtgtaaagccaaacttatttaatgcttggtaccgcagttatatatatcttagcttttttatttagaatgtattgttacattaattgtgctaattggcaatagtttagccggatatttgaaaagaagcatttaatttcatccgtttgaaattgtaaataatgaatgtgagagaaataaacccttacgggttaacgtcatgtttaagtgaactctggtgattgttattcatgcaatcacgagtcgggcgttttctctagggaagatatctttgtgtcacggaaagtaagcgagattttgtcaaaagagcgtcaaaatcacgtaagactggtagaggaaatgtaactaaatctttttttatgagttctgttttataaaaagtggcacgaaaaatcatttcaagccctgtccggctggatatctgaagacggtgtgtgtatcggtcagccgtgatctttctgcgccagaaacagaagctgctgccgggtgaaggcataccggccattcagttcagaaatcagcccttccctggcccatccggaaagtgtccggctgaccaccccccggttgctgtgaatgagggcagccagatccgtgacagtaatggagccggggagcggtgttaccgcatcgcctggaatgccgttacccgctttgaagagagacagaattatcagcgcgaggcgttttggaacagtgaggagaccgttcatcagcagtccttctacctgagcctcttctttcagaatgaaattcgttttggtgagagagaaacgcaggatctttttcaagctctctgagatataacggaatgtcgagcgccagagcctcgacaggcagcagagctttggccatcaggggcatctcattgccgggctgtgagatagcgcggatggctccgagcgtagtgcccgccggaaaaagcccgaccatacggctgaagtccccggcgccgccggccagcgtggcgaaaagtccttttctgatgaaataaacccgtttttcgagaccgaaaggaatcacctcgtgatcattaaatgtgaccttccagccgtgatccgagaatattttttcggttccttccggatccttaggcagaacccaggggctctgtgaatatacgaaatccatagcgatgactctcctccgagcgatctatagcacagcgcgggggccgatgtcacagccttgggggtatatttcggaccggaatcgtatttttctttcgcttaagcgccgcagaagcagaagatctcggaggaggacttatgacaaggtacggatcagtaaagattgagggggttgatattttctatcgtgaggcagggagccccgaaaaaccggctcttctccttcttcatggtttcccgtcttccagtcatatgttccgcgatctgatcccggcgcttgaagaccggtttcatctgattgcgcctgactacccggggtttggccggtccgggatcccgccgagatcctctttctcttatacgtttgatcacctcgccgatatcgtccggcagtttgccgatgtgatggggcttgggaagttctttctttatgtgtttgactatggagccccgatcggcttccggctggcaaagtcggaaccggcgaggattctcggcatcatcagccagaacggcaatatctatcaggaaggacttggcaaaaagtgggaggcaagagctgaatactggcgccatccaactcccgaacttcgcgaacaatataaaagcgcctttgcgcctcagaccatcatcggtcagtacacattcggcacggaacccggaagcgtgtcgccggatggctatacgctggatattcactacacggaacgcccggaatatgacgaaattcagtcagatctgatctttgactatcagacgaatgtcgcgctttatccggcgttccaggcatatctgcgcgaatatcagccgcctcttctcgcggtctgggggaaaaacgatccgtcgtttattcctgccggagccgaagctttcagacgggatcttcctgaggccgaaatccattttgtggatagcggtcactttgctttggagtcttgctgcagtgaaatcgcggcttacatcagggcctttgcggatcgggtcgagcgcggcgcgctgaaatgacaggcaaacgcccgatccgtaatctccggaccgggcgttttcagatcactgatgtcacgcgctcagggctacatagaggaggttttccccttgatcgcgtctatcgcgtggatcgcggcgaggcgtcctgaagtcatagcgaaactcgaagccgatccttcgcagcggaggtcgtacgttgagtcatagagaccgccaatatcctggccaatgacatagaggttaggaatgacatcgccctgcaggttcttcgcctcgaagcgcggggtgactgtgacaccgcccagcgtgaggaagtacgcgcggatgcctttcagagcgtaatacggaccgtgattcatatcgaaggcctccaggtgctcaggctttctgccaaagtccggatctttcttttcagcggcaaatttattgacacgttccatcgtcgcgcgaaggttcttcgggggaacgccgatctggtttgccagatcctcaatcgtgtcggccttgaatgcccagccgcgcttcatgccttcttcccaggtttttgggagttccttcaggggaacaccggcgagaacgatcgcgttgaacggcaggagggcgcctttgttcaccatggtgtccatcttcttctgatcgaagatcgtgtacatcacaccgcccgcggtggtcatggcgttgtagacatcaacaaacacggaaccgcgggactcattaaagaagcgtttgccttcgtggttcacccagagccagggctgcgcgagcgcgcagcgaccctgcttcagataatccgggccgctgaactggcggatcgggggattatcggggaggtacggagcgttgccggcaactgtctgcatgccggccagacccgcgccgaccagctgcgccatgttgataccgtcgcccgtgcggccgtccttttccggaccgcggagccagatcggttccaccatgccgggggttgaagagtcagccacatacttcgcgatcatctccttattcgcggcgaaaccgccggtggcgatgatgaccttcttcgccataacgaaaatggtgtcgcccttggcactcttcgcttcaacaccgacaatctgtccgttattcgtgagaagcttctgcgccggggtagaggtcagaatctgggcgcggtcacccgccgcgcggatgttcttttcgtagtagtcgagaaccgcctcgcatccgcctttgaacaggtgccaggtcatcagggattcgtttttcggatacatcgtgcggatgccgcgcataccgatatgggcttcgttcaggatttcgttgatggtgtcagtcgatccggcaatcagcgcgcggagaacttcggggtcggcgcggaaatgatgatattcaagcgaggcgtcaagcacctggtccaccgtggtgttgatgccgtgagccttctgccaggtggtctgaacaccaagcgacccttcagggaagtgaccggcgccgccgagaacgccaagtttctcaagcaccacgacacgggctccatgcttcacggcagtgctcccggcggaaagtccccccagaccgccgccgataatcacaatgtcagtattgatggtctgggttttggcccaggccgggctcgtaacagccgtcagaacagcagccgtgatcagattcctgcgcgaaatagtgaacataacttttctctccttagtgaaccactccgggacgagtgcccgggatcctgttcttattattcgaaagaattagttctttggctgtaacttaggtgacaccgcagcattggcaacatgctgtcagaccgccccggagatcgaaattcgcggaatccttgcggtattacttgcggggcatgaggctttttcaggattcccggcggataatgaatctcaccagctaaacacccgcaattcagttgaaaaaattcaaaagagaggaaattatgctgaagcagtttctcctggcctcattcgcctgtgcccttgccgtagtatccggatttggtgtcagcaccaaagctgaagccaagcccgtttacacggtagcgatggatgcggcgtaccctccgtttggatctcaggatctgaagtcgaaggaatatgtcggctacgacgtcgatatcatcaaggcgattgccgccaaggaaggcttcgcggtcaagatccgcaatctgcagtttgacggtctgatcccggctctccgcaccggtaacattgatatcgcgatcaacgacatcacgattactccggatcgcgcgaagaacgtggatttctctcatcgttattacattgccggtctcggtgttgtggttcagaaaaataaccgcacgatccgtacggccaaggatcttgaagggaagcgtctcggtgtttcaatcggctcaaccggtgaagaggctgcccgtaagatcaaaaacgctgacgttcacgtctataaccagctgaatgaagcctatcttgagcttcggaatggcggtgtggatgccgtcgtgaatgacatcccgacgaatgactactatgtggccaccgcaggacgaggcgccgtgaaggctctgcctgtcgcgctgactcaggaagaccttggcatagccgtgaagaagggcaacaccaagcttctcacccagatcaatgacggtcttgcgaagatcaagaaggatggcgaattcgccaagatctatcacaagtggtttggcaagcagcccccgaaggctctgcttcacgactgagcctgatcgcccccggtaccctaaccctaacccccgagcgggaaagtgcagaaaatgtcactttccctgcttttattaaaacaagagcaggtcaccatgaatccgattgaatccattctcagccgctatcccctgatggttcttgactgcgcgctcggcactgaaatcgccaagcgtggttttgatacaaacgattcgctttggagcgcgaaggcgctttatgagcggccggaactgatcagggaaatttttgaagagtattacgatcagggtgccgatcttgtcgcgacggcaagctatcaggcgacgattcctggttttgaggcgaaggggttctcgcatgatgaatccgcggacctgatccgcaagtcggtagtgattgcccgcgaagcgcgcgacgcttcatggagccgtcactccggagagaaccgtccgaagccgattgtagcggcttctgtcggcccctatggcgcctatctggcaaacggcagtgagtacacgggcgactactcgcttacgcgtaaggagctggcggacttccatgctgaacgccttgcgctgctccttgaggagcggccggagattgtggcaattgaaacgatcccgctgcttcgcgaagcccaggcggttctcgatgtgctgaaagacacgcctgaagcaagcgcctgggtggctttctcctgtaaaaacggaaaggaaacctgcggcggtgacagtgtctatgaagccgccaaggcactcgactcgaacccgcagctcgccgcgatcggcatcaactgcaccgcgccccagtatgtagcgagcctcattcaggaagtccggcgcggtacctcgaaaccgattatctgctacccgaataccggtgaatcctataacccggcaacgaagacctggtttggttccccactcccgttccgcgcgtatgtgcggacctggtacgaggcgggtgcccgcgtgatcggcggctgttgccgcgcgactccagcagacactcacgatatcgcggaattccgtgctgagctgatccgcgaaggagtgccttcggcgctttaatgatctacgtgaattattgaaatcatgacgggagccccggttttaaagtcggtggctcccgtttttttatgccggtgtcacgggaatgtcattaaaacgaaacggagccgtcaaaaaacgtccctattctgcatagcgttcaggggagatcgatcagcatctcccgcgagcatcattatttattcaaggatagagataccaaatgaactgcaatcgccgtacgcttctcaagactgctgcgaccctcattgttcttcctgccgccggtgccgccaaggctgtttcggtctgtcccgccaccgacatcacaattccgcctgaaaaggatctgatttcctctttcggctgggtgacggatgttcactacagcgtgcagcctgtccgccgcattgataacgaggattcgacccgtgtttacgcgcattccctcgcgaagctccgccaggcaacggatctcttcaatacccgtaagctcgatttcgtgattgaactgggtgacttcaaggactgcaaggatgacggcgaccgtgagggaacgcttgaattcctgcgtacggttgagcgtgagttcagccgctacaacggtccccgctaccacgtggccggcaatcatgactttgacaagatcacctacgaagacttcgtgacgaacgtgacgaacccgggtgacgcgaatggcaagagctactacagcttcgtgcgaggcggtgtgaagtacattgtgctcgacgcctgctacaaggacacgaagggcaaccattactctgaaggcaacttcaattgggttcagacctatgtgccggatgaggaactcgcctggttcaagaaggaacttgcgaccggctccgaaccgatcattgtcttcacccaccagaatctcaactactgggacaagggaccgatgaacaactggttcatcaagaacgcggctgatgttgtgagcgccatggagcagagcggccgtgtgctcgccgctctttccggtcactatcaccgcggctggtactctgtccgcaacggcattcactatgttgtgaatcagggtctggtcgaacgcgctctgccgcgcaatgtcttcggcattgtgcacgtcggccgtgatcacacggtttatgtggagggcttctataacgaacgctcccacgtctgcaagcccgccaaggcctgatttccgcagtacccccgcacgggccagggccgtgcgggttctcctttttactttgcttgaggcttcggtttccgttccgtccccgggattctctcccctggggcaacgtgtcgggaaccgctttttttattctgaagagcaataaaaaagaggatgacgcggctgcgtcatcctctttcagttatctagaaccgcagatcagcgggggccggggccatgggggccggggccctgaggtccgggaccctgaggtccatgatcctgcggaccgggaccggggcctcccattttctttgcctgtccgggcggcatggggtgaccgggaccgttcatctttttagcctgtcccggcggcattccgtggggatgggccttgcggtaggccggggcatagttattgcggtaccagtcgttgcggacaaaatgcaccggacggcggcaggcgttgtacttgccgcagtagcggggccagtcgagacgctcgcgatccggcacgttgaggtagattgcggcaacaccggcagtggcagcgccgatcgcaaccacaggcgcgctgttccagactctcggcgcgtggccggtgagcgcagggataacgccccagtagccggggtcgccgattgaaatattgatattcgtcgcggcgtttgctgcggtcgcagtcatgagagcggcagctgcaaaggcaacagcggcattcttaagcttcatgagcccctcctttcctcgtgggtacgtttcgttacttaaaggatacttcgatcactgtcgaagaagcgtgagcaaaccgcaaaatttccatcgaaaccgtaattggatatttcgtcaataggaaacagcctgcgattccgaatccgggtcccgcatcttgtctccccagatagagtcgaggagggatgccggacgaacccgggttgaaatctcttctttatcacagatccaggcgtgaatcggttcgaggagagacggctggacccagagctcctcactgaccattttcgaaagattcttatccttccactgcttcagaaaacggtcgatggaaagccgcgaagtgttcacgacattcgcgatgtagtgacgctgaatcgggggcggcatgcggatccaggtgtcccccgcctcatcctgaacggtatgaccgtagctcgcggcccaggcatagtagaaagccgcaagcctcagctccacactgcagctggaaagaatcgcgaaaccgagacggtcagagagctttgccatttcaaactgacgcgcgaaaagaagcgccgcctcggggctcccccgcagcaccgggatgaggagatccttgggggctgtgatgatttcacttggaatcagcgcgaagtaacgcccgaaacacgggaaaccggtgaaaaaattcaggttgccgcttgcgaaccgccctggaatcgagagaccgatcgcgtttccgtcgtgccccagcgcgcggcctgtgatgccctttctaacaacagtgacctggtccaccggatcgcagggtctgaagatttcttctccggcgctcagtttccgtaccgtgccgattctctcaatcagccggagaagcgaaggatgcagcgcgtgagtaataaaaggtatgactggtgttctgggaatccctgattcaaaccatgcggtcggccgcggcaattcaaccgcggcgtaccaggcgaagggacgacgtgccattttctctctccataaaacagtttgtccgccgctttctctgttccgtttttttttctgtgttctttttttcagctaatagtagcttttttcctttatccgcatgactaaagacctacctactgcctccaatattccgtgctaacccctataacaattgttgttatataggaactaacccctatatcgatagcctatattgttagggcttatatatcagtcgaaagtagtacaactgaattgttggcttaaggccgcgagtgaaaacggcctgcacaaagccattcaaagagagaggagaaaaatatggaattttcgcgtcgtcatttccttggtgccggaagcgctcttgccgcggctggtcttatgtccgccgccggtcaggcttctgcccagaccgcgaaggtccccgctaagtgggatgaaaccgtcgatttcctgatcgtcggtaccggttttgctggtcttgcagccgctcttgaagcgcatcagatcggcatcaagaacgtcctcgtgatcgacaagatgccgaccccgggcggcaactccatcatcaacggcggtgctgtggctgctgccggcacggatatgcagaagaaggctggcatttccgataatcctgatctgctctacagcgacattctgcgcgctggcggcggtctcgctcatccggaactcgcccgtcacattgctgatgaatccgttgagaacttctactggctccgtgacaagatcggcgttcagtttgaagccgttacgtatcatggcggccactccgtgaagcgcagccactccgttacggcccatatgggttccggcttcatcaacccgatgctcgcgaagtgcaaggaatacaacattccgattcagctccgcacctacctcgaagacatcatcgaggacgataagggcgtggtgctgggcgccaaggtccgtaccggctatcgcttcccgcgcgccaattccggcaaggtgaagtacatccgcgcccgcaatggcgtgctgctcgctgccggcggtttcgcccagaatgttacgatgcgtatgagccacgacccgcgtctgaccgcggccttcggttccacgaaccagccgggtgcgaccggtgaagcgctccaggacgctcagttcctcggcgccaacacggtccatatggactggattcagctcggaccgtggaccagcccggatgaacagggcttcggcaagactccgcttctgactgaaccgctcgtcggctacggtccgatggtggatccggcgaacgcgaagcgcttcgttcaggaaaccggcaaccgcaaggttcgtgctgacgctatcgtcgctatcggtcacccggttgtgatgtatgcctgcgcgaagaacgtgtttggtcaggctgtgggcaagaacatgtccaaggaaatgttcgactccctcctgaagtccggcgttgtccatgagttcaagacgctgaaggatctcgcggctttctacaagatcccgtatgacgccctggttgctgagaacgataagttcaacggctacatgaaggccatgaatgacccgcagttccacaccaagttcttcaaggacggcgtgccgaacacggaagcgaacggcccgttctatgcctggagactctggccgcgtgtccatcactgcatgggcggtctcgagatcaacaacaaggctcaggtgctggatgcccgccacaacgtgatccccggtctcttcgccgctggcgaagtgacgggcggtgtccacggcatggtccgcctcggcacggtcgctgttgctgactgcatgatcttcggccgtacggcagcccgttctgccaaggcctataagcagccgatgtaactttctcccgtagtacacgcgcctctatccctactctcctggagagaggcgcgagagatccggtgattccccattgccggatctcttttttgtgggagaagggcgggaagtgctggctgccgcgccgacaggcgctcgcaatatttatctttcaggcataaaaaaacggttcccgaaggaaccgttttttctgcaccattcagcgatcagggcatcttgaagttgaacttgtggcactggttgcagtagatctcagacttctcgtgacccacgtggcaaagcgtgcattcaaggttctgatgatagtgcggggagtcgtgcgggttcgtcggcttgacgttcttcgtcttctcggcaagcttcttggggtcgtggcacttgacgcactgattcatgtcaggggtctcgatcttcttatcggggccatggcaggattcgcacttcatgccagcagcaatatgcttgtcagcggtgaagtcggcggcgtaggcgctcgaaagcgagaacgcgccaagcatcagtcccagagcgcataacttgagtagtttcatggtgctgagtctccgtttttttaggtgttttcttaattattccttaaatccgtcggttctactaacggtttaatggtttgcacttaggtctatagtactcctggtaaggttatgagatgcaaaagcgtttgatttatcgggaaatccttgtgattgctgaagtatttagaggataatggcagatccggagatcgacccgggctgatctcatttccctgattcagatgatgcagaaactgatcccgtcccaaatagctgctttaatcttctgtgcgctggccgcgcttcctgcgtccggaagcgggaaagcgtctgatgaatcatcccggccgcttgttatcgcctcgatggattatgtgaagccgagcgacaaggggaccgtgattgagaagacggcggaaagccttcgcaagcatttcccagggcgatcagtcgaggtggcaccagtccctgcttcagagtttgggaaagaactgacggcgggaaaactggatttctttatcacgagcgccgggcagtcctatcggctgcagcaggatcacggcgttcgtgtattcgggacgctggtgcagcctggctacccggatcccaatcatggggacggagccgccatactggtgcggaaatctgacggaataacggatatcagtgcgctgcggggaaggacgctgctcgccaacacatcaatcgcttttaccgggttttatgttccgatgggggaagtggcgaaggttgaccccaactgggagaccttcttctcttctgtgaagtttgtcgggggagggagccatctcgctgaagcgcttacggatgtcgcggaagggaaggccggggttgcgtttgccagactctgcttctttgagtcctgggccaaggatcatccggatctcgcctcaaagctcgctgtagtaggagagaaaaccgagcccggggaaccctgccggcggagcacgcctctgtaccccagctggatcattacgggaactaaccgtctgacgccgggggaagcccggtcggcggaactcgcgatcctcaatatgcctccggattcacacggcaactactggggcatcgcgacagattttcttccggtcgatcatctttaccggacgcttcggatcgggaaataccgttacctccgcgaaaccacggtgcagatgctgcttcgcgagtactggccgctttttatcatcgcggtgcttgccgcgatcggtctgatccttcacgcctggcggtctgatgtgcttgtgcgccgccgcacagagcagctgaaggccctgatggatgagcagcagaagctgcagaaaaaagcgcttgacgccacaaagcatctggacgcgctgcagaaaatgggtgccctcggacaggtgtccggaatgctggcgcacgagatgaggcagccgctttccaccatgagtttctatctggatggacttcggatgctgctgaagcgaggggtaatcggccccgcggagaaactctcggaacccctctctcagattgagcgtcaggcaaaaaaggcgtctgacattgtcgatcacgcccgttcttacgcccgttcctcgagacttgaagggcgccgtgtctggatccggcttggtgacgcgctgaaagaagcggcggaaaactatcgggtatcgagaaagacgcctcttcggctggacgtgtcacacgcggacgcggacgtctgggtgaggatagatcctctggaacttgagtgtgtggtatttaatctcctcaaaaacgcgggggaggcggcggaaggagcagactctcccgccgtgatgctgaacgccatacccggaaacggaaaaatccgtgtggaagtgatcgataacggccccactcttgacgatgaggcgttcgcgcgtctctcttcaccgcttaacagcacgaaggaaggcggtctcggtcttggtatttcaatcgtccgggagcttctcagttcatacggaagccatttgctctatgaaagaatcccagggggaggtctcagggcctcgtttgagctggagtgtgtgaaggaaaatccgggtgaaggagaacggaaatgaagaatcttgaggaaatgcagaatgaggctctcatccgcatcgtggatgatgacgcggatctccggaaggggcttaccttcatgctggaatgcgcgggatggaagagcgcggcctatccctccgcccgtgacttcctgacacaggattctccctccattcccggctgtctcatccttgatgtacagatggccggtatgactgggattgagcttcagcatgaaatgaaccgccgcgggaacactctccccattatttttctgaccggtcacggtgatatcgatatggcggtcaccgccatgattgatggtgccgcgaactttattcagaagccgccggaaagcgggaagctgctcgccgcaattgagacctgtgtctcgcagtcgctgaagaatgcggaagggacttcatcccccgcggtgctccgtcagagactctctcttctcacaaggagagagctcgaaatcgcggaactggtggcggcaggactgacaagccgtcagatcgctgagcgtcttggaatcagtgagcggacggtggaagtgcatcgctcgtctcttcaccagaaactccggatgcagattacagcttcatcactcagtcaaatattaaaaaaataagtttctcataaattcatattaaatccgataatatcggcgtcagaacagaatttaatcgatattttcagtaactaaatatagaatcaaaaatgatgtcatatcatgagcagatgatataatcaattttgacaactttgagtgcgtttgcagcgcctgccctgagacctgagtcagaaaggatggaatatggaaaacagcaagattgttgacgccgaagcggaagacggcgcttcctaccgagagacgctttccaatttcggcggctatctgtcccgggacagcagctatggtgatcaggaaacaagagccatgctggagcgggtattgaagaatcaggagtacatcatcagccgcctgatccgtgtcgagacccgtctcttcaaactgatgcaggctgaaggtgtcagaccggacggcacaatattcaggacggataagagctgaaccgctgtttcttctgaaagtcccgcagcccccgtattcctttccagaaacgggggcaatgttttgcctttttttctcagagagagcgtgatgtgcttccatctatgcgagacggaataaacagaaatcgcgtttgaaatcagatattcagacaaagaaaaaccccgaaggattaaccttcggggtttgcgattcctggcggagaaggagggattcgaaccctcgagaccagttatatttgatctgcacccttagcaggggtgtgccttcagccactcggccacttctccgaaagcgaggaaattaatcgtcgctagagactatgcattctacaagaagttgcgcattatttcaaataaaaaattaaatcctgtgacgcataagtcatttctgtcagatcagcgagtaaacattcgcctgcatgcggatacgttcttccaccgtatccagctgcagatattcacgctcagtgtggagtcccgatccggcaggaccgcagccatccaccacgggaactccgctttccgcgatgtggtttccgtccgagccgccgcccgcatcgacccacttagccgtgaagccggccttttcggccgcctgattcacaatgccgacgagtccctttgtggcttcggagagcggcatggcgggaaggaatgaattgcgtttcagctcgcaggtcaccccttcaacccataccttctttgcggcttcctgaatcttctgatcgagccaggcgccgtcttcatccttccagaaccgggtgtcgatttcgacacgggcgagatccggaatcgcgttcacgatttttcccccttcgatgatgccagggttcacggtcgtgccgcgttcgaaatcgttgtactgatagatctcgctgataaatctcaccagagcgatgttggcgttatggccttcctgaggattgttgcctgcgtgagctgaaagcccgtggaaagtgacggtgtagagggcagagccttttcttgagcggaccagggcgccgtttgcgcgggccggttcacagatcagaacgcgatccgcctttttgccctgggcgagaagccagtccgaagaccagggggagctcagttcctcgtccggattgcagcagacgaggattgaaagccggtcgatatcttccttacgggcggtcttgatgccgtagaagatcgagagaacgcccgccttgcagtcgagacacccgggaccgtaggccttgacatcatcaaaccggaagggtctggcggctgccgtgccgtccgggaaaaccgtgtcgagatgcgcgttcagcatgatgtcatagtgatcggctccggggcggttggtcgcaaggagagccttcccgcagtcaggcgacagatcgacaagctccgcatggaatccgattgattcgtagtgccgtttcatgatttcagcggctttcgtaacgccagccgcgtttctcgttcctgcgtcgatgttgacgagttcagcgaggtctttcaggaaatcctgcaggattgtcatttctgctccttcagctatgccttcttgctgtcaataagaaaaaaccgaacggggagagcgctccgccgttcggcttattgtagagatacctgaacctcaggatgcgagcacgataagccgcatgacccaaagggaaagaatcgcgacgatgacaggcaccgccatgatgatcgggaccattctgccggaaacaccgatcacgccgagaacgcgcccgaggtactggacctgagatcccatcaggaagatcgcgggagtcaggatcgcgagatcagtgccattcagcgctccggacgagtggagcgcaattgccgtaccgacaccgccgcccgcggaaagccaggcgccgaggagtaccacgatggcttctccgggaagaccgaaaatctccatcacggggccgcaggtgtcaccgacgagcgtgaggatcccggtaatattgagcgccttgatgatgacaaacgccatcaccacattcggaagcatcgagccgatcgcgatcccccagccctttttagcgccgcggacaaacacttccgtcacaatttcctttctttcaggctgcacagcggccgccatattttcttctgccatttttcttttcctgtttttattaagaggcggactttttgccggcacggaagaggat

SEQ ID NO: 1280 - DNA, 21227 bp, Unknown
  gut microbiota DNA sequence
caacatagaaaaagagtgaccggaaaacgcgtcaaaagaagaagagagagaacccgccatggaaggctttaaacactaccgcatcgggccttttgcccgatatctctgcgtcaccacctcgtttctgaagcactacgaggatgaaggtctcatcagcgtggtgcagcaggataacggctaccgctactatccgttccccgaggccgcgcatattctcgaatacatgcggcttcatagttacggggtcccgttaaaggaaatgcggaccgccgtcactgggcccaccgaaacggcgttcgagaacatcgatcggcacgccgatgaactgcagaagaaggcggaccgcctgcaggccattgtggatgagcaccggcggttccggaagtggtacgaggatatggcgggggacgcttcccgttgggaagtgaagaagatcgacccggtctacttcctcccccactcagaagggcaggagtttctggatgacgagcggatttatgagatcttccccgcgtggagcgactcgatgccgctcgtgaaaaccgggctctacgtgaagaagaatccgaaaacgccggggacaaacgatattttctgggggctctgcgtgacggaatcaaacctccggaaggccgggatcccggtgaacgacgcggtgtggaaactgccatccggccccgcctttctctatcacttctgcgatctcttccgccccacctgcatgaaggatgtccgggtgaaccgccatccggcgtttgaaaaaatgcgggaactcgggttccgggcgtcgggtgacgcgctgatcgcggtcgatatgaagcttgagaaagacggcgtgaagcgcgggttcgggcgcgtcgtgattccgatggcggaataaagggttaagggataaggaagagacgggatggatggcaccaaacactaccggattggaacgttcgcggattatctctgcgtgtcgcgctcctttctgaagcattacgaggaagagcacctcatcaaggtcgtgcatcaggataacggctaccgctattacccgtttacggaagccgcgcacatccttgaatatatgcggcttcatagctacgggatcccggtgcgggaaatgaaaagcgcggtgacggcgagcgccgagtccgcgtttgacacgattgaccgccacgcggatgagctcgaaaagaaagcggagcggctgctcgcggtggtcgctgagcaccggcggatccggaagtggtaccaggatatggcggggcagcctttccgctgggaagtgaagaagatggagccggtttacttcctcccccactcgaacgcccaggactttacggacgacccgcgggtctatgaaatcttccccgagtggtgtgaatcgatgccgctcgtgaagatcggactctacgtgaagcggaatccgaaaacgccggggacaaacgaggtgttctgggggctctgcgtcacggaagcgaacctgaagcgggccgggctccccgtgaacgacgcggtgtggaagatgccgtcgagtcaggcctttatctatcacttctatgacctgctgcggcccactccgatgaaagaagtgcgggagaaccgccacccggggtttgaactcatgcgggagctgggattccaggcgtcgggcgacgccctcatcgtcaccgatatgaagcttgagaaagacggcgtgaagcggggctttgggcgggccgtgatcccgatggtcgatccggcgtcgatgctagatcattccgaaaaaaatgactgacctttccggaacccctttagaatggaggtttcggggtccgggcgggacaccgcgcgagagcggtgagaggggccgaggcctgaggtcccatcgatttatatccagctctgggtaaagcccgagtgcgagattggagagagtctcaaaacactatggatacctttaagcactaccggatcggtaacttcgcgcgccacatgtgcgtgtcgccctcgcttctcaagtattacgaggacgcggggcttctgaaagcggtgcagcttgagaacgggtaccgctactattcgttccatcaggcatcgattctgcttgaatacatgcggcttcagagttacgggatcccgttaaaagaaatgcgggaaaccttcacgggtgacccccgggacgcgatcgcgagttttgacgcgcacgcggatcaattgcaggaaaaagcggaccggcagcaggcgatcgtggatgagcaccggcggttccggaagtggtttgaccggatgaagggggagcccttccggtgggaagtgaaagccgtcgacccaatctacttccttccgcattcgagcggccaggattttctggaagagaaagggatttacgaggtcttccaggggtggtgcgacaacatgccgctcacgaaatccgcgatgtatgtgaggaagggagcggaacctgggtcgaagaacgaactctactgggggctcgccgtggcggaggaaacccttcaccgaggccggatcccggtgaacgacgccgtgatgctgctccccgagtcgcacgcctttgtctatcacttctacgacctcgaagaccccacgcacctcacggaactcgccgaaagccgtcacccggcgtttgataagatgcgggagctcggctttcacgcgaaaggcgacgccctcatcgtgatcgatatggcgctggaacgcgacggcgtgaagcgggggttcgggcgctttgtgatcccgattgaggagtaagactcttcaaagaccgccgatctggcagttcctttactctcttatatagagagacaccaaagccctggcgtccggcatggattccagggctttgctttcaggagcgttacgtggatcaggggtttgggtctcccctcctccaccaaaagaaaacggggccccccgcattgctcagggggccccgcgaaacactctcaggctcttaactgattttggtaatcagatcagaacttgtggatcaggccgccgaggacgccgacagaagacggcgtgccgtcgttcgacgtgccttcagccttctgctgcgagtaggtcacagcggcgtaggcgctcgtacgcttcgagaagaagtactcgtaagcaccggcagcgccccagcgcttgtacttcgccgtgccttcatccaccttcgcgtcacggtagtcaaccatggcgtgccacacaccgccgaaagcggggatgtcagcgccgagagcagcgccccagcctttgaacccgttctgagcgacggtggaggtgaggttcgcgaggtcaccgaccttgctcttcagggacttctggtgatcgaagtagttcaccatcgcgtaagcgcggacgaccttgaagtcataagcgccgccgaggatgatgttgtagccgttatcgatgttgtcgttcgtcgtggagtcgttcttccacatcgtgtagtcaccgatcaaagcggcgcgccacggaccctggtcataggacacaccgagggcggcgtagcggtcggtcttggagctgttttcgcggatcgcggagccgtccgtcacgctgtccgccttgaaggagtactgagcgtggagagcgaagccggcgacagagggagaaacgtacgtgagggaattatcgacgcggccccagtcggaacccgtgaaaccggagatgccggcatcgttccagccgccgttatacggggtgaacgcgccgccgcccatcgcggtggagcctgccgtgctcacgagcttacccacgcggccagcggtgagagaaccataagcgccggaaaccgtgatcgaagcttcacggccgaacaggcggccggagttatccgccgtgccgtcgtcatcgttgaaaccgttttcaaggatgaagctcaccttggcgctgccgaggtcttccgtgcccttcaggccccagcgggagccggagttctggccggacttcatggagaccgtgtcggtcgaggaggtcttgccgtcgtcggcgcggtagtggttatagtagatgccggtatcgatcaggccgtacatcgtgacggacggagcggcgaacgccgaggcagcgaaggtgccgagcagagcagcggcaacgagagtctttttcatcttttcagtcctatgaactgtttgtcatctctcctgggggtgtcagacaattggagtgcgttttctcccgggactcttgtttttctcttcaggcggaacgggtttcaaagtggcgaacctttgacaccctgctctgcctgaatcggtaagcctcatcaggaggatctaatcctttctaggcttaacgacgtaatcctaaagatgaaccctgcactcaggtcaagagaacgattttcggcggattttttccggaaacaccctgaaaaactccgttacaaaggcggcttcccgtagaatattggctgaaagcaggtaaaaaccctacaattctggggcggaaaccacggaaacccccgttctgaaacctgagggaggggctcagctttcggctaatccttttttcttacagagggttaggctgacggcgtgaggggtgaaaatcccgaatccgtgatcccgggaatccgggtgaggaaacgggaatggtgttttctcttctcccctccccgcttctctgaacaaaatataaaatcccgtaaactcatcaagttagattgactttcttcaagcggtaactgaaaacctgaggcctctatggaaacgttcaagcagtatcggatcggtcacttcgcgcggcacctcggtgtctcgcagtcgttcctgaagcattacgaggacgctgggcttcttgaggcaacccagcgggaaaacggctaccggttttatgagttcccgcaggccgcgcgcctcctcgaatacatgcggctgcatagctatggggtccccattaaacagatgaaggacgcggtgtctgtcaccgcggacgaggcgttcgataacatcgatcaccacgcggatgaactccgaaaaacggctgaacggctgctcgcgatcgtcgatgagcatgaccggattcacacctggcgagaggcgatgcaggggaagcacacccgctgggaagtgaagccgattgagccgatctacttcctccctcacacgagcggtcaggatttcctggaagaccaccggatttatgagattcttcacgactggtgcgaagagatgccggtgacgaagtccgcgctcctcgtgaagcaccactctgacaacgaacccgcgaacaccatgtactgggggctctgcgtgacggagtcaaacctcaggcgctgcgggatccccacaaacgacgcggtgctcgtgatcccgaagacgcttgcctttgtctttcacttttatgatgtggaagacgttttccggatggacgatatcgcgtcgggtgaccaccccgcgttccggaaactccggagtctcgggtttaagccctcaggggacgcgctactcatcaacgaaatgaagctcatgcgggacagtgtccagcggggatcagggagatgcgtgattccgattgaggaataaaaacgcgaagcggatggaaaaatcagaggctctcgggtaaccgggggcctttctttttgaagaggtgcctgagtctctctatctatattagaggcacggaaaattgagccgtttttccgattctgagaaaccggttttaaagagatcggaattccgggcggaaaagcgcggcagagaatgggatcggtgccctcttcccgatatcggtgttccgaaatcgcgggagaacggacattgatgagaaatggggaacccctttcggggtccagccgggagggatacccggccggaggagagctgctgcttcgaaaccgaaaccgtggaggagagagttgggttccggttccgtaggacactcttaggagagatggaaagagataccgctcttcccccagggcgaactgggtgtcgggcggcatccccttctcaggttgatctttcaggggtgaaagatcagaacttgtgcatgaggccggcgatcacgtcgatcacctgcttgccagccttcggattcgcggcttcctgcgcgtcagagtaacggctgttgatgtagttcgcggccgtgtagagggacgtgcgcttcgagagcgggaggaggtagccgacagcagcctgccaggtcttcatcgtgcggtcagaatccttgcttcccttgaagtcaccgtagccgaggccagccttgatgaaaccgtgggacaccgggacatccacgccgacattcgcgccccagccgtcaacaccggagggaagtgcgaaggtcgtcgtacgggcggccgccgtgtagttctggaagtactggccgtaggcgtagaacttcgcccagccagcctggtaagaaccgccgaggttatagctgatcgcgtccttcagaccggcctcgctcgcggcgggctgcgcgaaattgatacgctcgataccgccgaccatcatgaagttgttgttcgtatagcggagagcgccggcgtacatacgttcgacagaggacttgccttcaacgccgtcaccgaacttcttcacgtccgtgccgttcgagtactggagggtggcgtcaaacccggcgaacttgggggaagcccaggcgagcgcgttatccacgtattcgtagccaagcgccatcacctggaggtgaccgccgacgttgccccagccgcaggagaacggggagaggatgtgaccgaaacgggcgtacgggccgttgccgcccaccatcgcgcccatacggccagcggagaagagaccgtactggttatcgacgtagagacgcgcgtcgcggccaaagagccggccgctctggccggacatgccggagtcggtggagaggccgccttcgagctgaacgccgaccgtggtgccgttatcaaaacgttcttcagacttgaggccgaagcgggagccgatgtactgaccggaaaccatggagagggaatcggtcttcgacccgccaaccgtcttcacgtgctggtaatcgagaccctggtcaatcacgccatagatctgggtgccggaagcgaaagcggtggaggcgaaagcgccggccgtcgcgaggacgagtgcagagagcttgagattcatgatgtttgaactgtgtttttagtgtggtggggtgggaatctttcccgccggaaagagtgagaggtttctcccctcttctctttccagcagccgggaaacaggtcggttacgccttcttcgcgagagcgcggccgatcacacggccgaacgtcacggtgcggccgcaggccataccggtcgcgaggttcgggtactcgttcgcgaagtaggagcccgagtcgttgccgatcacgtagagcccggggatcgcgtcgccgttttcgtcacaggcgttgagatccttgttgatcacaatgccgtcgagcgtgcaaagcagccagccggaattcttcgcgccgtagtacgggggcttattcaccggagacaggcgatgcttctctttcccgaactcggggtcgacgccgttcttccagttctcgttattcttttccacggtcttcttcaccgcttcaaccgggagaccgagtttcttcgcgagttcctcgatcgtgtccgcctgctgcacgaagccgctcttgatcagccccgggagcatcttgtccttcacgacaaaccacggaatgttgggctcagcgccgttcgcgaagggccagaggcgggagcagccgtgcatcttgaactgctttgcgtattcaggccagttgctgtcaaagatcgtgtagtgagcgtgatccttgttgtattcgtccgcgtggagcggattctcgtacgtgccggattcgttgatgaagcgttcaccaaacgaattcaccttcagccacggctgcgatcccatccagaaccaggcgttgtcgcccgacttcagggtctcgagacccgccttctgattcgggcggatcgcggcgcggtcaaacttcattgcgcagtgcgtctcgtccatcttggcaccgacccagaggcaggccttgatgccgtcgccgagcgcgcccggcatcgcgccggtgcgggagacgacgcggaggttccagggctggagcgcttccatcatcttgtagttacgggcgtagccgccggtcgcaaccaccgtgcccttcttcgcgatgtagcggacgtacttcccgtcaccgttctgagcgatacagccagtcacgcggccgtccttcttctcgagcttcaccatcttcatcgagtagtcgaagcgggcacccttgctgatcgcatacttgtagaggaaggaattgaacttctggccttcgttcgcgccgactttctggccggagtggccggtggcgtagccaacgtagcgggcgggatcgttcttgtcacccacttcgttcatcatctcgatgccgttttctttcagccggtcaccgaaccagtcgatcgtttcgccggagttatccgcccagacgttgtagagctcctgcttcacgtggccgcccgcgtaacgggtcgcccaggcggtgaactcgaacttgtcgatcttcgtcccttctttcttctgatagcgggagttgatcgcgccgaggtcaccacggatgccggtgccggtggggaagcggtcaataccaatgaccttgccgccgttctcagcagcggcgcacacagcgaacatgccgccggtaccgcagccgatcacgaggatgtcggtggtcacggtgttcacgatgtccttctcagcgatctcgggggccttcccgagccagtcgccggaatcctcttccttcgcggtttccttcgtgatcacttcaaccgggatctcgcccttcgcctgcgcgatgcacttcgcggcggccttccggacagcggacgacgtgattgaggcgccggacaccgtgtccaccttggcgccctgaccgagcagcagctgcttcttcagttcaacggccgccttctggccgatcccgggggtctcgtgcgacgcgtcgatcacaacgcccgtgatcttattcgtgtcaaacgtcatcgtgacgatgacgtcgccgccgataccggcagccttggaggagtaagtaccggccttatagatgccggcaggagccgcgtgagccagagccgcggtggtgatagaggcaccgccgacaatgctggtacgcaggaacttacgacgagagaactgagtcatgagagtttttcttcctttgaaccaaaaaggtgaagccgaaaggcgtaagcaatgccgccattcggcgtaacgggaaaaaatgatattggtgcatcccggatacgggtcaagggagaaaaaaattgctgtgctgtaagtcacagatcgaacatctttgaggtaaaaaccctagtgatgatgtaattttttgttattaattacgggaaaaccccgaaaatggcgtcgatagaaagtggggtaatgtctttccaaagccgaatctaggatgcgacttttgatgtattgcctccctaaaccattggggtagttaccccgaatgggtagaagtaggaaaataagagccgcttgacctgaaaaaagggcctttcctgccgggagacgcgggccgcggccgaaaacaaaaccgaatcgcaattaaaacaagaagatccgcccgcttcgcggtgacggatcggagagaagagagagatgactgtattcaaggaataccggattgggagtttcgcttatcaccttggggtaacccaggcgttcctcaaacactatgaggaagcggggctgattgacgcgaaacagaacgagaaaggctaccgctactaccagtttccgcaggcggggcgcgtttttgaatacatgcggctccatagcttcgggatccagatcaagcagatgaaatgcgctctcgcggcagacgaagagaccgcgtttaaaaccattgatgaccacgcggatgagctgcagcagaaggcggaccggctgcaggcgatcgtggatgagcaccggcgctttaataaatggcacgacgcgatgcgggggaacgagaccaagtgggaagtgaaagagatcgagccgatctacttcctcccccacacctgcgggcaggactttatcgatgacgaccgggtgtatgaggtgctgcaggcctggtgcgatcagatgccggtgacgaagtccgcgctttacgtgaaaccggatcccgagaatccgggggaaaacaaggtcttctgggggctttacgtcacggaagcgaatgtgaagcgctgcgggattccgctgaacggtgccgtctgggtgatcccgaaaacggtcgcctttgtgttccacttcgcggggctgaaggatccgttcctcatgaaggactccgaaaccggagcgcatccggcgtttcagaaactccggtctctagggctcaaaccctccggtaacgcgatcctgattaacgaaatgaagctggaacgggatggcgtacagcggggatacggccgctttgtgataccgatttcggagtgaccgcttcattcttatatagaagagccgtgaaaagacaccggtcggacacggggtactgaaggggggagaagcttcggactgctctcccctcttcttttccggagacagaaatggattccgaaagcgggctgtccggttgtaaaccgagcgctgtcaaaagcgggtgcaagaaacccggcaccccgcacggaggcggtaaccgcttaaccgcctcccctcttttgattttttaatccacggcgacccggcaggggagcccggtcatgccggtgaaattcatcgggtacgtgtggacatgacagcgggcgaagggacggccctgaagcacgtcgcccaggtgacagagattctccacgatgaagacatcgtgatccgcgcagtgctgatccatcgggggatgttccgcgccccgcctcaccccggcgcagtcgacaccgatgatcgagatgtgacggagaagcagcgcgtcgatcagttcaggcgataaggtggggtgctccttgaagtaggtcgggttcccgtatcccactttctcaataaaaccggtcgcgaaaatgaccgccatatcggctttaacgagcgtgaggtcgatgtcgctgatctgcacctccccatcccctacacggctgacgtcgaagataatgccttcgcgctccgcgtattccatcggaaaaaccttgtccatcacatcgaagtgagtgccaagatgccccgtgaaggctttccattgattctgccccatactctcgcgcaccttcggcgtgacgcataaagtgatatcggtcataggagttcctttaaggtgtttactgcaggtgtgtagtagaacgctttgattaatatagcaaaggtttaaatttcagataggagacgctatctatttaaagtgttacaggatttatgagaaactgaacgagaagaactttattcgagctacgaacgatttgtgattccggagatcccgatcgaaaaaaaagcgagccaatccccttcaccgccccgcttcaatgctttcagtgtcgctaaaaaatcctgactcctcacccgaggtggagagaaagcctccggcaggagtcaggaaagtctgccgctctgtttttaaattaccgattaataacaatcagttaattgatggttcttcaagtgacgctgagatttatttttcagaagaaatgcgtcacgccgaggctgacaagagaccggttcgcttcagcgcgctcttcggtgctcgccatcgtgtaaccggatttcgagttccggttaagagacttggagccatgcgaatacgaatagactccccagagggttgtgcgcttggataccgggtacgtgtagccgattgaggccaccgtgcggtcggcgttgaaatccgtgccatccgccagtttcacggatttcccgtcaaagtactggacagacgtccggataagaccgccggctgccggtgctgtgaacccaagcatgtaggagttggagtccgaattcacgccccaccaggtgtggttcttcgtgtaggagtaagcgataaacgccctcaccggaccgaagtcgtaattcacgccagccttgaagacgtggtcattcttcgacgcggcgtcacccttcgtaagaacctcatacgtgaacccggcccagaggcggtcattctggtacgagctaccgatcgcggcgtagtggcgtttcgcgccgaagcctggtttttccgtttcgactccgagcgaatacgcgccggctacggtgagacccgcgatgggacggacacgcgcggcgaccgcgttattcgcggaaagcccgatattcgcgaagacgttcccgccgcccgcctccgcccagccgccctcaaacggttccatcgggcacatcaggtcaaattcacccatcgtggatgaaagcccctccatgcggccggcagcgaccgtccacttttcggtgttcaccatgaggagcgcctgattgtcgaaaagccggccttcctcaaggaacgttcccgagtcgctgttaaagcggttttccaggctgaacgcgaccgagtagccgttcccaagcgactctgatcctttcagcccgatcaggttcggaaaccactggccggattccattccgaccgtggtctgggatgatgccccgtcaatcccgcgggccgcggtcacccgaagaccgttatcgatgctgccgtaaagctccacgttcgcggctgacgcagcacctgaaatacctgacgccaggaggaccgccgccgtcaccgcgggaattctgaagtgtgatgaatgcattttcattcctgaccggagggagagcatttaaaaagtgccttctccggcattcagaagtaaaaacggcccgcccggatctatatggggttacgagatcgggcgggccggaggagagaaagagagtggattcctgtcgccggattacttcccggccttcagatgctcagccacatcctggaccgcgaagcggccagtcgcgatagccgtggcggaagcgaatcccgggttgatgtacgggtattccgtgccgtacatgccgcccgccatcgagcccgcggcatagagacccttgatcgggttgcccttcttatccatcacctgggccttgctgttgatgagaaggccgcccgtcatatcgcagatcgtgccgtcacccttgaaggcgtagaacggtgctttcacgatcgggatgaggttatgcttctttccgaagtcggtatccacaccggcacgggccatcttgttatagcggtccaccgtcgcctgcagcaccgtcgggttcacgcccatcagtttcgcgagttccggaatggtgtttgccttgaaggcgtagccgcgcttctggccgtccgccacgacttcgtcgaagtgaaccactttctggcccttgtcatacaccgtgaagtagttggtgtcggagcccgcgccctgcatcagatcgacacgcttcgcgtcatccatgatcacgaaagcctggttcccctggttatggatcgcgttgaagacgatcgtgaagtcgtccgagtggctctcatccatgaagcggtggccggcggtgttgacccagagcgtctgcgccttcagcatcatgtaggcgtcgagcatcttcttatcgacatactgctcgaggtagagcgtgttcgtcgggacgatggattcactgatcacgatatcggtgttgcggagatcggcgcccgcttcaagtcccatcttgatgccgtcaccggtgttcgtttcaatcgcgatcgacttcatcggcttcccggccacgcgaagcgacgggttgtactttgccatcatgtcagggccgttcgccatggagcccgcggcgagcagcactgccttcgcgtggatgcggacttcttccccggtcttcaggttcttcgcgacgacgccggtcaccgtgccgtccttatcgatgatcaggtgttcgcccttcatttcggtgaggaccttgccgcccttctccctgatcaccttcatcagagcgccgaccgcctgttctcccggatagtgaccggcgtaggtgtggtacacgcggttcccgtcaagcgtatccgtcatcacgcccttcatggcgacacccgtgtccatcatccacttgatgttggggccggacgcctcaatgatgcgcttcacgagctggggatccgcgcgccaggcggcgtacttcattgtctggtcaaacgacttttcagcgttgagaccgatcatttccttacgctggatatcggtgccgaccgcgtacgtgccttcgatcacgtgaagctgaccgccgatcgttgggctcttttcaatcgtgatcgccttcacgcccatctgagccgcggtggcggcagcggggagaccggccgtgccggagccgacgatcacgagatctgtcgtatactgagtgagtgagaacgccgggaggctgagagccatcatcgcggcagcgaccagagtcggaactcgtttcatttcttattccttttctcgcgtaagtgtgtcagtgtttttatgtgttaagtcttactaggtaattcgtcggagagatgcttatccgttcgacggagtaattttgtgatctccgggcgtttttcgcccccgacacgtgtcggtgattttttcttctttttcccccacatatgtccgtggaatttcagaggaacgacagctttcggctgattcttttaggcggctgacaaaccgaaaacacgttataaatcagagaagaagaaatgccttagaaacaggcggtgatggaagttttgtccggctccgtaggaaggcctcggaaagccgcactccgggaaagtgaggagataagcggaacctgggaagagaggaatccatccggcgttttcttataatccggtcttaataccctctcatctactcctttctccctatggcccagtattacgacacgactccgtggctgattccgaaggcggacgacaggctcgccgccctcttccggcagcatggaagttttttcagcgtgaaaaagggaagcatgttggacgccatcaatatcaagggggatggccacaacgtcacgttcctgcaggctgggctccttgggcagtgctacgacaccggggaaccgggccgccctcacgcgatctcgatcgtgctcccgggccgtatcatcaattactttgattacctcgggatcgatcaccaggcggaaaagttcatggtgcttcggaattcggatgtctggatctgccgtctcgacaccctgaaggccgcgttaaaggaagaagggctcgaggagctctatcaccgctactgcatggattgcatcgcctccgactacggggcttttatgctgatgttcagtacgcagactgaggagcggctcgggcattttcttctgtcactcgcggaaagcctcgggtgccggcctaaaggcgatgtgcttttcgttccgctgaaactcacgtacacggaactgagctacgtgatgcattccaccgtgaaaacgattgagcggattctcgcgaaatggcatcaggcgggcgctctctcctcaaaccgcgatgggtttacgctttctcttcggttctttaaggacgtgaccgcggaccactacatgtggcgcgactgacctcggcagaccgacttgtcgggtcggctaaccgcttgattcccgagagcgaatgagcttcttaaacgtctttcccccgggcggcggtattcagcgtgatctgaagaacgtcccctgccgtttctttaccgtcccggtttccgactcttcgtttcccgaccccgcgcggcccgagtctgggatcgagccttacaaaaaatagaactttcgtaccggcaccgtagtcgtataaaagcgtcagaacgatgtagtcagactgacggaatgtcaccggctgtctcttcctctctccccgaataggtattttttattagacgccggatttccgtaaaaaacgaggctcagacgggtatctgtcgcacagatatttcaagtaatacgtcagatttttttcgttctatcgttattattagtccaaacctatagtagaattatgacaacacatttacgtcgcgttcgaacgataagaacgaaggattcccatgagccaaaaaatcagcatcaatgaactttttgacccagacacggcagaagctttcctcgcgcttggcgcatgcaaagatcatccggttgatattcacgaacagctggaaaccgcccgttcggctctgaatcatcgtctttccatccgccgggtccggagatccgtggactttgagatggcggacaagctgagaagtgagtggcagacggtctgtacgattctgaaggaacagatggcgcaggacgcggcggactcccgtgaggatgaccgtctccgtcacgcggcgcagttcgcgctgctcctctccgccggcgtctcgctcggtgttgagggctgctcctatcggtaccgtgagaagatcacgaacgctctcgaactcatcgatcagttcgagtcgcttgtcattgagcgggaactgagtgacctcgtgcagcggccggcggacggccgcccgatgcttcacgcggtgcactgataaagagggaaggcgggatctgtcgtgatcctgcccttcagagaagcgggcagaaagaggatttcctccctgcccgctttttttgacgccagttgctttgacttcagtagtaccgggtgacacccggatcccggtacgggtaccggacgaggtcgtgactgagcgctttcatgtcaatttcccacgaataagcgttccaccagctgcggcccccggcgctgttaaaccggatcacgcactgagacccgggcggcaagccgcagatcaggacaccgaattctcctgacgtcccgtcacagaactgatgctccaggtgctccgcgatccgccgcgatcccacccgttttatccagacccgggcgaatttctcaaaatccgcgtccttccctttccgcgcgtaataacgcttcacgccttccgcgtaacactggtgaaaggaccggaattcccgccggataatggtttcgatcgcgcgatcgacctcccggcagatctccggactcagaatctctcctgcgtggagcttggtcatttgctttctctcctgtcgattttcgcttacagaaacaggcatgccgctgtcccgcagtgttgaatcagaaccagcgtcataacgataaaaagattcaccgttacgagcggcctgtcctcataactcgctgtaagacatcgatttttctctgacaccagcttatcagctgaagggggagaaaagagtgttttccgtgcttctgaaacgtcaatactgtccctggatcgcaatactgttggatcacggaaagaaaagatcctgagggtgagttttccgccgcgggaaaacaggaatcaagagaggaaagcgttcgcgtcacctaaaaaatcggggcagtgaggaaagatcacattccccctgccccatggttttaatgctctgtggtttttaaaaatcggtcagtaatacttaggccctgggagcccggatcgggacggatagttctcggcttcgctgataaagtcgtccagatagagttcccaataggtcttcccctttcctttgatggagaggaagagctttgtgcagttctcgcgatagaaccggatggcgcggcgttttccggggatcggagggcagaatcgggcgttcagttgccactcgatccgggccggcacatggatgtaaacccagctccacacgtcgccgccccgttcggccagatctgcgacatccgtcaggatatcggagaggtagcagtcgatcagaaactcgacctgggtgctgaattcctccgtgaattcagtgtcctcggtgatttttttcagccgatttttgaaccacttctcgtcgtaataactttcaagcggcataaaacctctttttccatcaggagaacggagagctgcctaaaggaagaccatcgaaaaatcggtcatccatgtcgatctgaagcataccacaaggtgttatgaaaatcgacacctataaataagtaaatgggagacacagcagtgtctccccgattgaatcaggcttgaaggtgccggcggggagatttctctcctccccgccctgctgccggttctctcgcggctcagcagtacatcgcgccctccgtcatcggatagtccgagagctcttccgcgaactgatcgaggttcatcggccagtagcaggcttcttcattcactccggtctgcgagaggtagataaagtccttcttgatgtagaaccgagcggtgcgctgcttccccggctttgacttacagaactcgtcattcaagtagtcccggatcacacgcggcatgttcttatagacccaggcgaatatgaattcccgggtcggaccgtcgtcatcgtcgtcctcctcgtccacgtcaatctcgtcctcatcaaccgtagccgcgagaatgtcagcttcctccggatccccggtcccgattccgcggtctttcttccacgcggccttgatatcgtcgagcgtcgactcgaaatacgcttccagcagcgaatcgatttcgtacatcactttctgctggacttcggttgtcagctcagtgtttttcgtgagcgctttcagcggataatccgcgtacgcactgtcgtaatactcatcaaccattcttcccttcccttgtcatgaagcggatcgctttaaatccgccataacgattaacgtctctttcgcggtctctgattttcttgctaaatcagaacactgcggctcagttcctgagggaagattacaaggaaagaatgggaaattccggggtatttgccgtgatccggcgtcaatactgtccttcgatcacaataccggtttttggagcacggaaaacgggttccgtgagggtcggattcgggtcgcttaaggggagagtcaccccctccccgatctcacttacgccgcttttgtcacccggggcgtcgttccgtagtagctcttataggcgcggtaaaagttgctcgcgttcttgtaaccgagcagctccgcgattttctcgttgctgagcggggtgttttcgagaaacagcttcgctttccgcatccgggaatcgagcagaagctctgagaaggtcttttcagtgagtttcacgaggagccgcgaaagatagaccgggtggtaaccaaagtgatccgccatcgattgaagcgtgagcgaatcggagtggagcgcgatgtactgtaggagcgattccgtgagtgtgggcttcacggctttttcctgctcctcgtggtacgaacggatgatatagagaaggatcgtgagcgtgagggacttgaggatcttctgactgcagaggttcccgcccacgtactctgtcatcataatccggagaaaattccagatcggggaacacctggggagcgagagcttgatgaattcatccgcgtaccggttcttcatcggttcaaggaagaaccggagcagcaccgggtcctcggaaatcggcgcaaggtactcccgaaggaacgcctctttctgaatcaggatcccgacgatcgagaccggatccggccccgacttcttcatcgcgtagccgctgtagggctgcccgatatagcagtccccttcttcaagcgtcacccggttgctgtagcgcgcggagagcgcctcatacgtcccgtggtacgcgaagttaatgaagaagaaatcctggcggtgaaaccgctcatcgatatggtcgcccgtaaaggcgcagagcatcacttcttcctcagggtccccgagccactgcgaaatgagttcggtccggcccccgacgggatccggccggaagtcccagcggagggtcgggaaacggcgtgagagttccgcgagcgccgcttcagccgctttttcatcctttgtcatttcgtgtggatcctctcccgccataggttaataaaagtcagtatacctgttaacttcaggtactgttttctgtcctctccttctctaccattacagcatcaggaatcccggtgtgaggggcatcgggaaccttttttgcagagagaaaatcaggagaataagcatgtataactttgtcttccatatgcccgccaaagtccttttcggaccggggaagctgcagacgctgcatgaagagacgcttccggggaagaaagcgctcatcgtgaccacgaacggcacttcggtgaagaagtacgggtaccttgcctcgcttgagaaggaacttgatctcgcgggggtcgggcacgaactctttgatcagatccgtccgaacccgacgtcggataacgtgatggacggcgcggcgctcgggaagaaaacgggctgcgactttgtcgtggcgcttggcggcggctccgtgatggactgcgggaagtgcatcgccctcatgatgacgaaccccgggacgatctgggactacagcctgtctgtcaacggcggtaagaaagcggctccggtcgcggcggttccgattgtcgcgattacgacgtcagccggcaccggttccgaagtggatatggcttctgtcattacgaatgaggcgacgaaagagaagaccggtatcttcttcccttccatgatgccgacgctttccattgttgacgcgaacctcatgaagagcgtgccgccgaaattcacggcttaccagggaatggacgcgttcttccacgccgcggaatccgtgatcaataagaatgagcacccgatgggcgaaatgtttgccctgaaggcgattgaactgatcgcccagaacctcccgaccgcttataagaatgggagcaacatggaagcccgcgcgaatgtggctctcgcgaacacgctcgccggtttctacatgctctgcacgtcggaacacacgatggagcacgtgatgggcggctatcacgatgacctcgttcacggtgccggcctcatcatgatcagccacgcctacttcaacttcttcgcgaagcgtaaggccgctgaggaaccgatgaagaagatggcgcgtgccatgggcgtgaaggatccgcagtcgggagaagactttatccaggcgctcgacgctctgatcgcgtccgttggctgcgctgatctccggatgagtgacgccggcattacgaaggaagagctgaagggttatccgaagcgcgttcacgaggtgcttggcggcgatatcacggccgatcccctgccgctctcagacgctgattaccttgagatcttcgaggaatcctataagtaagacgattcagtgaatctgaattctgtatgagggggaaagccggggtgctccagcgcggggcaccccggcatttttgtcggccgacaaaaaaaa

SEQ ID NO: 1281 - DNA, 738 bp, Unknown
  gut microbiota DNA sequence
cccgccacagagaaagccggacttcctatcgaccagagtcgtgaggcaggctccgcccttttttccgatgacggtatcgccttcccaatcccccaggcgagatctgttctgagcttccaggggtcgctcttcaatgctgtgagtgatctggatctttcctcgcctctcggtcatgcctttacggtgacgcgttttaccgtggtgtcgcaggtgtcgggacatctttcggccatccacaaagcgatccagaaagccagaattgattcctcggtagattgtcgtggcgctgatccttagattcggcagctcctttctgagacggtattgaatctgctccggagaccagaatttcttaaccagcagatttgagacaatccttgtcagcaacgagtcagacttcagaatgtttctctttccgcaatgctttctctgtctctgatatcgggcctgcgcggcacagggatcataggcagctgaagccccatcctgggccgatacagccttgtttcgcttcagttcgcgggagatcgtagaaacatttttcccaatcgcacatgcaatttcagacagggatttgcctgaaatcgttaaagccgaaataaatactctgtcccgaagagtaagatgatgatagtggctcatgagctccctctatagttatcttgacaatctctattatggaagctttatgggccactattcttttctcaggctttgcacttgaagtgataattcgcc

SEQ ID NO: 1282 - DNA, 194 bp, Unknown
  gut microbiota DNA sequence
ttcttccgcatatctacgcatttcactgctacacgcggaattccaccctcctctgacaaactctagccgtgcagtcacaaatgcagttcccaggttaagcccggggatttcacatctgtcttgcacagccgcctgcgcaccctttacgcccagtaattccgattaacgcttgcaccctacgtattaccgcggct

SEQ ID NO: 1283 - DNA, 13850 bp, Unknown
  gut microbiota DNA sequence
agtactttactcggaattaagaaaaaaacaagactggcaggtaaccagatacaattctttacacttgcaattaatactctttctcatttatgccgaatgattttctctatccggtgccggatcttgcacccgggcagtttcatcgggttgagcagaccatcaagcgaagccgctttatctgcacagcggcccatgtcacatcccccgaagaggcgaaagcctttattgatcagatacgggaagaattctctgacgcaagacataactgctgggcgttcgccgcaggcgctcccggcgccaccgctcaggtcggaatgagtgatgacggtgagcctcacggcaccgcgggacgccccatgcttaccgtgctgcttcactgcggggtcggtgaaatcgcggttgtggtgacccgttacttcggcggcattctgctcggtaccggcggtcttatccgcgcgtaccagggaaccgtgaagcttgcgctcgaaacgctccccacagcggagcggctcgtcaccgtaccgctcggtgtcacgattgagcatcgctacgtcacgcagtttctcagacttcttccgcagtatcgggccagcatctcagaatccaattttggcatggacgcggagtacgttctcgcgattccccgggacgccatcccggcgctgaccaaggatctgacggaactcacttcaggctctgtccttgtggagccgccagaagaagactgaccggcctgccggtctcccaacaaaaaaaccggaccgatctgacatcggttcggtttttgtttctctgaccgaaaaaaggtcagtttccggcgattcagcctttcagcgcgcggaagagattggaaagcgcgccgggttcctgcgcctgcgcctctttcttcgtcgctacagtggaggctgccttcgcagcgatacagtcgttcttcgccgtgcaggctcccatcgcgtcaatcacggcgccgcggaatccgcgctcctcaagaacacgcaccgcttcaatcgtcgtgccgccgggactcgtcacctgatccttcagttcgccgggatgaagcccgctttcaagcaccatcttggctgcgccctgaaccgcctgagccgcgaatttataggcctgcgcgcgcggcattccgtcacgcacggcaccatccgccatcgcctcaatcagcatataaacccaggcgggagaagcgccgctcaccgtgccggccgcccccatcagggattcgggaatgacttcgacacggccgcaggtcgcgaaaagagcctgaacccacgcgaacgactcctcagacaccagattattcgcgcagagcgcggtcatcccctcacggacgagcgccggtgtattaggcatcgcgcggaccacctgcacaggctttccaaaaagcgattcaatgagggcgatcgactggccggctgccacgctgacaatcagagtatccgtaccgacgaccggggcaatctcatgaatcacatcagcgagctttgccggcttcaccgcgagaatcacgcattccgcgcgcgcgacgtccgtgttgtcacccgtcacattgacaccgagcttctctgtcttatcacggtcggcttcagtccgattggacgccacaatgtcgtccttagtgatcagaccggacgcgagaatccctgaaaggatcgcgcggcccatgttgcccgcaccgatgacaccgagtttcatgcctttactcctgaaaaatacgtatcaagagtgtatcccattgcacccgccaaaagggagacgcccggtctgcgcggatcaggcggctgcggcctcatcctcctcttcggtctccatacccgcgggcggcttcatcgcgcagccaaccttcttgccatgagccttcaggtagccgcttccccagcggtacatcgaggcgagaatcggataaatgctttcgccctgcggggtcagggaatattcaaccctaaccggcacttcggcatacacatgacggtgcaccagatggtcatcctcaagctcacggagctgacgcgtgagcgtgcggggtgttgctccggtcacgattcttgcgagctgggaaaaacgcattgggccttccatcagacgccagagaatcagtgccttatattttccgccgatcagcgacagtgtcttttcaaccgggcagtatggcgtgtcgtccacatcattcatcagcccttcctcccgggcgatcttctcgcacaccgggcatccgtacttgtcattcttcgcgttcagagtcatttattgatatctcttaggatacttggtttcatttatatcgttattgctattttagcattaagttctaaaatgtccattacatgaaaattgataggaaccctgaaagtgaaaaaacaaaggttcaatgtcactggcatgagctgtgcggcatgtcaggccgcgattgagcggacagtcggaaaaatggacggcgtgcagagcgctgtcgtgaatctgctcgcgaacacccttacgacggaatacgacgagaccaaagtcacgaacgaagccatctgcagccggattgcccagattggctacggagcgacgccggaaggcgccgttcctgaagccaaaacaagtcaggagaaaaaagctgctgaagaagccgcgacgcgatggcgcgccctggtctggtccgccattatttccgtgattcttatggttctgtccatgggatccatgcagggctggcttccggaatttctctccggcccccgcggcgccgttccggttacgctcacgctgttcatcctcgcgagcattgtgcttctgattcagcgtcatttctatatcaacggtttccgttccctcttcaacggtcacccgaatatggacgcgctggtcgcgatcggctcgagcaccgcctatctgttcgggctggtctcgctttacctgatggcattcgcctccgctgatggcaatacagaggaagtccgccgtcttttcggcaacctgtacctcgactccgccgctatggtgccgacgctcgtttctgtcggcaaatatatggagtcgcgcgccaaatcaaaagcaacggaggctgtcaccgctctggcgaagcttcgtccctcaatcgccacggtgatccgtaacggcgctgaagtgactgtgccgattgattccgtgcaggtgggggacctcctcgctgtcaaagccggtgaaaccattccggctgacggccgtgtgaagaccggcctcgcctgggtggacgagtctgttgttactggtgaatcgctgccggttgagaaaactccgggcaaggaagtgactggagcatctgtcgcgaaatccggccacctcacggttgaagtcacccgagtcggcaaagattcaacgctctcccgcatcatcgcgcttgttgaggaagcgacttccaccaaggcaccgatcgcgcgcctcgcggataaggtcgccgcggtctttgtcccgatcgtgatcggtatcgccctggtgaccctgatcgtgtggctggttctcggcaaggatctttccttcgctgtcacgatggctatttcggtcctcgtgatcgcctgcccgtgctctcttggtctcgccacgcctaccgccatcatggtcggtacggggcgcgccgcccgccttgggattctggtgaaggatgcgaagtcactcgaactgatgggccgcgtgaagaccatgctgcttgataagactggcacgctcacacaggccaggcccgtgatcaccgatctcattccctctgataattcggacaggaatgaactcctgcagctagcctcttcaattgaaaagctttccgaacatcctctcggccgcccgatcattgaacgcgccgctgacgttgggctcgcaactctcccgctcacggacttcatgcaggtgccgggtgccggcatccgtgccaccgcgaacggtgagctgcttctggccggcaatgcccgtctgatgtccgaactcggaccgggactcggtgagaaggaaaacgcactttctgaaaagctctcccttgaaggaaagaccgtgctctggttctcgcttgggaagcggattctcggcgctattgcccttcaggatcctctgaagcccgacgcgaaagaagcaatgaccgctcttcatgaagccggactgcgccttgtgatgctcaccggtgatcaggagctgacggcccgcgctatcgctcgccaggccggaatcgacgaggtccgcgcaggtctgaaacctgaagacaaggcccggatacttgaggaattccgcaaagggggcaaccttgtcgccatggtgggagacggtattaacgatgctcctgcacttgccgctgcggatgtcggtatcgcgattggcaccggcaccgatgtggctctcggttcagcggacatcgtgctctcgcagaaccgcctcaccgggcttgcggacgcccgccggctctcccaggccgtcatccggaatattcaccagaatctgttctgggcctttatctacaacacgcttggcattccgatcgcggccggactcttctatccgttcggaattatcctgaacccgatggtatccgccgcggccatgagtctctcgagtgtctgcgtggtaaccaatgcgctccggcttcgcttctttaagagcgctttccagaattccgagtctacggccgcccctaaggctgccgcctctgaagcaatcccggcagagcccaaagcctgccctgttcttgaacctgaaactcctgaagaaaggaactcaactgaaatggctgatacgaaaactctgaatcttgctgtcaccggtatgtcctgcaagcactgccaggctcacgtgaaggaagctctcgaaaaggtgccgggtgtcgcctccgcggaagtcgatcttgaaggtgccaaggcctgtgtgaaggcagatgactccgtcacggcagacgccctcgtgaaggcagtggaagctgccggatacggcgcatctccccttgaaggaaagactgtcacgcttcccgtgaagggcatgatgtgcggccactgccaggcgcgtgtcaaaaaggctcttgaaggtgtcgccggtgtgacgtcggctgatgtggatctcgagggcgccaaagccaccgttgcctgcggcaccggtgtttccgaggatgctttgaagaaggcaatcgtcgacgccggctacgaagtcgcctgatctttgcctcatctctctcgcatctcagctggaggcggcggccacagtgccctgcccccggttaaaatagccggagcgaaacccctcctttccatgggaggggtcggttttttaggagctctgacttgatccggatgcgtctttccaaagcggcctttgccgctctttccgcagcacttctcggcggctgcgctgttacccctcccccgaatcactatgtggaaccgacagaagggaaaaccgcactgatgcgagtaggcggtgaaggcatgattgcggtcagaacggtcaccaaggacgacgccgacttctgttacacctgggacgggaagcataaccaggtgctttactatctcgacggcatcacgaaaaaagctccagccgatctcccgaaccagggcaagacactcggacttccgccttcatccgccacagcccgtttcccggataaaaaccgctgggctgaaatccgtattccggccggtcaggaaatcgagatccagtactcgcttccgtatgatcgggtccccggcagcgcgccgaagatcaaactcggacctgatgacgatatgccgcaggacaccggcgcactctgccgtgcgggcttccgctttgtccccgaggcggggaaacagtatcaggcgaacttctcctggggaaagaatctgggccactacagctgcagcgccatcttcacctcgcttcctgataacaagattgtccgcgtgaataagctcgatcagtgccacatgatcgactacgacaatcttctgaagtttgacggattcaacaagtaagactgacgccactctctgaggaaaaatcaccaatgaaaaagacgctgattcccgtcctggcagccgccgctgccgccgctctgctctccgggtgcgcatacccgggtgttgaactggatacccaagttcagcagaagcaggttcttggcgaaatctacgaacgcaccgaaacctggcccttcgaaaagaatccgatgcgggtgaaggaagcgaccgtgcagcatgcggaaaacttctgtgccaaacgcggcatggggatccagccgctcgatcagacgatttcctggggcgttgaggacgcgtccggcaaactgaccaaaggcgcctcggtgtggctgcagttcaagtgcgtacaggcgattgacccgtccgccgaactctgatccgctctgacggatcgcgttttctaaaggagatggccatgaagaccgctatcgtcgtgattgatatgcagaacgatttcgttacgggctctctcggaacccgggaggccgcggaggttctgccccgcatccgggactttcttgcggaaaatgctgcatcctcttctcccgccgatgtcttcttcactcaggacacgcatcctgaaaactatctcgaaacgcaggaaggccggcgtcttccggtacctcactgcatcagaggcagccggggatgggacatctgcgaagagctgaagcctttcgcgtccgctgatcgcacgatccagaaacccaccttcggaagcctggaactcggcagccgtctgaagacttatgaccgcattattttcacgggcgtctgtaccgatatctgtgtgatcagcaacgcgctgatagcaaaggctgccgccccagaaacatcaatcgaggtgaagccggagctctgcgccggaacgacccccgagaatcacgaaaacgctctgaaagcgcttcggatctgccagatcgacgcctgatcaccgacataccgctttgagactgcttaaaacagaaagcccggagattgctctccgggcttctctttttcatactcactgctccgggaatcccggagcaggaatctgaggctttttacttcttgaggccgatatacttcactgcgttttcagccgcgatacggccgccgttcacagcccaggcaatggtggagccagccatcagcagatcgtagctgtcgccatacataccgcccgcgtcgttgccggcagcgtagaggcccttgatcggggaatcatccttgcggaccacttcccacttgtcgtcgatcttgatgccgccgagcgtgccaagagacgtggcaacgagctgaatcgcgtagtacggagccttgttcacgtgacggatgtacttcggattcttggcgaagagaccgtcgtgacggatatcagcccagtggttgtactcagcaacgttcttcttcagaacatcagcgtgcatgccggtcatcttggcgagctcgtcaagcgtattcgccttcttggcccagccagccttttcagcggcatcccactcggaatcgaacttcgtaagcttcgtcgcgaccggaaccatcacaccgacgccgaggtcgataccttcgttcttcatgtagtcaagcgtcgcctgatcgtacacaacccacatcttgccgccgttgcgttccagagcgttgccggcaaacggccactcgagcatgacggtttcatcaacaaagcggtcgccttccgggttcagccagaggtgcggctgcttggcggaagcggcaacctgattcgtggtgcccacgcccttcggacccggacggtaggaagcctgaacctcaacgccgtcttcagcagcaccggccttccaggccatctggatgccgtcgccggtcttgccggtctgagcgagaccgtcaacacccgggaatcggagatacttcttcttcattgcttcgttggcaccgaaaccgccggtggcgataatcacagccttcgcgttgatggtgatcttgtcgccatccttgttcttcgcgatcacacctcgcacaacaccgtcagaaccctggatcagatcggtggcgggggtattcaggagcagcgtgccgccgttcttcacaaacttgtcctgatacttggcgagccagccagcgccacggccttcataaatgtgccaggtgtagagaccatccggatagttagagaagagcttctcaaacttcacgccgttgccctgcatccagtcaatcgtgctcgcggtcttttccacgaacgcgcggaccacgcggccgttaccgcgccagtggccgtaacgcatgatgcgctggaaggcgtcatccttcgtcaggccgtagttccagtcacgctgcatcttggactcaaccgccatgatgccttcggagaatttgcaggtaccgcccgtaatgccctgcttctcaagcaggatcaccttggcaccgagttcctgagctgccacactggcagaggtaccgccgcagccggcgccgagcaccacgatatcggtgctcatcgtcttatccgcggcctgagccgggagaacacaggcggccgccagagtcgcggcgatgatcgtcttcagtaacttcattcttctctctccacttgaatgtgttgtattagttactcagcctaaaacagaactaattctttctatttaggcttaactcaaaaattatccccaaataggaagagaaaatctgtatcagcagttacactaaatcacaggaacacggtagcgtgttacattttttggtattcatccgacatcagacctcttaaggagtgcatccccgtgcgccagatatttcagaacctgccctgggttcagccagccgtgccccctgtgattgcctccctctatgaacggcggggcgtccttcagaaagtgaaacgaaaccaggtgctgaaagccggaggcgataatccgaaatcctttcttctcgtccggggactctgtgtttaccggatagcgagcgctatcaagggatcaagctcgattctctccctcatcccgcccggaagaagcatgtgcgatatctcagccgcggtggatgaacgggtaaatgtggaaacggttgcctggcgcgattgcgtggtgtacgccatgcccccccggactctgagcgaagagatgtccaaggacccggagttcggcaaagccgtgctcgctgatgtgacagcaaaagaggagagctacatcgaaggcatggtcgcgaacttcactctcgacccgcagtcccggctccggacactcttcaaggtgctgatcacgagttacgggataccgattcgggacgactggactgtgatcccgctgctcctcaataactctcagtacggacaggttgtcaatctgtcccgggtttctgtcagcagaattttttcccagtgggaagcggccggtctgatcaggaaggaccgccgttcaatctctgtacggaaagagctcttctctgacctttatgactggatcgacggcaagggtgccgccgaggcaacctatctcaccggatacgggaagccgtgaacggtttgggaaacttcaggagccaggcatttgtgctgtttcccgtcggatgaagcgccaccgcctgctcctcatccggcagcaccttgccgtttttcatcagatcaccgtccggtgaaagcctgagcgaaggcagcgctgcgccacttgcggctctgcacctcactccatagtgcgattcgttcacagcgagaagcgttacatcatctatccgcaccagacttgaaatcggtttatcaacgccggctttgatcagatccgccacgaaatcccggcggaccggcgttacgccttcgcttttcaggtaccgaagcggcgtatccacgatgctgcctccccgaagcgggaactccgagagatcatccgcacccttgaagctgatacggacaaggcgcgaaaccgcctttccccgctcggtttctccgctctctaccgcgaaaagggttccatccccgacagatgcgaaagctttgagagaaaaacggtcaagatcagaaggcttcggatagacataggctcgggacgtccaatctgacggattggataggagaatcaccgcgtagtccgcccgtctttcaggagtaatcgttgtggcgagtctcccgttcggaagctgcgcgagtccctggaaaccggactccatggcgctccaggcgagaaaccggggaagtccctttccgggtatcgcccgagagacttcgccaaaatcccggtttgagagccggacaactgaaggaagcgacgcgtcggctacccagatcgtaccgtcagatgtgacagcaatgccctgcggattgattgcggagccccgcggctctatcggagaaaaccccgtggtaacaggttcttcatgaaagtcgagtgaaagggatcgcgcggctttcggaggaataccgctgtaaggctgtgaattccggcttccgcggcgaattccggttacctgcagaacccgattcttcaggtcaagcgtcagttcgacaaagagcggcgaatacccaggaatcagatagaggcgggtcgggatcagaccgtcacgcgtctttcgtactggtccgtgacaggtagggccgtcgtcagtcaccgcgagaagccggtatcggccatctccaagtccttcgcggagcgccatgccgctcccgaatgagagatcgagatagcggccggccgggaaagttccttctttcttttcggaagcgaacgccgcgccctccgctcctttaagcaatggcaggaaggcataagggacattcacctgcagctttacagcatcgatcccggcagctacggcagagcccgataccccaagagccgcaaggcagacaagaaaaagacctgaagcaacagcgtgccgcaggccccttttccgtttgcgaaaagaagagaaaagagtcatgagtagaaacctgagtagcgtaaaccctgattctaaactcgaaacggaaaaaacggaatttccggggacttttctcttctatgttcagatcagccggcgagaccgtcgcggacgtcttccgccttttccttcccttcaagaacctcaacgagctcaagcgcgaaatcagaagccgttcctggaccgcggcccgtgatgatatgtccgtcacgctcgacgcggcccccggtcacatcagccccttcgagatacttttcaaagcccggatagcaggtcgcgcgctttccgcgcagcaacccgagaccgccaagcacatagggcgcggcacagatcgcggccacccatttcttcggatcaaccgcaaattccttcagttttcccgtgagaacggtatcctgcccgaggttttccgctcccggccagccgcccggcagcacgagcatatcggcctgatcccagtcagcggaggagagcagcgtatcgcagagaatctgaacaccgtgagctccttttctcagatttccgccacccacggaaactgtttttacgtccacaccgccccggcggagcaggtcaacggaagtcaaagcctcgatttcctcaaaaccgtccgcaatgaaaaccaatgcatgtgacatcttgccgatacctccaggtgttttatataagtgatgccggtattttatcggccgcagtccgagtcggagagacagagcggagagacataaaaacaatgcccggccccctgagtgaggagccgggcatgtctgatttttcggaattctgtctgcgtcaggcagaatcctgaagcctcatcagataaagaagtgcatcacttccatgctgatgaaggccatcagaaccgagttcaccatcagaaccggccagtacttcttcgggcaatccgtaataccgaggagacgacccatgtactgaatctgagacgccatcagaatgagggcgggaagcagaatcgtgatgtcatgggcgttcagggaaccgtccgtcgcaagagcggcagcgacgccgacaccggcaccgcaggagagccacgtggcgcagagcacgagaattgccttgcccggcagaccgaagacggccataaagccgccgcaggtattgccgatccaatccatcacgccgaagatagtcagcatgtaggtgagcacgaacgccatcagcacgttcgggatcaggttgaagacgccgagattccagcccttgcggcagccgacgataaagatatcaaacggattctgggaaactttttcggcctgagctgcgttgttattactcatttgcgaagtccttcttataaacggtcgagagcacgaagcgaacgagcatcgcgccgacaaacttcaggacgaggaaaaccaccatcggaacccagatcgggacgaggaaccaggcgataagaccgccgaccacagtagtcatgtagttgctgatgcagccagcgcccgcgtactgccaggcacacatcgtaaccagctgcttgcggttaatcaggccgtcgtcatagagccccttcgtgagaccagcaccggcgtcagtcgactgaaggtcggtaatcagggcaagacccgtcagacccggcagaccaaggagcggcttgagaagcggagtcatcaggaactgagcggcacggagagcgccgtagtgagcgaggacttcaatcatgccgagagcgaacatcacgcccggaacgagggaaagaccgaagaggaagccgccgcgggcaccgttgccgccgtgacccacgaggttcgccttatcgacgattgtgccgaacttgccgacgagggtcgagaagtcaagggcggaaagccacttgtaggcatcaggcatcttggcaaacacaccggagaacataatcacagcgagaatgaaggcgataaacgccccgattcccggcagtttgttctcgtgtgtctgaggcgcctgttcagcagcgtttgtttctacttttgcatcagacatgaatgagctccctgagcaaaatctgcttcggcgtaactgcatcgaagcggacttacggacagaagaatgaagaaatatccgcaggtcgcccgggaagggtcgcctgcaggtcgttttgctctccgcctttcccgggcggagactctctagggctgcggcttgactttgtaagctcttaattcagctgcagaaacagctgaagccgcatccagccgcctgaactatgaagggacagctagaaatcgaagaataatgagagtcatacgctgagtcaaggcagaatctgtcttaatcaccggggtcagtttcttccccggaataccggaataccactgagtaacgaaaaaaccctgttcattgctgaacagggttttcgttgaattctcaggggacgaaccttggatccgcccgtccccggtggattcctcgcctagggaggaatcgagtgcttagagagaaccagtcccgtaagcgaggtcaatgctgcggatcgattcgcgccaggcgagatcctcagcagtcttcattttgatcccgctctcagactggccgctgaggcccatccggcgggaaagcgttccgactacctgcttcacgaggttgttcgtcttcttgtcttcatactgatagttagtcatttttcacttccttatatttatttttgtacgcctgcttttctggcgtggtttgcggtttcatccgacgaatctatttatagccctcttttatgaagatcctgaggcattttgatgactgcatcgtgacagccgttacaggatctttccgccggcaaaggcgggcggaaaaagcaaaaacaacagtgagggttttataggagcagcccgcctgtctcaggaggcgttctgccgtatttttctcttgagtggatgcacagattttcgaccggatccggtctgcactttattcagcagatgtctgctgctcgatgggctggcggtttcagagagcccttttttcagggttaccgcctaagatgatccactcgtccctgagagaaaaaagaaatat

SEQ ID NO: 1284 - DNA, 7277 bp, Unknown
  gut microbiota DNA sequence
atgaagttctgggaaacaccgtcgcggagggcggcgcgctgcacttcaggatcgaacgggtcgagaatcaggtcgagctgacgctcataaagctcgttctcgggggcggcggagtaagcctcgatcttctcagcgtcgaacagcacgacaccgaggtaacggacacggccgacgcaggattcgctgcagatcgtgggttcgccggactcgatacgcgggtagcagaagatgcacttctcggacttgttgcgggccgggttgaagtagatcttcttatacgggcaggcggagatgcactgacgccagccgcggcacttatcctgatcgatcaggaccacgccgtcttcgctgcgcttgtagatcgcgccgctcgggcaggacgccgcgcaggacggatgcaggcagtgctcgcagagacgcggcagatagaacatgaaggaggcttcgaactcttcgtagcccacggtgtccgtgcccttgaggttcgggtccgcggaacgggcggcgaaggggccggcgaggttatcttcccagttcgggccgtcttccaccttgtccatgcgcttgccggtcgcgatcgagtacggacgcgcggtcggagcggtcttgcggcgaaggctctgcttcagggtgtcgaagtcgaacgtgaagggttcgtagtaatccttcacttccggctgacgcggggagctgaagagcttgccaaggatcgtcgggcggttgccgtgacgcagcaccgccttcccgtccttcacttcccagccgccctgccacttctcctggtcttcccacttcttcgggtaaccaatgccgggcttcgtttcgacgttattgaaccaggcgtattccatacccttgcggctggtccagacgttcttgcaagtgaccgagcaggtgtggcagccgatgcacttgtcaaggttgatcaccatgcagatctgtgcttgtactttcatggtttgtccttattctctaaatggttctcaggtatcggcttaccactcgacatggtcgagacggcgcagcagcacaaactcgtcgcggttcgcgccgatcgtgcccatgtagttcagcgcgaaggagaactgggcatagccgccggccatatgggtcggcttcgggcagatgcgcgagatcgagttgtggagaccgccgcgcttacccgtcgtcggggagagcgggacgttcacagtacggccctggttgtgatacatgtagaccgcgccttccgggatacgctgcgaaacgcaggcacgggcgatcgtcgagccattcatgttcacggcttcaatccagtcgttatccttcaggtcgagcttcgccgcgtccgtttcgctgatccagatcaccgggccgcctcggccgagcgtcagcatcacgaggttatcggaccaggtggagtgcgtcgtccacttgttatgcggggtgaggaggttcagcgcgagcgtcttatccttgatgccgagcttttccttcatgccgtcgatctcgtgcttcgcgagcggcggcttgtaccccacaaagccttcaccgaagtcaagcatccaggtgtggtcgaggtagaagctctggcggcccgtaatggtgcgccacggcatcaggttgtggacattcacgtagttcgccgtgtaagcgacaccgcggtccgaaatacccgtccagatcggggtattgagcgaacggcggggctgctgcacgaggtcgtcatacgtgtagcgggtggagcccgtgcccttcatcatttcttcttcgaacggtatgccggtgagcttctcaaggcccttccaggcacggcgtccggcggcgccattgccggccgggtcgaacgtgagaatcatgttgaccgcgttgatgtcggtatcaagcttcggagcgcccttcgcgtaaccctcttccacgcggccgttcaggtcgccgagggtctcgtagtcttcgcccgtcttccaggcgatctggtgcggcgcgacgcccttatcgcggagcagcgggccgacagccgtgaacatgtcgtagaggtgcgggtagtcgcgcttcacgagaacaaggttacccatggtgacacctgggatcggggtcttgccttcggttctccagtcaaccggctccatcggagcggcggtctcagcaggcgaatcgtgggcgagcggggtcatcatgatgtcctcttcaacgccgaggtgacccacgcagagcttcgagaacgtgcgggcgagatccttgaagatgcgccagtcggtgcgggcttcccacgccggatccacagccttcgagaacgggtggaggaagcagtgcatatcggtggagctcatgtccgccttttcgtaccaggtggcggccgggagcacgatatccgagtagagaccggaggtcgtcatgcggaagtcgatcgtcgcgacgagatcaagcttcccgaccgtgtcttcgctcttccacttcgtgaagagcggcagctcctcacccatctgctcaatgttgtcaccgagaacgccgttctcgctgccgagcagatgcttcatgaagtattccatgcccttcgcggagcagccgatcaggttggcgcgccagatgaagaggcacttcggggaattgccttcaccgtcgatgtcttcgctcgcgaggtggaggttgccggaaccgagctggttcgcgatatagtcacgcggggcgacgccggccgcgttcgcttcgcggacgaggtcaagcgggttgcgctcgaattccggctccgtcggcagccatcccatacgctgagcgcggatgttgcagtcgacgagcgacatcttgttccagtcttccttatgcttcgcgagcggcgagacgaggtcccccgtcttcacgcgttcgtaacgccactggtcggcgtgcatatagatgaagctcgtggtgttcatctgacgggacggacggatccagtcgagaccgaaggtgagctgagcccagccaacctgcggacggaccttttcctgacccacgtagtgagaccagccgccgccattcacgccgatcgtgccgcagagcatgaggaggttgatcgcggcgcggtacgtcatgtcggtgttgaaccactggttcacaccggcaccgataatgatcatcgacttgccgcgggtcttctcagcggtcttcgcgaattcgcgcgcgacgtgcacgacgcgttcagaaggaacacccgtgatgatttcctgccacttcggggtgcaggggagatcgtccgcgtagctgcgggcgcagttcggatcgtcgtagccgttctcaacgccgtagttcgcgaggagcaggtcaaaggtcgtcgcgacgaggaccgacttgccgttcccgaggtcgatgcggcggaccggaaccttgtgcgagatcagggagtcgtgagccgtggcagcgaagttcgggttcttgtactcagcgccgccgaagtacgggaagaggacttccaccacttcgtcgtggtgatccttctgcgagagctcaggcgtgaacttgcggccggtgcggcagtcttcgttcttcaggttccactgacccttgcccgcgtaacgggtggtcatcgtgccgttcgggatcacgagctggtcttcggtatcacggagaaccggagcgaagttcgggcgctctttgtcgtcgagaccgaggttatcggcgaagtcaccggcgcgcagcagacggcccgcggagtactgaccgttcggctgttcctcgagcttcacgaggaacgggaggtccgtgtacttgcggacgtactcgtcaaagtacggggtcgtccgatccacgaagaattccttcaggatcacgtggcccatcgccatgccgagcgcggagtccgtgccctgcttcggagcgagccacacgtcagcgaacttcgacgcgtcggaatagtcaggagaaatgacgacaaccggggtgcccttatagcgcacctgggtcatgaagggagagtcaggggtacgcgtcaccgggacgttggagccccagagcatcaggaacgcgctgttaaaccagtcctggctttcaggcacgtcagtctgctcgccccaggtctggggagaggcaggcggaagatcgcagtagaaatcgtagaaggagagcgacgtgccgccgagcagcgacaggtagcggataccggcggcgtaagaaacctgcgagaacgcgggaatcggggtgaaaccggcgttgcggtccggaccgtactttttcgtggtccagatgttcgcggcggccatgatttcgtaggccgtattccagtccatgcggacaaagccgcccagaccgcggaccttcttataggactttgccttttccttatcggagacgatagaaccccaggccttcaccgggtccttttccttctccttcgccttctcccagagctcgagcagctcgcggcggatcatcgggtgcttcacgcggcccgagttatagaggtaccaggaataagaagcgccacgcgggcagccgcgcggctcgtgattcggcatatccggaccattatccgggtagtcggtcgcctggatttcccaggtcacgattcccttcttaacgaagatcttccaggagcacgaaccggtacagttcacgccatgcgtggaacggaccactttatcgtgctgccagcgattgcgataaaacttttcccaggcacgcgcggcgtgatcctgggcgctgaagtagcgaagattggaaaaggcatcagtcatttttttgttctcctgaaggttccggcactgcgggctgcgacgtcccgtttgacacgtgccggaaccgatgggggtggttttcaggctattagttggccttacgcatcatgccgagccagttaagcacgatgtttgcaattgcaaagagagtgaagacaaggaagccgagaccgtagccggcgttgccgtaagcggtaacgacagcggcgaggatgatcgggaagacgaagccgccgaaggcaccgagaccgccgacccagccggaggcaccgccgaccgacttggccacatagaccgggacgagcttcatcacagcggcgttattgaagccgaaagcgacagcgatcacgatcgtgatgaggaaggtgccgaaccacgggaggttgaggttcatcagggcgcaggagatagcgacgacgacgagagcgccgatgcagaccttctgaccgccgaccttgtcagcgaacttgccgcccgggacgcgcatcagagccgcgagaatcgagaagatagcggtaagagcgccggccgtgatcggctcaagaccctgggcacgggtccagtaggtggggaaccaggcggtaagagccatgaatccaccgaatgttgtgaagtaggtgagaacgaggagccaggtctgcggaatgccggcagagatcttgagagactcaacaatgttcccggtcgggaaaagttcctcgccgtgctcaaccgcggcttccttcgcttcctcgtgggaaacgccgtggttacggagctggaagtacggggcgttgcaggagatcaccgcgtagagaatgccgccgatgatgagaaccgccgtgaggacgtggtacgcgttcacgaagccgatgcccttaaggagcagcggcagacagaaggcgaggacgccggcagaggccgtaccgagaccgccgaagacgccgagggcgaagccctggtccttcttgcggaaccagtaagagatctggctcacgccgacagagaacgtcgcgataccgcagcccgcgaggcagccgaggagcaggatcaccgggtagagaccggccatgttctcagggaagcgcgtggagaagaggatcgaaagaccgatcaggccaatcgcggagcaaagcatgaggaagttgaaagacttccggccgccgttcacgtcaacagacgcgccgaacggaatacgaaggagagagcccgaaagcgacgggacggcaacgagaagacccacttccgccggggtaagacccatgacatccgtcagggccttagcggtcggcccgaaaagggaaatcgacatcgcgccaaagaagaagccaagggttgctgcgagaagggcccggttgggagacccgatcagctgaaagttttctttgctcatatctgattggtttttatagcgaagcgcccggagcggaaccgcgaggagttccagattcagccgagatcagacgcttcatgtgtgtttttggggaaatcgccctctctttactcaaagcccctgttttcaagggtttcgcgcaaagagtaaaaaacccctaaatcccctgatttatttgggaattagggcacttcatggaacgcctgcattctaagtaacggctattggctacgaaatatggagaacgggctaatccgtccccaccctctcacagccggatgactagtcccctacacgaaagggtgtacccatttcatacaggtatacgctcattatttctttaaatacaattatttgataaaactgacccctcggccccggataacgccgttactacctactttttaaagttgtagggcaaatgcatctttttattcagtcttagacctgagcccgaaagactcatatcaaagatgcccaatcatccgaagtgactatctgacagagtccacttcggagtagcttagggaaacccataactacctagcccgttttttgcatcccatggacatgggggtgccgcttcacgggacaaaaaatagtggtaaagagcaccatctttatctgtccctcgcgaagccccgattctgcagggttccggaaggtctccggtttcagcgcccgtcttcagatcattcgggcggctgaccccttagccattccggtgtcacctttatcagctacagccatgggctgacggacgttgtttttctgcgtatctgtgtgtcggaaatttctgcctcagcctgccatttcgtatggcaaagcttaagattcattatttgatttcctcaaaacctcggaaacacggaggatccttcccttggcttcctacttcatcatcctgatcggcatcggtctgattgcgggaacttacatcgcgaataaagcgagcggtaagaaaacgaagaccccggctgacaccagcggaatccacgcagtcaaaggctgcagcacgacgcttcttctcgcgggaagcgtggttgtgctcggtctcgtgcttctggcacttatatttctcgcataagtatatgaagtgattcttaattagattcgctttgagaggctcttcaaaaaaattttatgagttcctgatagcggttcagaaaaaactatcagaaactcatagctgctaatagaaattagtgaggctctat

SEQ ID NO: 1285 - DNA, 291503 bp, Unknown
  gut microbiota DNA sequence
aatcaatccctttctatcgccccttaggatttttatttaacaagtcctaaatttggggagcagttcacggtcctcttttttttgtttccgcaaagaaaatccgggttttggggaatcgttttccgcatgaggctttagacttgtgagaaacagcggccgcctgctgatatttctgattcagccggaagacccgggcgctaaccgccttcttccagaactttcttggaaatccaaaatgctttttcgtattctccgaagactctatctcgcactggatacgacccgtcgggttacggcaaatgtcttgtttgccttcgtgatgcttctcgtgatcgggcttatctggtacggcttccgaacgccgtctatcccgtccagcagcattttggagattgatatcaatggcaaggtcgtgatgcagccctcggcgcttgtcggcggcaggaactgggtcgcgaaaatgaccggaacccgtgtggaggaaacgaccgtttctgatgtgacggacgcgcttcgggctgccagatcggaccgccggatcaaagccgttcttctccggcttgaccacatgacgggagcgggcccggcgtcaatttatgaaatcggcagggcgatcaaggattacgaagcctcggggcacaaggtctacgcctggtctgacagctatacgcaggctcagtggggtatcgcgtcgcacgcgaacgagatctatctgcatccgatgggtgaagtgaaggtccgggggctggaggcgacgagcttctatcttggcagtgttctcaataagctcggtgtcacggtgaatgttgccaaggccggagcctataagagcgctcctgagatgttcacgaacagcgccccgagcgaagacgcgctcaccgcgcagcggttctggctgaatgacgaatgggctcagctctcatcggccatggaaaccgggcgcggcctctcgcagggctaccttaaaacctggatggacaattacctcgataaccttcggcgggccggcggtgacgccgcccggatggcaaaggagacggggcttgtgaacggcattgcaaactggaatgacctcagaagccgcctcgccgggcatgactgtttctcgggtgcctgcgcgggtgaattcacgtctctcggagagtatctcggagtggctcctcttccgcactcgagcggtgacggcgcagtgggtgtcgtgacgcttgagggtgaaatcacagaggaatcggtcggcaacggaaacgcgagcgcgaatgcgctgatcgcgatgattcgggacgcggagatggatcccagcgtcaaggcggttgtgcttcgcatcaactctccgggcggcagcgcacttgcgtctgaaaagatccgtgaggctctgatttctcttcgtaagtccggaaagcctcttgtggcctatttcggtgacatggcggcctccggcggatactgggtgtcgaccgccgctcagcgggtggtgtcgaatccgctttccatcacgggatccatcggggtctacggcatgatgccgacctttgacaagagtctcgcgaagcttggcgtcggcgtgaattccgaatccaccgggacgaccggtatcagctcttcgcctcttgtgcctttcacatccaacgcgaaggccgcggctgaacttcaggtaagtgacacctatgcgaagttcctttaccgcgtgtcgcaggcaaggaacatgacagtcgaagcggtaaataatgtggctcagggccgggtgtggaccgggcgccaggcgaaggagcgcggccttgtcgatcagctgggaacgtttgatgacgcggctgaacaggcggcaaagcttgccggcattgataagagctatgcgctgaaattcttcgaaccgccggcgaccgcaggtgttgcggacgcgcttctcgcccagatagcgagtgaagcggggcttccggtctggataaggacgcttgccgcatccgcgatcagcgctgcggatccaacgtcgggcgaacagaagacatcggacttcatccaggcgagaacgctctggcaggtgcggtaagcatcgggtccgcttcagaaacccaaagaaaaaccctcgcgccgatcggaagatcggccgagggttttctgctgtaaggagcggactccttccggaatcacttcccgccgtggcagacggggcactcgggattcggcttcagattgaaaatctggaagtcattattcagcacgtcgaccagcatcacctggttcttgagcggcttgcccattccggtagcgagcttgatcgcttcagaggcctccagagcccccatgatgccggtaagcgaggtgaggactccaagtgtggaggccttcagatctttttcctcgtcttcggggaaggcgcagtcatagcagggcgtatcagactcgcggaaatcaaagacactcacctggcccgcgccgcggatggcgccggaagtgacaagcggcttacgcagcttatggcacacgcggttgatcgcatggcgggtcttcgagttgtcgcagcactcgaccacaatgtccgcacgggccgcgagcggctcgagcgtttcatcgttgatcgactcggtgtaaggctcaaccgtcaggtaggggttgatttccttcagcgcgatcgcgccgctctcggccttattcattccaacacgggcatctgtgtggaggaactggcgggacagattgttgacttccacggtatcgaagtcggcgaggatgatcttgccggccccggccgctgcgagcagcagcgcagccggggaaccgagaccacccgcaccgatcacgagaaacgtcgtgtccttcaacttttgctgacccttttcaccgagctcagcaacgttcatctggcgcagatagcgctctttctctttggcttccatcatgagctatgaacctcaagtttggcgggggaaaataacctgattattttacggatttcccagcgttcttcgaggaagcttcattactccgttcggtggtctttttggcatccggctgactgcttttggcggatgctttggcggcatgttcgcctcccttcttgacgggttctcccttcaggaagtgctgcgcctgctggagcgggaagtcgttgtcgtcaccgaacttgtagacatccttgtcggaagcggtttcggactccgcctcttccttcgcttcatcagtgtccgtggagttgccggagaccgtcagatggttgtcgaggtctgcctcgcggatgatgaaggagggatagttgccttcagccgtatcatcaaccgcgacatccggcttgatgccggtagcctggatggagcgtccggacggcgtgtagtagcgggccgtcgtgagcttgatgccggtgggagacttctcggtaagcggcgtaagcgggatgaccgtctgcacgctgccctttccgaaggaacggcgtcccatcagcgtggcccgcttatgatcctgaagagcgcctgccacaatttcagaggcagaggctgaggacggattgatcagcaccacgatcggcacggtcttcgcttcctccggccccttttccgtcaccggcaggttcggaagcggctgcccggtgaagaattcgcggttcgaatcctcggtgcggcccttggtcgaaacgacgagcgtgttggccggcaggaagagtccgcagacaccgaccgcggcgtcaagcagcccgccggggttattgcggagatcgagcacaagccccttcaggtgatgatccttctggaacttattcagggccttcgcgagatcctcttccgtgtgttcctggaactgggagatacggatgtagccgatgccgtccgggagctccttcgcctttacggactgcaccttgatgatgctgcggacgagcttgatcgtgatcggcttctttacgcccttacgcatgatctgcagagtgaccggggtcttcggcttgccgcgcatcatcttcacgcacttgctgagtgtcaggtcgtaggtgaaggtattgtcgatcttgatgatgatgtcgcccgcgcggacgccagccttggcggccggcgtatcgtcgatcggggacaccacctggacgccgctcttgccgtcctttgtcacctcgatgccgaggccgccgaactcgccttcagtcccttcctgcaggtccttgaagccttcggcatccagataggcggagtggggatccaggccggacaccatgccggtcagtgcctgttcaaggagcttcttatcgccgaccggatcgacgtagaaggatttgatggcgccgaacacgtcggtaaactgccggatttccttcagcgggagctggttctgagtagccgtatcagtcttgtcggcccacgcattcattcccatggtgagtgcgaatccgacagctgtgccgaccgtaatcagctttaacgtatttttgtccataaacaggcggaatttcagaaaaatgaatgttcccaccagagggctatctcacccatgaggaggggttaatggtgtgacccttgtagcggatctcaaagtatagaccgggggtatcgccgatcgccccggagccggagcgcgcgatggtttcaccggcggatacagaactgccgttgcccttcaggagggcgctgttatacgcataaaccgagagatatccgctgccatgatcaaggataatcagatttccaaagccgcggagattgccggagtacaccacgcggcccgcggcaatggctttgactgccgaaccttcctgagcgcggataaagagtccctgccacttgccgatgccattccggttctggccatagcggccttcaactgtgccggataccggcatgggcatacggccccggagcttcgcgaagtttccggagagagaaggcgcgggggcgggttccggaggctcttcgacccgttcaggcgccttgggcgcgggcttgccctgctgcgcggctttcttcttcgcgagcgcgagctggcgggcacgctcttcggccgctttctttctcgcgagccgttccgcctcaagtttcttctgacgggcacgttcctgagcggcaatggcagcgttgatctgctgaatcagggcagagagacgctgctggtctttcttcagctccgcaacctgctgcttctggcttgcgatctgctgctcaagtttcttcgtgttgtcctggtgcagcttctgatccgcggcgagtttctgattgctctgctgctcagtcgcggcattcgcggcaatattttttgcctgcgccgtggttttctgttcctgattcttcagctgaaccttggtcacttcgaggttattcgctctcttctggtgacgctcggcaagatagtcgagaatcgcgttgccgcgatggatttcggctggagttgagccggaaaccagaacctcccagggcttcttctttgagtaaaggtattggatgcgggcattggtcgcgatgtcgcggcgggtattctccagacggttcgtcacacgtccggattcctttttgatgctcgcgatctgactctgtttctgcttctgctcagcagtcagctgctgcagcttcttattggagagcgtcagggcgctttgggcggacttggcggcagaagcttccttctgctgcttcgcctgcttgagggaaatattccgctgaagcttgccgatctgctgctgaagcgctttctgctgactctcgagccccttcttctgcgcggtattgtcgtccgtattctgggctgctgcctttgatcgggacttctttacagaccggcggggagcaggggtccgcttcttggtcttcgcggtgcttttcttactcacggacgcggttttcttctgctgcgcggcataagtgaccgccggctgcaggagaacactggtggcaaagatggacgcaataagtaaggcagtttttttcatgaagaggcagaggcggatcagccctcagtctgagcggctgatcctgatcggggggattagtgcttcgccttgccctgggcagccacggcggcgattgccttcgcgatctcttcctgattgccgaggtagtagtggcggatcggcttcatgtcgtcatcgaactcatagacgagcggctgagctgtaggaatattgagaccggcgatatcttcatcgctgatgccatcgaggtgcttgatcagggcgcggaggctgttgccgtgagccgcgatcagcacgcgcttgccggaggcaacctcaggcttgatcgattcttcccagaaggggatcacacgggcgacggtgtccttcagacactcacaggcgggaatctcagcctcaggaatatccgcgtagcggggatccttgcccggccacatcgggctgtccttctccagcgcacccggacggatatcgtaggagcggcgccagatcagaacctgcttttcaccatatttttcagcagtttccgacttgttgagtccctgaagtgcgccgtaatggcgctcattcaggcgccaggacttgcgcaccggcagccaatcctggtcgatggcgtccagcgtaatccaaagggtgtgaatcgcgcgcttaagtacgctggtgtaggccagatcgaactggtaaccctgcgtacgcagcagttcacctgccttctgagcctcctggcgcccctgctcggtgaggtcgacatcgacccagccggtaaaacggttttcgagattccactggctctggccgtggcgcatgagaacgagtttatgcataaagttttctctagttagggaacctgaaggagattcctacattctataatcgaataccttagtctgaaccctagtacgggatacaaggaatagaaccgtgttggattttctttaccgcaatgcggctttagtcgcaattgtattaatttcgggagccatgctgctctggccgatgctgacccgcaaaaagcgcgggaaggaagtcgacagcacgatcgctaccgaactgatcaatcataaggacgcccaggttatcgatatccgctcgagcgatgactataaggcaggtcacattgcccgctcgcggaatttcccggccacggtgattcatcatcatctgaacgaattcgataaaacgaagccggtccttctgattagtgccgccggagacgccaaaatggttgcctccctgctgaaaggcatgggctttgccagcgtgacggtgctgaaaggcggcatgaagggatggcgtgaagccggccttccggtcgtgaaataattgaaaaaaactagggtgatgtatgcagattgccctaaaattactactattagagtagtttgagtttccctaaccaaggaattagccagatggcagaagaaatcggaaatcaggaatccgctgaacagaacggccccgtggtccagctgcagcgctgttactttaaggacgcatcgcttgagatgccgcatgcgccggaagtcttcacggaggctcttgaagagcagcctgttgtggatattcagtttgaggttgccccgcagcagctttccgttccggattactacgaagttgtcgtccgcggcaccgtgaccgtgaagtccaaggaacaggtgcttttccttgtcgaaggcaagcaggctggcattttccagatctccggtatcggtgaagaggacacgcgtcacctgctgaacgtgtactgcccgtcgatcgtctatccgtacctccgcgccaatgtggcggatctgattacccgtaccagcatgcctcctgtgcatctgcctgaggtgaacttcgaagctctctatcagcagcgccttgcccagatgcagcagcaggcggaatcctccgtccagccggccgccagcggttccggtcaggcgtaataaaaaaatcactgcgggcgcaccggcgaacccctgagtgacagcccgcaggcgtcaaagagtttcacgactcaaagcgagatgcatcatgagtatcaatgagaaagattcagcaaatacgacggaatctgaaaacagcggcaagaaaatccgaatccttcttgtcgatgaccacacgcttttccgcagcggtctgaaggcgcttctgcagcgtcagtccgacttccaggtcgttggcgaaaccgataacggccttgacggtgtcaagctcgccgagcagcttcagcctgatgtggtgctgcttgacctggatatgccggtgatgaacggtcacgaggccctcgctcagatcctggaagcccagccccatatggcggttctgatgctgacggtgagcgaagacggcgatgacctcgtcgaatgcatgcgcctcggtgcccgcggctatctgctgaagaagatcaacacggacttcctcctttccggtatccgtcacgcggttgaaggcgactccgtcctgtctcctgaaatgacttcgaagctcgtgatgaagatccgccgcgaccacgcgagccccgccaccccggtgacggacgtcaactcgctgacgccgcgtgagcgcgagacgctcgcctggcttgcgaagggtgtttccaataaggaaatcgcccgtgccctggatctggccgaatcgacggtcaaggttcatgtccagagcattctccgcaagctgaacctgagcagccgtgttcaggctgccgtgttcgcggttgagcatcacctggatcgtcagtaatccgttttccctgacgaagcagggcgggttatccgcctcagaaagcctccgatcccgtaaaagcgggagggaggcttttttcttatttttatacctctagataggtacggaatactagcttaatgggcataaaatacccatgttgtctaatcctttcggagaaaaacatggcgggaaaacctgagacgctgtatcagaaaatcgtcgacacccacacggtgaagcgaatcgatgacagcacgattctgctgtacgtcgacatccacttcgcgaatgagtacacgagtcctcaggcttttgcaggactggttgagcgcggtatcggcgtactgtctcctgactcccatctctgcgtggttgaccatgtcattccgacagaggatgtcaccccccgcgttattgaggactccgcgagtgcccgtcaggcggcgaagcttggcgagaactgccgccagttccgcatcaaggccttctatggcccgaacgaccctcatcagggtatcgagcatgtgctgatggatgagcaggggctggtgcgccctggcatggtcgtgatctgcggtgacagccacaccacgacgcatggctccctcggggctctggcgttcgggatcgggacctccgaaatcgagcatattctcgcgacccagacgctcgtctaccgcatggcgaagacgatgctgatccggattgacggacatctcccggaaggggtaaccgcgaaagatctggcgcttgcggtgctgaggaagatctccgcccgcggcgctctgggctgtgtggttgagtatcagggcagcgtggtgaatgagcttccggtcgaaggccggatgacgctctgcaatctgacggttgaggctggtgcccgcggcgcgatcattgcgcctgacgagaagaccgtggagtgggtgaccgctcactgcccggatctgaagggggaagagctgaaggcggctcaggaatactggcgctccctgaagagtgatgacgacgcgcatttcgacatcgttcatacgcttgatgcctcggctctcgaaccgatggtgacctggggaaccagccccgatcaggcggtcggtatttcggaatcggttccggaagcagattccttcgcggatccggattcccacacggccgctgtcagggctcaggggtatcagggactcaaagccgggactccgatggaagggatccccgtgcagcatgtcttcatcggttcctgcacgaacgcgaggctgcccgatctgagagccgcggccgctgtgattcgaggacgccatgtggcaccgggagtccgggcgcaggttgttccgggctccatgcaggtgaggcgggaagctgaggccgagggactcgatcgtatcttcaaggatgcgggttttgagtggcgtaagagcggctgctcgctctgcctcgcaatgaataactttgttctggagccgggggtgcggtgcgcttcgaccacgaaccgcaattttgaaggccggcagggtcggggtgcccggactcatctcgtgagtccgcagatggcggctgccgctgctgtgaccgggcatctgaccgattggcgcaaacttccggagatctgaaaaatggaaaaactcgtaaagctgaatgccgttgccgtaccgctcccgattgataacctcgatacggatcagatcatgccgaagcagttcctgcgcggcgtggataagtcaggtctcgcgaagggcacgttcttcaatctgcgctgctacccggatggaacgcgccgcccggactgcgttttcaataagcccgggtacgagaaggcaggtattattgtttcttccccgaatttcggctgcgggtcgtcccgcgagcacgctgtctgggggctgatgcagattggcatccgggcagtgatcgcgccgagtttcggcgagattttctattccaactgcttcaataacgggctgctcgctgccaaggtgtcccgcgaggatggagaagccattctcgaagcggtgagcggagggaagcctgtcagtctcacgattgatgtggccagccgcacgatttcagacggcagccgcgagtggccgtttgaactgtcagaccggcaccgcgagatgctgctggaaggattggatatggtgggatcaacgctgaaggatctggataagatccaggcgttccgccgccagcatgaagctgcatttccctggatggcagggcttgcgggtaaggctaaggagagaccggagcgtgaaggctgataaggctttccgctgcagatagaggagagaggagaaccgggcctgcgctgtttcacagcacagcgcccggttcttttttgcggggtgcttcgggacggatcagacggatccggcgtagccgtgctgccgccaggcttcaaacaccgcgacggcgacagaattggagagattgagcgaccggttattcggcatcatggggatgcggatccggttctctttgaggcagtgattctcctgcaattcgagaggcagtccggcgctttcacgcccgaacacgagccaggatccggcggcgaacgtcacctccggcagtgaccgcgtggcgtgggaggaaaacatatagaggttccggggatccggatgctctttttcgatgaagtcatcccagttctcgtaagtcttcagcgtggcgtattcccgatagtcgagaccggcgcggcgcagatggctgtcgtcgagcgagaaacccagaggcttgatcagatgaagcgtgcagccggtattggctgacagccggataacgttcccggtgtttggcgggatttcgggtgaaaccagaacaatgtgaaacatggggaaatctatttgcctgaggattctgtgagaatttttttcagtttggcgatggcctgtttttccagctgacgcacccgttcgatcgaaataccgaattccttcgcgagcgtggcgaggctgactgccttcacttccccctcgtcattctcatggaaccagcgggcttcaatgatgcggcggcttctggggtcgagctgctcgatcgcctttttgagaccgacctgctcaagctgcagttcatctgccttttccagaatttcaaccggttcatcgctcttatcggacagcatgtcgaccgccgtgacagaggagtccccctcttcgtcgagcggagtatccagcgaagcatccggtcccgaaaggcgcttttccatttcgagaacctctttaggcttgacgttcagcttttccgcgatgtcctctgcctgagcattggtaagcgcctgatcggttttcttcatctgcctcagattgaagaaaagctttctctgggcatgggtcgtcgcgagtttcaccatatggctgttcctcacgatgtactcctggatttctgcccggatccagtgcacggcaaaagtcatcagtctcacgcccttgtccgggtcgtaatgcctgacggctttcatgagcccgatgttgccttcctggatcagatcgccatgggaaagaccgtagcccagatagccgcgcgcgacagaaatgaccagccgcagatgagaaatgatgagcgcctgggccgcatccacatcgttgtaatcacgcatacggattgccagattccgttcttcctctgcggtgagaaccggggcgctgttcgccgccttgatataggcgtcgaggttccccagatctcccggcgtaagcgccgggagctgggtccttttgcggtaaggaaccagtgcggtctgaatgggcttcctaagcgaatttgacgtcatttttccgtcctaacgctttgatggggagatgatgtgaatgaaggatccctcatcagattttgccccggtagccgaggtagctggttaatcctccgagaatgtttcccaggaggaatgacaccacaatgaaagcaacctgccaggagagcggcagaggctggaacgtaacgggcagatggtacagcccgagagccgtggagagcgcaggggcgatgctggagatcgcgagatccgcaataacaatggaggcgagagacgcgagcaggaagacaaatccagcccgccaagcatccgggcggacgatgaaggatgtcggggcacccatgctgttcagcctgagggcttccttcagaggcgtggttgcggcaaggctcgcgctgccgagcagcaccatcagaatgagtccgcagagaaggtcgccggtgagaaggccgaatttggcgaaggcattcttcagggcctgaatgttgctgttccaggtgctgtcgtaggcaaccgaatcaactccaggctgcttttcaatgaacttcgcggtctcgtccacctgcttctcgggaatatccgtgctgacggttgcgagcagaatattcggcagcgggttggtgctgaatgagagatccgtgttgtccgtgtctccgatcagccccagcgcctcatccggtgaaacgagacgtacgcgggtgatgccgggctgcttttcaatagtttccttcaggttcgcagcccgttctgagctgaccccctgattggtaaagatggtcatctcctgggcgacagagacgcccttcacggagttgtaagccgtaagggagagggtgaaagccacgagcagcaggctcatggcgagcgtcgtgatgacgagcgaaatgagcaccttgcccttatgacgggacacgccctcgaagagcttcatggttgcccactggcgagcggcaaatgcattagacatgatgcagtttctccatgtcgattgccgtgacgaaggtgtcggaaagcgggttgtggctcacagcgagcacggtgccgccttcagaggcgtactgggccagaatccgaagagcggcgtccgcgtgctcctcatccagataggcggttggttcatcagccagaatgacagcaggcttattcacgagcgactgggcaagaagtgcgagctgccgctccccttccgagagatcccggatccggttatcggcaagcgggaaaagaccgcagaccgtcagcgcgtcggctgccagcatcatggcgtcccggatggaatgaccgcagagaatggccggggtggtgatggcctggagcagggcttcgtcttcagaagggagtgctgtccgtgtgaagagaccgaaactgcggcgcagccgcttccgggcccctgaggacagtgtgctgaggtcctgtccggcaacccgcacggttccggaggccggatccgcgagaccgcagatcagccgcagcactgttgtcttgccgcagccggtcgggccatagagattgatgaactggccctgggagatcgtcagcgtaaagcgcgagagaaccggaaactgaccgcgggaagtcgtgacctggctcagctcgatcatgcctgaagaagaattatccatacctttcctgtgtttcagagcccggacaaatcgtagaaaactccggttctgagggatcccgtggcgaggttgagctcctggatgcggaataccctgaagagggctgccagaacggcaaagcctccggcaataatgtcccgtctgtccggcttcagccccggcagattcagttgatcaatataccctgctttggcaagagcctgagaggcgaggcggatgatgtccggggtaatcgggccgctgccccagccgcaggcggcagcgacgctgtgaagcgaactgatcgttccggcggatccgtaggcgctcttccaagggtgagatgtgaagcgggctgcctctgcctcaaagacctgggcggcccggtcgatggcttttgcgattgtctgctcgttcagttcacggcttgagaacgaggcgatcgtcgtattgacacagccaatcgggaaggaagttgcctcgcagagtctggagccgtcgccgacagaaagctctgtggaggcaccgccgatatcgatcacgagaatcggatcggtcgtcgggggattgaggctcttgatgcagccgaggtaagtgaggcgcgcctcctctgtcccgggaatgatgtgaatcggacagccgagcacaggttcagcccgcgtgagaaagtctgacgaattcttcgcgattctgagtgcctgggttcccacggcgcggatcctgctcagcgggatgccgcggatcagccttccgaaccgggcgagagaagcgagcgcccgggtctccgtatcctccgtgaggcagccgcggctgtcgaaaccagcggcaaggcgcacggtttccttcacatagtgatctgacacgagcttccggccatcgaaatgtccgatttccagccggaagctgttggagccaagatcaattaccgcatatttttctgtcatggaaatacgccgtcaggaatgggattccgcttcttcctcaccaaccagagcgcgggcgaattcctcagccttgaagggctgaagatcgtcgatcttttcgccgaccccgatgaagtagatcggaaggggcgagctgccgcgttcctgcgcgagagcaagaagcacgccgcccttcgcggtgccgtcaagttttgtcacgataagaccggtcagaccgaccgcctgatcaaactgacggacctgagcgagggcattctgaccgtttgtgccgtcaatcacgagaatgatttcgtgaggggcgccaggcagggctttttcctgagagcgcttgatgcgggtgagctcttccatgaggttcgcctgcgtcggcagacggcctgcggtatcggcgagcacgacatcaatgccgcgggccttggcagagctcacggcgtcaaaaatgactgccgcgggatcagcgccctgctgcgacactacatgcacctgatttctcttgccccactcctcaagctgctcacgcgcagcagcacggaaggtgtcgccggcggcgagcagtacggatttgttccgggccgcaagccacttggcaatctttccgatggaggtggttttaccggcaccgttgatgcctgccatcatgatgacaagaggatgagcgcgttcgatatcgagatcctgctcggacggcttcagcatccgggtgatgatatcgatcagttcgccgcggacttcctcctgggtcttcagccccttcagtttgatagactcgcggagttcctcgataattttttcagaagcggggagaccggtatcggccgcgatcagcgcgtcctgcaggttttcgagaaagtcctcgtcgattacgccgcctgagaacaggccataaagattgacgcgggtctttgtcagaccccggcgaagcttggagaaccacgtttccttgaccggagccggcttgggttgcgcggccggtgcaggggcaggcgccggagccggtgtcggagctggagccggggtttcggcaggcgcagcaggctcagcgggttttgacgcggagaagtgtttcgaaaaccaggagccgccggactgagacttggcctcttcctgttcggaatcagcgtttttctcgtccttcttcttgccaaagaaaaaaaccataatactgtaatgaaaaagaaaagaatatttgacccgtcaagtttaccaactcgtgggaagaaaacgggtgcagtgaggatttttgcaggcaaatggaagagaacaccgctccccgtgatcgatctggatggtcttcggccgaccgggaacagaatccgggagacggtttttgactggctcaccttcctgcttggagggtattccgggaaacgggctctcgatatgtttgccgggagcggcgcgctggggcttgaatttgccagccgcggcggcacctcagtactgattgagcgggatccccagaatgcccggaatctctcggatgtctgcgcgaagctgaaagccggagacgacgcggtggtccgccggggcgacagcctcacgctcacccgcagctacccggaacgctcctttgatgtggtgtttattgatcctccgtttgccgctgggcttcatcagagcgcactttcggcagctgcccgtgtgctgacggatgacggtctcatctatctggaaagcccgtctgagcatgagatgccggttccggaggattttgcggtgctgagatccggcagctcgggtgctgtccgttaccagcttctcgcgcgtaaggcatcgcctctcgcggatctcgccaaggaggactgagcgtggcaaaggcagtgtacgcaggcacttttgatccggtcactctgggtcaccttcatatcattcgccgtgcggcgaagctcttcgagtctctgaccgttgccgtggcggaatcaaccggaaaacgcaccgtttttacggctgaagagcgtgcccggctggtgcgggaagaggtgagcgatcttccgaatgtttccgtcgtgatttttgaggggttgctgagcgatcttgtgaagcgtgatgggttcgatgtcctcgtgcgcggaatccggggggtgtcagactttgcctatgagtatcagatggcgggggtcaactccatgctgatgccgggggtggataccgtattccttcagacagagccttcgcttcagtttgtcgcgtcatcctacgtgaaggagatcgcatcgcttggcggtgacgtcggggcattcgtatccccccgggtggctgaagccctgaaacagaaaattccgggcttcaagccgtaagtcagcgggatttcagaatttggacagcacccattccttcagttctctgaaccagcgctcaaacacggattcagatgccgcgggagctgcggctttcagcgcggcgggtgctgcgggggcggcagccttcggtgccggctgaggttcggccggcaggaattccatcggatcgatcagactccagaccggacgggaaacggagccgtccagtgtcgcaggggaggacttctgctgcagagcggaccacaccaccgcttctcccgccactgaaagcgtctgcagatcaatctctgcccggccctttgccgtgaagtcatggccggccgctttcaggctcccggttgacgcgatcccatcatgaatcacgaccgggcaggagagactcgtgaaaggcagagccttccggccgagtccgggcatatttccgtttgtcagctcgatatccgcgtcgcctttgaggctcttcgtcatgatctgatcggggtcaccgggaccggatgccgtcagcaggaggttgagagtgccgctcaggctgtcaggggcgctgcggtcgccagcggctatctgtgcggcttttgccctgatcacccagcttccggagggatcaaaggaaagattgccggtcacgtgcccgccccgaaggtctgctgagaagtctgaaatggtgagactgtcccggctgagggcaatatgagaggagaccgcggaggcccgaagggcgccgcgggaaagttcttcaatgctgacagtggcgtgaacagtcgccgtacccgcgattcggataagcggcacagcgatttcagacgggatgctctcccaggaaagcgtggcaggggccgtttcttccttcggcgtcagatcaatcttcttcgcgacaatctgagtatcgattttcggagactcaagtgagcttccctggagggaaatagagagcggagcatcgttcagctttcccttcgtatcgagctgcagtgtctgatcggcccagttgcctcgggcagtgccggtgaggctcgcctgaatggcaggggcagtgtccgcggcgagcacatatccgagctgcatctgatcgagcgaatagctcttcttatccatgtcgaccgagaagggcgaggagacagaaagcgactgcgtgccgctctcaagcgactgcaccgcgctcagcttggaaatccggcctcgcacaatgtgattctgcgtggacagatcttcgaccgagagctggtaggtattctgttttttccctgtagtggaaacagaagcggcgagctgctttccggaccagaccccctgcacatactggaagttttcagtctgcacagtggcgtcaaacggagagctctgcgcagttccagaggcgtgaatcctgaattgcggcagaccgagaatcttgctccgcagatcgaggtcgacattgccgtttccctcaacattcgcggtgattttgtcagccggggacgtgaaggaagcattgaaggtgacaggagctgtcatccggggggccacttcgccggtttccagagacgctatctgcacctgaaccggttcaggccggagaccgttcacggcaacctgggcattggtgaggatcagtttcttcacaacaacaggcgcgatccagctgtccgtgtcctgaatcagcggtgaccgggatagatgctggagctcgttctgatccggtgaggcgatggcggaattcagcccgtccagcgtgatgctggaaatatggagctgaccgatgagaagtccccagggtgaaatgcggatggtgccggacgagaagctgccgagatagctgttatctgtagtgtcagtcagggtgcccttgggcagagtgacctcaattttcggcaggtgcttgatggtgatctggccatcgagcttgatatggagatcaagcttcttggaggagaagtcctccagtttttcctccacccacttggggctcaccacgatatacagcgcggaaatggaggcgaacgaagccagagcagcaaacagaatgagccacttggaaagtctgactaacctgatgagagcagaatcttttttcatggcgcggcgcaaggtctgaaatcggagtacacagctcctagtttagacggttagtgcgccggtcagacacaaaaattggttatttcttcgagcgaagcgttttccggatcgtgcggcgcagattcggagcgagcctctccagggcatcaagcgtcatgaaaagcgacgattttccgtgcatggaaagggaacggaaacgggacagcagctcgttttcctcacgcaccggattgtggcgttcggtagtaatgacgaagttcgcatcaaacccgattgcggcaagacgcgtcatgcgaaagagtccgggatctgattctccggtttcgtagcgctgatactgatccagcgggacgccaagaagcgacgcaatctgctcctgcgtgtagccgagccgttcacgctcggactgcagacgctctcctagttcctttcgctgtttggtgctggtcaaagccatagtgtcagaggggcagtcggattgggggcaaaggaacattcccctgccgcggatcacaaaaaacagtctgattgtattctaacaagccgccactgagcgattgcggccgacagatatcccggggccggatgcccggccccggaagaggaatcagactaaagacagcagaatcagacgttgaaaaggaagttcatgatgtcgccgtcatggacgacataatccttgccttcggcgcgttccttgccggcttcctgagcacccttttcgccgtgatacttgatgtagtcatcgaaggcgatcgtctgcgcacggatgaagccgcgctcaaagtcggtgtgaataacgccggccgctttcggggcggtatcgcccttatgaatcgtccaggcgcgtgtttccttttcaccgctcgtgaagaaggtctgcagaccgagcaggtcgtaagccgcgcggatcacgcggttgaggcccggctcttccattcccatatcggagaggaacatggcgcggtcttcttccggcatttcgagcagttcaacttcggtctgggcagaaaccgcgacaactgtcgcgccctgttccttggcgatctgacgcacggcatcgagatacgggttgttctcaaagccgtcttcgctcacattggcaacaaacatcacgggcttcagagtaaggagaccgtaattcttgatcagcagcttctcttcgtcagtcagcggcaccgtgcgggcgggcttgccttcattcaggacgggctgaagcttttccagcacagcaaccagcttagcggcttctttgtcagcaccctgcttggcctgcttgccccacttctggatctgcttctcaacgacggtgaggtcagagagagccagttccgtattgatgacttcaatgtcggacgccggatccactttgccggacacgtgaacaatgttgtcgtcctcaaagcagcggacgatgtgggcaatggcgtcgcactcacggatgttggcgaggaactgattgcccaggccttcgcccttgctcgcgccggcaaccagaccggcgatgtcgacgaattcgacagcagccggaacgattttcttggggtggtcgatttcggcgagcgcctgcagacgcggatccggaacctcgacgatgcccacattgggatcaattgtgcagaaggggtaattctcagcggcgatgcccgctttcgtcagagcattgaaaagcgttgacttgccaacgttgggaaggccaacgatgccacatttaagacccatttcttgaattcctaaagatataagcggaggagtgtctcctcacgcgattgaaaatgtctactctctgccgcagccgcaggactcgccggaagattccttgagcgcgagcgcgacagcctccagggtgtgctcttcatcgaagacacgtatgcctgactggctgagaagggaggctgtaacgccgatgccgtcttttttggtgccgcggaaaaagccatcgtaaattttaccgtttccgcaggcagggctgaaagatttcagcaccgccaccttgacctgattctgcaggcagagtgccagagcctcacgggcgccctgaagataggcgagcgtctgatcggtccctttgatgctgatcacgcgggcctttccggaaagaacgtccgagccgtctcctgcctggatttcacagggcgggcgcggcgtgggaagaccaccagagcattcggggcagagcgacacgattcggccgccccgggacacgaacttggtgagaatgctcgcgtagtcccctgagacggcttttccgtcccagcgtacagggaggcctagcaggcaggcactgacgaagataggcgacgccatggcttatttggccgcttcgtcgggatgcttcccgaagggagcgatcttcctctgcgcagcctgaaagttgccgtccgcgagatccgccatgcagtcgatgccggcggtgatgcagctggaaatgctctgcatctgttcgggagtcggtttgccgagcacgaaatccacaacctggattcggaggccaagcgtgcggggatgacccgtaccgatacggaggcgccagaaattcggcgtggcgagtttctgcgtgatgtccttcagtccgttgtgaccggcattgccgccgccctgcttcagcttcatgcatccgggcaggagatcgagctcatcatggacgacaaggatttcctcgggctcaatgtggtagtactgggcgagagcctgtacggcggtgccggaccggttcatgtaggtcgtcggcttcatcagccagacatcgtgatgatccagttcgacgcgggtcacataggcgctgaacttcttttcttccgaaaagtaagcgtgagaacggctggcgagttcatcggcgaacataaagcccgcgttgtggcgcgtgccatcgtattccgatccgatattgccgagaccgacaatgagtgagattcctttcatctgagcgggcatgattcagtaattccttaagcgtcttacggtacgcgtttcagggcggggagagtccagagcggtcttcttctccggccctgaaaaaaaaaggctctttcaaaggaaagagccttttcagagaaaagccgggaaagattactcggccttcttctcgccttcagcggcagcagccggagcggcagcgccttcagccggggcggcagctgcagaagcagcagcggcggcggcagcgtcagcggcggcatcagcctcttcttccttgaagtcggtgatgacggtggcgatcggggtgtcttcaccgggcttctcgacgacggtaacgccagccgggaggttcagatcggaagcacgcagaatcgtctgagcggtcatgttggacaggtcaacatcgatgaactcaggcagatccttcggcaggcagtgaacttcgaggaaggacaccaggtggctgataaggcccttgctgatcttgacagccgggctgttctcggcgccagcgaagtgcagcggcacgcgcatgttcatcggcttgttcggatccacacgctggaagtcgatgtgcagaacctgctgcttgtagggatgcagctggaaggaacgcagcacgacgagctgatcaacgccgtccagattcagggtcaggacggaggagtggaacgcttccttgcgaagagcatagaaaatcgggttgtgatcgagaacgatcggcgtggcagcctggtcgttgccgtagacaatgcccggaagcttgttctcgcggcgcagacggcggctcgcacccgtaccttgcgctttacgtgtggttgcagtgaaattcatggaaaaactccaaaataaaaaatggacccgccgccgcgaccagcagcgggtttcttgctattccgcaaacagagagcttacggaggattcgttggcgatgcgggaaatcgtttcgccgatcagagccgcgcaggagagctggcggatcttcgggcaggcttcagcttcgggacgaagcggaatcgtgtccgtgatgacgagctcgtcgagcggggaattcgtgatacggtcgacggcatttccggaaagcaccgggtgagcagcgtaggcgagaacacggacagcaccgcgttccttcagcgcgctcgcggcattgcagagggtgccggcggtatcgacgatgtcgtcggtaatcacgcaggtacggcccttcacttcgccgatgatgttcatgatttcagcgacgttggcgcggggacggcgcttatcgatgatcgcgagatcaacgtcaagagccttcgccatcgcacgggcgcggaccacgccgcccacgtcaggagaaacgaccatcaggttcggatactggtgagcgaggatgtcgttcagaagcaccggggtggaatagatgttatccaccggaatgtcaaagaagccctgaatctgatcagcgtgaaggtccatcgtgaggacgcggtcaacaccgacagactgcagcatgttcgcaacaaccttcgcgctgatggccacgcgggcggaacgcggacggcgatcctgacgggcatagccgtagtacggaattgcggcggtaattctgcgggccgaagcacggcgcagagcgtccaccatgatcatcagctccatcagattgtcgttcgtcggagcacaggtgctctgcagcacgaaaacatcctgaccacgaacgttctcgttaatctcaacagcaacctcaccatcggagaagcggttgactgttgcacggcccaatggaatattcaggtgctgcgtgacagaaagggcaagcttcggatttgcattgcccgagaaaaccataaggctgttcgaaaccatgatttagctcttaatcctcgcagggctttcgtcccgcagttgtattaatcgttccatgctgacagtacatggaagggaaaaacaggcaaaatgccctttgtttctggcaggggaggcaggactcgaacctgcgaatatcggaatcaaaatccgatgccttaaccaccttggcgactcccccgtccttgtcaagaacccgtcccgctgcggaaccaatccgacagcggatgacgttctaagctttttactgcgtagcctgaccactcttcaggaaggttttccaatacccgttcggcatctgatccgctctggagcggaagaaaaaccgctgaacctgatcccgtcatacggaccgacccaaagggagaaagcgcttgtatggcttgtctgacggcgggtgtggactgtgtgacgacaggctgtaagtcattgtggccaaagccaaagtgaaaagccttgtcctgataaaggcaggaaagaccgctaattttcggtgatagcggcggtgttgtcaagtcaaaatcccgaaacgcgcgatctgtggcagagaatgcgccggggtacacgatcaggaaatcgtgcgccggaacggggattggcgtgatccgttctccgattccttccacgaaggcattttcaccctgaataaaaaacggaacatcggccccaagctcagtgccccaggtggcgagatcctcacgggagacaccgagattccagagccggttgaggccgatcagcgtggtggccgcgtcggaagatccgccgccgaggccggcgccggatggaatacgcttcgtgacgctgatttccgcgcctttccggcacccggtcttttcctgcaggagccttgcggcccgcagacagagatcggaggggttatccgccatgtctcccgtgcggaccagaccgccttcggcccgctctgtgaggcttacggagtccgcgagcgagatcagcagaaagacggattcgagcaggtgataaccatcctcccggatgccgacgatatggagaaagagattgattttcgccggggccggcagatcgagaaaggctttcggaagatcaggatgcattggcgtctcgcttatcgatagtgacggtgaggcggacagaaggcgcagcagcgctctccgctcgggtgacacggacaagcttcgggagaccgtcagccgtcttcgtgaggaattcaatcctccagggcggagccgacagttcatctccgggaggcggtgaactgagccaccccatcatttcggtcacagggaatgagaacccgagctcattcatcatgagccgctcaggcgtccggtcagagagtttctttccgtcactggtctcgagcgtggtgagctgcggtgaaaccgtgatccgggcaagaatgccagtgagcggatgcccgagctccagcaccgtggcggagcctgaccgcctgagcgtgaaggagcccgtctggctctccttccgtccccggaactccgttaccgtactgaagcgtccctcaatcttttccgcgaaactccctgtctgaggtcccagggaagagcaggccgcagtgagcgcggaggcagcgagaccgaggagcagtgtgcggcgtttcatttcagaccgaacttcttacggaaggtgggaagagactggtcatccggatgctgtgccgcccacttatcgagctcagcctgagccgccgcgcggtccccggcctgcgtgagtacggtgagcaggtgttcaacggtttccgcgtcatagcgcagactgagcgaggactccaggaattgcttcgccttctcataattcttcagccggtagtagacccagccgagagaatcgaggatataggggtcccttggtttcagcgtattggccttttccacaagacggagtgcttcccgcagctgcacattccgctcggcgaagatgtagccgagcgcgttgtagccggtggaggaattggggcggagcgcgatgtacttccgtagatagaattcgacgccctgcaggtcattcactttgtcagcctgcatggcggtgctgtaaagaaagtccggcgcattgccgaccgtttttgcggtctgctgcatggcgtcataggcctgccagggctggttcgcggcgttcagcagctgactgagcgctgtcgtgatcgcgatctttccctcatccgctttgggcttcgcctgctcaagcacagcaatagcccggtcagggcggccggttttctgatagatatcggcagagcggagacgggccgcgacgtagtacttgccgtccgttacctgttcgtaccagctgagtgcatcttcgggacgcagctgattttcagagaggaaaccgagccggatataggcgagattccgttcatcagccggggctttctgctcagtcttcaggaaagtgctgtatgcggtttcagcgattttgggttcgccattctgctcagccatttcaccaagctgaatccattgggtgccggtgagcttcttcgtggtgagaagtttcgcctgggccgtgaactccgccttttgcttcccggcgagaaggctctgcgcgtagataaggcgcgttgcggagtcttccggtgagtccttcagaaactgtttcagcatatcggccgaggcctgaggctccagcggcatcagggcgatcgcggcctggcggatgaccgccgggttctgcggggctgccttgatggcggagcgggcaaaccgttcagcgatatcgcgccgggccccctgaaccgcgacactgcagatcgcgagatcaacagcgggttcgctggcttcataaggtttagcgagagacgtgagaagcggcagggccttatcaatcctctggccgttcagtgacgcgaagatctgctggaaaacaacagacgggcggctctgggtcttcaggtacttggcaaaggcgggttcggctgcatcaaagttcccgcttctcagcgcctcgtacgcggcaggcacctcagcttcaggcgtgccggcggtaagttttgaccagagcgccagcgcttcactcgcctctttcggggccgttgaaagattggcgatcgcgaaagccctgcgggcaatgcctgggttccccgtctttttcgcctcttccatcagcgtgaggaaggcggatcctgactgatgacgctgcacggcaatttcagacgcaatgagactgaaaaggacatcgctggtcagggcggggtaggagtaggagtcagccttctccgcggcggcctctttgctgtcggccggaatttcctgcgccgaactgaaatccggcgctgaggaaagcatgattcctgccagcatgcagggcagaacgtgggagaaagctgttttcatagacccaaacaaagtaaagtggctgttatcagagaagtctaatgaatttagcgaaatccgtagcaggcgaccgcgattgtcgggaaacaccgccttcggaaatggaacagaaatgcatctggcagaacaactgatcaagtggcagaagcagcatggccggcatgaccttccctggcagaagacccgggatccgtaccggagatggatatcggagatcatgctgcagcagacccaggtcacgaccgtgatcccctactatctgagatttatcgaggcctttccggatgtcaggactctggcggcggcctctgaggatgacgtgctcaggcattgggcggggctcggctattatgcccgggggcggaacctgcttgcctgcgcaaaggccgttatggcgtccgggggcgaatttccgaaaaaccgggaggcgcttgaggcgctgcctggcatcgggcgatcgaccgcggccgccattctttccagctgctgggatatgccggaggccattcttgacggcaatgcgaagcgggtctttgcccggtacttcggtgtgaagcggggtgaaagcgaaacgctttatcagaagaggctctgggaaatcgcggaggaaacggtgccgcagaaggagtgcggcatttacacccaggcgctgatggatcttggatccatggtctgccggaggtcccggccggactgcggcagctgcccgctgcgggatggctgcaaaggatttgcctcaggtgacccttccgcgttccccggcgtgaaaaagcgggcggaaaaaccggtccgctcttcttccttccttgtcatccgatcggaaagccggctttgggttgtccgccgggaaatgaagggggtgtggcaggggctttactgtttcccggaagcgcctcacgaagaagaggctcccgatccggccgctcttctcccggagggggccgcggtacggctgccgctcagatacgcgggacggctgcctcatgaatttacccactaccggcttgaaatgcatttctgggaaggagatgcggtgccggacactctgcggcattttaccggcggaaagtgggtcagtatccgggacgcggacgcagaggcgctgccttcccccgtcctcaaatttatccagacgagattcgcggggatcttagatccgcgggagcttgagcgcccggtgacggacgacgacaccggcaatgcttgagaagcgccggtagagttcttccgccacgaaaaccgaacggtgctgcccgccggtgcatccgatgcagatcgtgagatagtgccggccctgggctctgaatccggggatccatttgcggaggaacgtctcgatatcggacaccatttcgaggacctcaggctggctcttcagatagtcgatcaccggcttatcctgcccggtgagcgggcgaagcgccgtatcgtagtaggggttcgggaggttccggacatcgaaaacgaagtccgctgcgacggggattccttttttgaacgcgaaggattcaaaggaaattgtcatttccgaggcaggagcattgataaactgccggatccaggctttcagcatggaaggcgtgagatctgacgtatcgagcacgaaaccgtcctcgaggctcatcagggagcgttcctgagcaatcgcttcctgcagtcccgtctgatcaccgggttcgcggttaagtggcgtcagcggatggcggcgtcgggtttcggagaatcgctgaacaagcgccggcgtggacgcggtcagtgcgaggatccggacatcgattccaagatccttaagggcctgacactggcgcagagccgtctggggagcggccttggagcggatgtcgacagaaacagcgaccttctcctgaccgcggtccctgagagactgaatcaccggaacgataaagtcgaccggcagattatcgatgcagtagtagccgctgtcctcgagctgccggatggcaacggactttcctgatcctgatagacctgtaacggcgataacctgcatgacaaaagactcctaacaggcacctcgggggtcggtgccttcctatgtcatttaattctatcgttaaatttttttcctcagagacgcggggaggattttttcctgttcacggtacttggcgacagtacgccgtgcgacctggtagcctttttccttcaggagatcggaaagcttggcgtcggagagaggtttggctggcggttcctcggcgatgagggcccggatcagtgaccggattgccttggaggaaacggtgtcgccgctttcagccgcgacgtgcgagctaaagaagtatttcagttcgaagatccccgcgggagactgaaggtatttgccgtttgtggcgcgggagatggtggattcatgaagcccggtgtccgccgcaatgtccttcagcaccatcggggtcagtgccttttccccgctgctgaaaaattcctgctgacgattgacgatcgactgcgcgacccggagcatcgtggtgtaacgctgctccacactgcggataaaaactttcgcctgggctgctttttcgcgccagggcgtttccgccgtgcttttcttggccgcagaaccggtcagttcagagagctgcgggctgatgctgagggctggagttgaagccggatttaatgacgcggtccatatcccgtttttccgggtaacgagaatatccggaatggcgtactgcaccgcatcgttcttgaagtcagaggccgggtgagggttcagagactgaatgatccgatagaccgccttcagctcatcatccgtgcaggcaagcgttcttttcagcttggcgtagtccttgtgagccaacgcgccaaggctgccggaaagggcgttctccgcaaggctgatcagccggggaggaagttcaggaaccgattcgccgaggagcttcagctgcagcgcgagagactccgcaaccgaataaacgccaatccccgcgggatccagggactgaagttcctgaagcgcgagctgccaggtaccaggatcagccggttcagttccggtctgacgggcaaaggtctccgctatttcctcaagcggcgcctcgaagagtccgttttcgtccagttcaccgaccaggtaggacactttttcctttacctcaggggctgctctgaggaagggaatctgtgcttccaggtgttcctgcagtgtctcggatgtttccacccagtcaagcggggaggtgtcgctgtttgcgtcgccgtgtccccaggaggcctgggaaaaattcagttcgccgaagctgtcatgcgctgcgctgaagtcgccctcgggattgccgcccgcgtcatcactgctctgaatctctctcgcgtcaggcttccgcacgggttcctgaaccgggctggcgtgctcttcctgagcctgaggctcggtcacttcgagaaagggattgtcatccgaaacccgatggatctcgtccagaagctcggcggacgacagccccagcacctcaattgcctgttgcagctgaggtgtcagcaccatgcgctggccttgctggagtttcagatcgttcggcatgttccggatccgggagaatcagctgttactgctttttccctgtcgtgggatagtcgaactcttcgccgagatagatcttgcggaccgtctcgttgttgctcagctcttccggaacaccggcggcgagcacattgccgtcgctgatgatataggcatggtcgcaggtcttgaaggtctcccggacgttgtggtccgtgatcagaacaccgatgttccgttccttcagaatccggatgatgtttcggatttcgctcacagcaatcgggtcgacgccggcgaaaggttcgtcaagcagaatgaatttaggacttgccgcaagtgatcgggcaatttccgtgcggcgccgctcgccgcctgaaagtgacatggctacattcgtgcggatgttctgaatggagagttcatccaggagggactcgagccgctcattgatttcggtcttgctgagcggcttgccggcctcattcttctgcagctcaagaatggcgcggatgttgtcttccaccgtgagtgaccggaagacactcgcctcctgaggcagataggtgaggcccatgtgcgcgcggcgataaatcggcaggtgcgtaatgtccttgccgtcgaggtaaatcgagccgccgtcagccacgatgaggccaaccaccatgtagaaggtggtggtcttgccggcaccgttcgggcccagcaggcccacgacttcgccgctcttcacccgcagcgacacatccttcaccacgacgcggcggccgtagcgctttctgagccctttggtttcgagagtatgtgtgccggcaacggcgaggttcttatcgtattcggccatttacttcgtcctgtttgccggtgccagcgtggtggaggaacgcagcttcgtcgtatccgaggagctggaggagttgtcctgcttgcggggcgcgatcactgtcgtcacgcggcggcgttcaccgcctgcggtgccgccttcggcgacagagcgggcgtttcggatatcatacacgatggtctgaccggtcgcttcatccttcagcacgccgttttccgtacgggtcaggcgggcattgttgatgagcgtgatagtgtctttttcttcgttgtagatcagcttgtcggcttcagcatgcatccactcgctgatcttcggattcgggttgtcgcgctgctgcttgaaggtggcgagcttgcctgtcagaacgccgacccgatagcccttcggcgtgatctgcaggtcgagacggtcgccgtgcatttcaagcgtaccctgatgcacctcaacgcggcccgtgtaaacagctgtctgcgagacctggtcgccggagaaatgatcggcggcgatctcaatcggcttcgagttgtctgactgaagcgcgcctgcggtagcagcggctgtaatcagaagaagggctgtaataagctttgttttcatggtttgcgctcaattatttgcgtgaggcgatgtgcgtgttgacgcggcccgtaagtgaaatagtgccgttggcgtagctgtagtccatgccgctcgctgtcgtgctgtcgcttccacgatggaagacaaccggggagtctgaagtgaagcgttccgtatccgggaaggctgtcatcttctgggtttcgaagctgagggccggagtgctgcctgccgggtctctcagaattttaacgttcccttcaaactcgatcgttttcccggcatcgtgtgtccagccgcggtcagaagaagcgtcgacctgaggcttgttcggcgtcagggtgatatagcgcggatgatcggcgtctgtccggtcgtccgaataatggatcaccttgtcggcgatgacacggcgcacagggttccccgcgccgtcaaagtcggtcagcgaaagcttggtcgctgtatagtccggcgagttttcactcggcaggtatttcaggtccttaaggcctgactgcacggcgtagaagtagctcgcaccgatcagaaaggcgaggaggatgattgcaacaatggctgaaactctttcccgcatgtcaattacctgaaacggggcgcgtcgggatggaagtaaaagcggtcgatcagatcatcccagaccccctgggacatcagaatcttttccgccatttcccgaacggctccccggcctcccgcgcgggaggaaacgaagtcgactgacttcagaactgtgtcaacggcgtccgccggggcacaggagagtcccaccagctgcagcaccggcagatccggaatgtcgtcgcccatgcaggcgcactccgaagcgtccagatggcgagcctgaatgagatccaggaacgcacctttcttgtaggactggccctggaacacatctcggacaccgagctcacgaagccgcgcgccgacgatggcggaccgccggccggtgatcacgacaacatcgatccccgcggcgagcagcatcttgatgccgagaccgtccttgacatcaaagtgcttgcagagctctccctgggaaccggtaacgatctggccgtcggtgaggacgccgtccacatcgaggacgaccagcttgatttttttggttttgtcttctactgacatctcagattaccttggcagtcatgaggtcatggaaatgaagcgctccgatcagatgcccatcgtgatcgacgacagggagctgattgcactgcgcgcgctcaaggagcgatgcggcttcagcggcaagcgcttcagggtatatggctttcggatgcggcgtcatgacgtcccggatcacaatgggacggatgtcaccgacacgctcgatcagtctccggaggtcaccctccgtgaagatgccgagcagctttccgtccttatctgtcacggtggtcatgccgatgcccttgcggcttatctcctgcacggcggcaagaatctgcgtgtcgggcgaaacgcgcggtacatcgtcgccgcggcgcatgatgtcctgcacccggagcagcagcctgcggccgagcgctccgcccggatgtgaccgggcaaagtcttctttggtgaatcctttggcgtcgagacaggcgatcgcgagagcgtcccccatggcaagcgtggccgtggttgacgcggtcggcgcgagattcagcgggcaggcttcgcgcgcgacatgaacgttcagattgatgtcagcttcgcgggccatcgggctgtcgggattgccggtaagcgtgatgaggaaagcgccttcccgcttgattgcgggaatgatggcgagtacttcggacgtgctccccgagtaagagatgccgattacgacatcctcacgggtgatcatgccaaggtcaccatgcgatgcttcggcggcatgaacaaagaaagcgggggtcccggtggaagccattgtggccgcaatcttgcgggcaatatggccgctttttccgatacccgtgacgacgacgcggccgcggcaggcgaggagcgcctgcacggcccggacgaagtcatctccgatgcggtcagaaagagccgataccgcggcggattcaattttcagaacttcctttgccagagagagaatcccctcggcttgggtagtgtgttggttcatgtcgttacaggcctttgttctcgctttttatcttgttaatgatacctttgccgcttgtcaaaactgaatccaatttgttgaaaactgtttgaaagcggcttccctgctcaggaggcgctgccttcgttcttcacgaggctcttcgagaaatcggggcggcgcccttcaagaaacgcccggtgagcttctacgatttcaggctcctggagctgctcattgaacgcctcagcttcttttttggactgctcgcgggtgtcgctatggaggatgcctctcagaaggctctttgtgcggatcagggcctcaggcggcatgcgggtcagacggacggcacgggcggttgcttcccggagcacatcttcatcctcaaagacaccgttcgcgatatgaagtgccacagcctgttctgccgtgatcggttctgagaggagcagcttttcagcggcgtggtgatagccgcattcggcgatgagtctctgcgtgatgccgaaaagaggagtctcgccgagagcggtgaaggggagtgagaagagcgcgtgctttccgcagtagacgaggtcgcacgccatgagaagcgtgacagcaaggccgactgccggaccgttcacggccgcgatcagaggctttctcacattgtcggccaccgagatgaggtgtcttgcgttatcaacgccggcgctgatcttattgccggcaacaatttcctcgagatcagatccggccgagaagatggtcgggaggccatgaatcagaatgacccggacatccgggtccttgtcggcatcttcaagagccgtcgacagttcctgcagcgtgtcggctgagaggctgttgcgcttggcgggcttgttgatggcgatggaacggatgccgtccgaggtttcaataacgagagtgctcatctttgttctgctgatgatggtggacagggaaagactgagtccgcgggattgcggagcagggctccgggcacagactcatccaatatgaatcataaaagcattaaaggaaataaacagcgagtttcctgttatcttgctttatatgagggaagcaaaagcattccggacacggagaacaggcggaaaataagctgcctgcaggtgtgaatgcgtcgggatgcggtttcccggatgcgataagacagtgtaccgataatgccttgatgggagaggcttctccggaacaagggaggaaatggcgaatgaaggtgaacaatcaatggatccggggtatctggtctgatgacggcggaaagaccgtgtgctttcctgatcagacgaagctgcctttccggctggaaatctgccgtgagggaacatcagatgcgctgatccgcgccattaaatccatgcaggtccgcggagccccgctgatcggggcggcaggagcctgggccgcggcattcctctgccgcgaggcggagactgaggaagagcttcaggaggggctgaaacggatcgcggaggcaagaccaacggcagtgaacctccagtgggccgtccgtcgggtagccgcagcgtcagaggggctttcaggggctgcgagggcagcgcgcgcacagaaggcggctgaggagatatgcgagtcggacattgaatccaaccgggcaatcggcgggtactttgccgccattattgaagaggtttatcgaaagaatggacgtccggtccggattctgacgcactgcaatgccgggtggctcgcgacagtcgattatggaactgcgctctccggtctttatgtggcgcaggagaaagggattccgatggaggtctgggttgatgaaacccggccccgcatgcaggggctgctcaccgagtgggagctccgcgaagcaggcataccctgcacactgatcgcggataacgcgggcgggtatctgatgcagcagggcgaggttgatctcgtcattgtcggagcggaccggattgcgtctaacggtgatgtggcaaacaaggtcggtacgtacctgaaggcgctcgcggcaaaggattgcggagtgccgttttatgtggcggcacctgtttccaccgtagacttttcgatggcggagggtgtgaagagcattccggtagaggagcgttcccggagcgaagtcaccgatatatcaggtatcggtcctgatggggacgtgatccgcgtgcaggtcgcggggcgggagactgcggtaagaaatatcgctttcgatatcactcccgcgcggcttatcacgggaattgtgacagagaaggggattttcgcccctggtgcgggagaccgcccctttatgccggcccctgccgggacgcgtccggagtgaagaatgcaggagaaagcgatgattcagacggagtttcctgtagacactgaggtgcttcggagccgcattattgagacggcacggtccatgaatacccagcgcctgaacgtgaacaaatccgggaatgtgtcagcccggtgccgggcagaaggcggcgcactggcattcctgatcacgccatccggcgttccgtacgacgatctcacgccggaggatatttcgagggtgacgcgtctcccgaccggcgagtggcgggatgaggggccgctgctgccttcctccgagtggcggcttcacgcggcggtctatgagtcaaaacctgaagtccgggcgattgttcacacgcattcgccgaaagctactgcggtttcctgccttgagtcaggcattccgccgtttcactatatggtggccatgtcaggggcggcggagattccctgcgcgccgtatgcaacgttcggcactgaggcgcttgcggaaagcgtgacaggtgccctgagacactgccgggtctgcctgatggctcaccatggggtgctggcgacgggttctggtctgccgggggcctttgcgcttgccgtggagacagagaatctcgcctcgatgtatctcgatcttctgcagctcggggacgtccggctgctccccgaggatgagatggcgcgggtgctggagcgcttcagaacatacggccagccggggaggaaagcgtgatggctcaggagtttgagaaaaggcctgacggaatgccgctctggaaggatgtgtcggggaaaaacgtatcctgcacggaaaaggttaaagtgctagatgaaaactaccgcgagctgcgggaatcggtttccgcggcgctcgatgacgcggtccttattggatgccgggcggacgatatccggaccattctgaaagagatgatttcagaggtcgaaagcagctatccggatgcccgcccggagaaggagaagtgatgatgctgagcaggcggactcttcttaagctggtggcggccggtgctgtgccggcctttgctctatgcggctgcgcgcatccgcagatgattgatctgggaagcacagaatcccaggtggtggagaagctcgggaaaccggattccatcacagccatgcctgacggcacgacccgttacacctattccctgcagcctgaagggcaggaagtctggtggatgttctttgataagaacgggcgctttgtgaagcgtgagcaggcgctcgttgaagagaacttctaccgcctgatcaagccgggcaagacaacgatcgccgatgtctatcgactcttcgggcactgcacgaagatttttgacttcaagctgctcaaccagtccgcctacatgtaccggttccaggatgcgtcccgttcggatgtggtgctctgggttcagtatgggcgcgacaacgtggtaaccgagtggacgatttccgaggatccgaggaagaatacccggttcccgatttactgagaaaaaaagaaagccctgcggggaaataatcccggcagggcttcagaaccggtccccctgaaaaagggggatggatcaattactgctcgtcgtgatgatgctcgttgcgcaggcggatgtgcagttcgcgcagctgcttctccgtcaccggagccggagcgtgcgtgagcaggcactgggcgcgctgcgtcttcgggaacgcgatcacgtcgcggatcgaattggcgccggtcatcatggcgacgatacgatcaagaccgaaggcgataccgccatggggcggcgcgccgaacttcagggcgttcagcaggaagccgaacttctgttcagcctcttcaggcgtgatcttcagagcgctgaagaccttctcctgcacgtcttccttgtggatacggatggagccgccgccgatttcccagccattcagcaccatgtcgtaagcctgggcgtagcagtgttccggatccgactggagcttgtccacgtcttcgggcttcgggcaggtgaacgggtgatggcaggccatccagcggttttcttcatcagaccactcgaacatcgggaagtcgataacccagagagccttccagccttcggtgaagaggccggccttcttgccgaactcgctgcggccgatcttcagacggagagcgccgagagaatcccagacgatcttcttcttgtccgcgccgaagaaaatgacgtcgccatcattcgcgccggtgcgttcaatcacggcattcaggaactcgtcggagaggttcttcacgatcgggctctggagaccttcgcggcccttcgccttttcgttcaccttgatgtaggcaagacccttggcgccgtagatcttgacgaactcggtgtaggagtcaatctcggaacggggcagctggcagcccttcggcacgttcatggcgacaaccttgccgttaggcatggctgcggcattggcgaacaccttgaagctcgtgtccttgcagaggtccgtgatttccttgaactcaagggagatacggaggtcaggcttgtcggagccgtacttcgccatcgcgtcatcccagcgcataaccgggtacggattcgcgagttcaacgccgagcacttccttaaacacaccgcggaccatcttttcgaacatgtcgcggatttcttcctgcgtgaggaaggaggtttcaatatcgacctgagtgaattcaggctgacggtcagcacggaggtcttcgtcgcggaagcacttgacgatctgatagtaacggtcgaaaccggcgaccatcagcatctgcttgaagagctggggagactgcggcagagcgtagaagcagccttcttcaacgcgggacggcacgaggtagtcgcgggcgccttcaggggtgctgcgggtcagagccggggtttcaatatcgatgaagccatgctcgtcgaggaagcggcggaaggccatagcggtcttgtagcggaggcgcagattacgctgcatcaccggacggcgcaggtcgagcacgcggtaggtcaggcgggccgtttcagagatgttgtcgtcatccaggctgaacggaggcgtcagagacgggttcagcacttccagatcctggcagagaacctcaacggcaccggagatcaggtcgtcattcttggtgccttcaggacgggagcgaacgaggccaaccaccttgaggcagtattcattacggaccttgtcggcagtattgaacacttcaggacggtcagggttgcagacgacctgaacgaggccttcgcggtcgcgaaggtcaataaaaatcacaccaccgtggtcacgacggcgatgaacccagccataaagggtgacggtctgcccgatgaatttttcatcaaccaaacccgaataaacggtacgcatagaagctccgggtcactaacaatagctgtttgcaaaacagctgaacaaaactgtgctgcgctgtgcgcagggttccgcagggagcccggagcgcaggcagcaactcagaaaagaattctttgacaagtttagcgcttgaacgcctgtccagagtaagaaaggcgaaaatcaggccttgacggcgtcatcagactcatgtttttcgcttcccggcacgacaacccccatggaaacatggaacgtgaatgcctcttcaattccgaagctcgtttcgcgggtttcggattcggggacgaagatcacgtagcctgaggtcgggttcggcgcagtcggaacgaacaccgtgaggaagttttcctcggttttcgcggcagagcggatcgtgtcaggcgctttgttcaccacaaaggcaagtgtccaggcccctttgcggggatactccaccatgacgaccttctgaaagctctgcgactgctggctgagaaaggtgcttgcgatttttttgatgccgctgtagatcgggtgcacgatcgggatgcggtcgagcagcgcttcccaccaggaaacaatctttttgccgagaacgttggcgacgatgacgccggtgaggaagatgatgatgacagcgaaaatcagcccgagacctggaatttttgccagaaaggcgggcagctgctgcgtcggaagaaagacgagaagcctgtcgctgaattcaatgacgctgtcgagaatccagacggtgaagatcagagggatccagaagaggagccccgcggagatgaactttttgaacatgtctgtaatgaaaacaaaagcgtcaggatccgggcctgttattcagggacgatcgagacgcatttgctaaggcctcaggggcggaacgcatcccgcctctgctgctcacttgttcttggtgtgggcggccgcaaccccggtatgaccggcattgaagtccgtcgcagcccagcccttgcccttcagctcgaaaccgggggcagacagctgtttcacaaacgtgtctttcccgcacttcgggcatttggtcagaggcttgtctgacattttctgaatgatgtcctcttcaaagccgcaggaggaacacttatatccatagaccggcataattcctaaaaatcctacagaaacagaaagagcctgtctttcaagacgggctgttgcgtcattatgacgcaattgccgcaggactgcttgcagtacacgtacaatattttggtcacgcaggagcaataagaggcagtcatgaattatccccggtttaccaaaccgtccactccggaagaacgggacgagtttttacctttcctgaagcgtctggcggatgccgcgctgaaggtgattctgccgaattttctggccggaatccgggtggatgagaaaagcaaccatacgcccgtcaccctcgcggaccgtggggcggaatctgctatgcgccggatgattgaggaaaattatccgcagcatggcatttatggcgaggagctgggaatcaaggaggctttcggtcctttcccccgttatcgctggattctggatccgatcgacgggacccgggcctttatttcaaacagctttcatttcggaaacctgatagcgcttgagcgcgatgagggaaacggttttggcccgattctctcctctattgcctttccggctgccggtatccgggctgttgggtggcagggcggcgcggttcttcatcgcaatgcgcttggcatcacttctgaaaatcccatgaaggtccgcgaatgcaatcgggtagaggatgcgacgctcctcgtgacctctcactggacgacatccgagcaggtgggggacagccgcatgcagacgctgatcgaccgcgcgaagctctaccggacctggggcgactgctttgggtatttcgccgtggcatccggcggtgcggacatcatgattgatccggatctctcgtactgggatgtggctgcgctgatccccgtggttgagggagcgggcggtgtcatcacaagcacttcaggcggcaaccccctgaaagagaagtccgctgtctgcacggcaggcggagcacttcacgaggaagtgctccgggcgctcaacgcttaagctttttcgcttttccccgcgggtttcagggggagtgtgattgtgatcttcaggccatgcggaaggatattttccgcatggaccgttccgccgtggtgctgggccgcctgcatggtgatcggcagccctagcccatagccggatccggtcgcctggttagcgcctctgaagaaaggatcaaagattttggccatttcttcctgcgggatgccggggccttcatcctgaacggaaatctgaagcgagctgtcggacaccatcccgccctgaatcgtcacttttccgccgtcaggcgagaaccgaagagcgttgcggacgacattctcaatggcgtgcgcaagcagatcggcgttgccggtcatgatgagatcatccttcggaaggtcgcagatcacctgaatcttccgcgcatccccctcaagcgacgcgttatcggcgatgtcttccacaatctcgctgacatcaatttccgagaagggaatagagacttcggcgttcagccgtgtataggtgagcagatcgccgaccagtgagtcgagcttctgcacatcactctcaatccggtcaagcattttcggcgtgatatcgggggagcgccgggcaagctcaaccgcacagttgatccgggcgaggggcgaacgcagttcgtggctcacactgtggaagaggttctgctgccggtcgatcagctgctggatggtggcggccatcatatcgaactttttggcgagctctataaattcagagctgctccctttgacactctctgaaatccggacattcaggtcgcccgaagcggcctggaccatggccccctcaatctgtctgagcggccgtgtgagccgccaggccagtcccgcggccacagcgctcgcaaccaggagcgaaatgatgcaggtgagccaaagcggagcgccgtggggcgcgaagagcagcacccgggtggaatccttgaagaaattcaccggttttcttgcggtgaagaccagtatttcctcaccctcgatattgaaagaccggatgccgagcgtgttgcccccctgacgtaccagggcacgcgcgcgctccagcgcgccgttcgggattttgtgtccgccaagatcgtggtctgtgctgtcgaccgcgtacacacgggcatggtccggaccggggttctgattctgaagccagcttgtgagagccggtttcccgccgagagacacgacttcctccgcgaatatcacccggtcttcgcccggatgattaaggagcagagtatggtccggattcagaaaaccccaggcgacggcgaataccaaaaatccggacagcgtcatagcgacgatcagacccgcaagggtctgccagaagaaggtgttcgccttgaagagagaaagccgcgtttttttctgcatagagatcagctggcggagtcgtccagcaccgacatctggtaaccgaatccccggatgctcgcgatggagatcgcgggaccgacagcgtcattcagcttatggcggagcgcgctcacatggacgtcaatcgcccggtcgtagcggcccatgtcccggccgagaacctgcgtatagatatccgccttggaaacgcgctgaccgagattccgcccgagcatttcaaaaagcgagaactcggtcgatgtcagctcgatattctttttcgtcgcggtgacccacacgcggcgctgtgccgggttgacggtgagaggaccgacaacgagcggcgtgacaggggactcctggctcgcggtgcggcgcagaatagcgcggattctcgcgaccagctcacgcggcgtaaagggtttcggcacatagtcatctgcgccgagttcaagcccgatgatcctgtccgcgggatcgcctctggctgtcagcataatgaccggaatatgagagtgctcgcggatcttggcaagcacttcggttcctttcatgccgggcatcatgacatcgagaatgacgagatcaaaattttcctgcgacagcttcagcagcccatcctcaccgttataggcaggggagggagaaaaaccttccagctgaaggttatcggtgagaagggaaacgagatcggcgtcgtcgtcaataataagaatcttggtagcactggctggcatctttaacctctgcagaaaactctgcaaaatcccggttgaacatcataagactttaatcatggctatacgccagaatccggttttagggcgaattaagcgtattacggggctgtttttgacgaagatccctgcaccgaggagtaaataagtaattcctatgcaggggaatcacctccccctgatttataataaacagaagtttcggtttacagactgggaatttaatgctggtcctgctgttggtgcggcaacccgaaatcagttgaaagaaagggttagcgagagtcggtcctccggtttttgctagagcccgaattgtcacgagaattccttcgaacagaagatcactcacaaatgcctgaaaagacaatcacggttctgcttgttgaagatgacgctgaagttcggcgccgttttgaaaccaccattaatcaagaccctatgatgaaggtcgtcggctttgcttctactaagcatgaagctcagcagctgatcgagactctggattttgaggtcatggtgatcgatctcggcttgcctgacggcagcggcatcgatctgattcgcctagcgaatcgcctccatccctcctccgacatcatggtcattacggtttatggcgatgaacagcacgtggtgagctcgatcgaggcaggcgctaccggctacatcctcaaggaagccgatagcgaagatatcaccggccagattcggctgctgcgaggcggcggatctcctgtcagcccgtcagtcgcgagaagcgtgctccgcgcgctgcagaatcatccgaccggcaatggcatcgttcctgatgccgaaccgagcccgctttctgcccgcgaaacggaaattctgcatcttctcgcgaagggtatgagcttcaatgaaatcggcgagattctgacgatctctccgcacacggtgaccgctcatatcaagaagatctatcgcaagcttcaggtccattcccgcggtgaagccgtgtatgaagcgagccagatgggactgctccataactgaccccctcttgatctggccgcaggacgcgacgcgtgggttcttatccaatctggatcctaatcctcatcaatctaaggcatctcgttttcggagctgccctggtggggatttttgcgtccattccccgtctgactgagacaactggccgccgcaccgcggcggcggtgcttttgggcgtcagcgttgtaatcgcggttcttctgagtccgcctgccgcgcagctgcagacgcttggcggaatccccggacttctgctgctcgttcttggcggcgcggccgcagcggcagccaggttgaagcccggtatcggtctctttttccccgtttttgcctttgcctcttatcttgccggatttgtcacgcttcttctgacaggccgccccttcgcgctcgtgttcggtgagtgcgcggcagccttcagcgcggcggcctggggtattgcggtggctgaagagcaccgtgaaaaggaagcgaaggcccgtctctctcagattgagagcgcagcgaggaaagatgcggagtcagagagcaaagtcatttcagcagctgtcgccgaagcggtgcagaaagagcgtcagcgctacattcaggatatgcatgacgggctgggcgctgagttgatttcgacgctctccgcggtcaagaatggcaatctcccgaaagaggatattgaaagtgccctgcagtcctgccttgatcagatgcgtatcgcgatcgatgcgagcggagtgagcacagaggatttcggcactgctctcgcgaatcttcgctaccggctcgcgccgagactcaaggcggcgaagctggagctgaagtggaacacgctttcgcttcctgatgaactgtcgctgccgccccagaaggcccagtgcgcgctccgcatggtgcaggaagcgctgacaaacgcgattaagtacagccaggcgacccgtgttgaagtagccgccaggacggaggacagcaggctgctgctttccgtgacggataatggcgtcgggttcaagcctgaggagcctgccgcggcgtcagctaccggcagcggtctggggctgaaaggcatgcgccgccgcatagaggaatgcggcgggacgctgtcaattgagagcccggaaacgggcggcgcctctgtcaggctctcactgccgctttaaatcatttatccagctgcggcgcgggagaatccgatacccagtgcccgctctttccgccggccttatccagaagccggatatcggaaagcaccatgccgcggtcaatcgccttgcacatgtcgtaaatcgtgagaagaccgacctcgactgccgtaagcgcttccatttcgaccccggtcttgccataggtctcgcaggtcacacggcagacaatgctggaggcttccggatgcagatcgaactcagcgctgacatgcgtaagcggcagcgggtggcagagcggaacgagttcggaggtttttttgctcgccatgattgccgcaatgcgggcaataccgatgacgtctccctttttcgcgctgccggacgcaatgacctggaaagtttccggctgcatgcggataacgccctgagctgttgctgatcggtgagtaatcgatttctctcccacatctaccatgtgtgcctgtccctgggagtcgaagtgtgtcagtccgccgttctcagtcattttgtcgaaaattctcactaaaaaggtacaaaatccagcagtcccccgccggcaatcttcttatgataattgagtttgtaagcgagtctccgtctctgcaaaactccaaaggatccgtatgaagccatggattgctgttgccgcctgctgcctcatggcggcctctctgccggccaaaccgcaaatgaccagtcagatcaatctgccgtcgctcggtgcgccggccggctcaggagaactgtctccggctgacgagcggaagatcggcgagcagtccatggaggagatccggcaaagcccctattacctccatgatcccgatattcatgaatatctgatgaggctcggttaccggctggtcgctgccgcgccggtgacgccgtacagtttccagttctttccgatgaagcttggggaaatcaacgcttttgcgcttcctggcggtttcatcgcggttttcacgggcacactggtcgcggcgcaggacgagagcgagctcgcgggcgttatggcgcatgaaattgcccacgtgacacagcgccacattgcccgcatgctcgagaatcagaagggaaatgtcgcggcctctctgggctcattccttctcgcgattctggctgcgtcggctggcggcaattcgggcggtgacgcggcggccgcgatcatgatgggcggccaggccgcgctcatatcgaatcagctgaaattctcccgcagcgcggagcaggaagctgaccgaatcggtttccagattatggtgcgggccaatttcgacccgaacggcatgacccgcttcttccagaggctcctgcagcgcaccggcccctatgaagcgaatgcctcggcgtacctgtctgatcatccgctcactgttgagcgaatcgcggacatggaaaaccgggcgcgcgagctccagcgtccctttatccggcatgacagctttgatttctatctgatgcaggcacgagctctggtgctgcagtccggaagctcagccggccgggattcagcgaaggttcagttccagactgtgctgagtaaaaaggcgaccggggtgcaggccgcggtagcgcattacggactctcggttgtctatgcgctggacggcgacgcggcacaggcgtacgccgaagcgcagaaggctgtccagatggcaggcagaaatgatgtcttcctgcagaagaatcttcttcagacccgatacgcgatggcagccgataagaagccggtgctgaaagaaatcgctgcgctcgcgaacgataatccgctttctgtcatgctcgcgaagacctacatcgaggatctctatgagcaggggatgcatgaagagattctgaaatacctgaagggtcagagcgcgatatcccaggataacgcggactatttccgttatctcgcgaggtcaagcgaggcactgggccggcggagtgaggccttccgggcgaccggaaagatgtacgcgctgcagggcgactggaagatggccgcctatcagttcaagcaggcgcagcgcgtgtcggacggggatttcttcacgatgagcgaggtggatgcggatcttcgcgaagccgaggaccacctgaagcaggataaaccccatcattaattagttgttttagcgcatgtgctcggggctaaataatgcgagaatacacccctacgcgtatttttttacccaggcgaagcctgcggctgaaccgctcccggacggggagcgcctgaactcttatatatcaacagaaatggctattaaagattacttgaccgttgcagagcggactgacgaaatcattgaaacagacgtcgttgtcgtcggtggaggtccggtcgggctgtttcaggttttcgaactcggtcttctggagatgaaatgccacgtggtggattctcttcggaatgtgggcggccagtgcatggagctctacccccagaagccgatttacgatattccggctgttccggtgtactcgtcggctgagctgactgaaaacctgctgaagcagaatcatcccttcaagccggtctatcacctgggcgaagtcgtcacgaaggttgagaagcaggaggacggttccttccatgtggaaaccgatctgggcacccgcttccactgcaaggccgtgatcatcgcctccggtatgggctcttttgatgcccgtccgatgcgtgttccgggcattgagaagttcgagaacaagcagctcttctatcgggtgcgtgatccggaattcttcgctggcaagaacatcgtgatctgcggcggcggtgactccgctctcgactggacgctgaatctcgtcggcaaggcggagagcgtcattctgatccatcgccgcgatggcttccgcgctgctcccgcccgtgtggccgagatgaagcagctctgcgaagactggcagatgcagtttgtcgtgggctcggtgacgggtttcgaagagaaagacggtgtgatgacggaagtccgtgtgaccggtaacgacggcattgtgcgccgtattccgctcgactgcctcctcgtcttcttcggcctgcagccgaaggtgggcccgatcgctgaatggggtcttgagcttgatcgcaagcagatcgtggtcgataccgcccgttttgaaaccaacattcccggtatctttgcggtcggcgactgcagcacttaccctggcaagaagaagctgattctgtccggtttccacgagtgcgctctggcggccttcgcggcttcccagtatgtgttcccggataagaaggtgttcctgcagtacacgacgacgtctccgaagctgcataaggctctcggcgtgccggatcccgcccatcacaagggtgaagagggctctgaagagtaattctcttccggcctcagcctgagacaggcatagaaaaaggcttccctcacgggaagccttttttcattcagagcgtcatcaggccttgggggccgcgttctgaaccgtgaccttcggaatgccggaggagaaatccttcggcgtttctgagagcgctaccgcggtctttctcgcgatggcacggaagatctctgccgtttcgctgtcgggctcagcgagcaccgtcggatgcccggagtccgcgtcctcgcggatgccgcgctcaagggggaggctgccgagaaccggaacaccgtactccttggacatccgttccgctccgccttcaccgaagatccgctcaaggtgaccgcagtgggggcacttgaagagcgccatgttttccacaatgccgagcacagggatattcaccttgcggaacatcatgagtcccttcacggcgtcaagcgtcgcgatgtcctgcggcgtggtgacaacaatggcgccggtgaccggtacctgctgggaaagcgtgagctgaatgtcaccggttccaggcggcatatcgatcaccagatagtcgagatcgtgccagttcgtctgctgcaggagatcgcgcagggcggaggagaccatcggaccgcgccagataacgggatcggccggattcaccatgaagccgatggagttgatctgcaggccgttcgcttcgatcggttccatcgtcttgccgtctttcgactgaggagtgccggaggcacccagcattgtgggctggctgggaccgtaaatatcagcatccagcacaccaaccttggcgccttcagaggcgagggcaagcgcgagatttgccgtgacggtggatttgccgacaccgcccttgccggaagaaaccgcgatgatgttcttcacgttcggcagcacgcggagcgtggagcggactttgtgagcgcggatgttctgccgcacctccacttcagaatcgatgccggcagcgcgcagcgcgtcttcagccgcttttttaatcagttcaatctggctttttgccgggtaaccgagctcaatgatgaccgctccggggagaacggaagcgatttcaccgctgtcctggagtcccttgccggtattgggatcaatcacgccgttcagcacctgggcgatagcttcttttgttgccgtcatggctcttccttctgttgaagaacgggatgcccaattatgtcatttcactaaaaaatgcatgagtctcaaaagaagtaagcagcttggggatataaaatagaagatctatttaatttttctgtgacagctgcgataagacagagacttatgacgaagcgcaatatttttgtaacgacggcactgccgtatgccaacggccccttccatatcggccatatcactgagtacattctggctgatatctgggtgcgtcatgagcggatggccggcaaccaggtttattttgtgggtgctgacgatacgcacggcgctccgatgatgatcgcggctcagaagaagggtgtcacgcctcaggagtttgtggcggaaatccgtgccggccgcaagcagtacctggacggcttccatgtgaagttcgactggtggcacacgactgactcccctgagaatgtcgagctttcccaggacatttatcgccgtctgaaggccgcgggactgatctacagcaaggagatcacccagtactacgacactcagaaggggatgttcctcgcggaccgctttatcaagggcaagtgcccgcactgcggcgctgaggatcagtatggcgacagctgtgaagtctgcggctcggtctatcgcccgactgagctcatcaatccgtattcggttctctccggcacgaagcctgagcttcgcagttccacgcactatttctttaagctctccgatccgaaggctgtgcagttcctgcgcgagtggacgagcggcaatggcgctgacggcaagccccgcgtgcagcctgaggtgctcgcgaaggatcaggagtggctcggtgagggtgctgagcttgaggactgggatatttcccgcgacgcgccgtacttcggcattccgattccggacgcgccgggcaagtacttctacgtctggctggacgctccggttggctatctcgcctctctgaagtcctacttcaacagcatcggcaagaattttgatgaattcctgatggatccgaagaccgaacagattcactttatcggcaaggacatcatttacttccacacgcttttctggccggcgatgctgcacttcgccgggaagccctaccgcgtgccggatcacatctacgcacacggtttcgttaccgtgggcggtctgaagatgagcaagtcccgcggcactggcattgatccgctgaagtatctcaatctcggcatggatccggagtggctgcgctactatctcgccgccaagctgtccggccgtgtcgaggatatcgacttcacgaagcctgacttcttctcccgtgtgaattccgatctgatcggcaagtacgtgaatattgcctcgcgctcggccggcttcatcgtgaagcgctttgagggccgcgtgctggattccgccatgtcggatccgctcctgaaggcgctgcgtgaagatgcaccgaaggtagtcgagctctacgaagaccgtgagtatgcgaaggccatgcgccttgtgatggaactcgccgataagacgaacgagtacgtcgatcacatgaagccctgggaactcgccaaggatccggcgcagtctgagaagctgcacgaagtgtgctcggtctgcctggaggctttccgcattctcacgaactacctgaagccggtgcttccgggagtggctgagaaggttgaggcgttcctcggctgcggtgaactcacctggagcacggtggatacgccgctctcctccgctaacccgattcagcccttcaagcatctgatgcagcgcgtcgatatggagaagcagctggatcagctgatctcagaggtgaaggaagaaccgaaggtggaagcgctgcctggcggggaagccattgccccgacctgcacgattgatgatttcgcgaagcttgacctccgtatcgcgaaggtagtggcgtgcgaagccgtggaaggctccacgaagctcctgaagttcacgctcgatgtcggtgagggaaagacccgtacggtcttctccggcatcaaggcgagctacagtgagcccgcgcagctggtcggcaagctgatcgtcatgatcgcgaatctcgcacctcgcaagatgcgttttggtctttccgaaggcatggtgctctcggcggctgacgcggatcagaaagctaccccgggattcttcctgctggaacccttccccggcgcaaagcctggtatgagaattcactgatgagaagtgcgccccgccggggcgcatggatcgcagtgcaaagccctgctcattcacttcagatgagcggggctttttgctttctagagaagtgtttcttcgcggtgagacagcgtgagccagatgggggcaaaaggcgccgcctgcgtgatgcggatcattgcttctttcgcgagttcaaggatcgcgagatagctgacaagagcgtgggcaaaggtcggtgtgttttcgaagacatccgtgaattccacgtaggacctcgtctgaagctgtttcagaatggaggacatatgttcgcggacagaaagttcctcgcgggtcacagtatgccgctcctgcagcttgatccgggccatgacggagcgccaggcgcgccgcagttcatcaagtgacacatccgggagatccggggcggattcgggtttgctgacatccaccgggctgaaatcccggccgctgatcggcaggcggtccagctcctgggccgcgagtttcatcttctggtactcgatcagacgccgcatcagttcggccttgggatcttccacttcctccccggtatcggctttccggagcgggagcagtagctggcttttgatcgccatcagatgagcggccatgacgaggtagtcacccgccagatcgagattgtttttccggatcagttcaacgtactgcatgtactgctcggtcagcgtcgccatgggaatgtccatgacgtcgaacttctgcttctggatcagccagagcagcagatcgagcggtccctcgaaggattccagaaacaccttcagagcgtcgggcgggatatagagtccggccggcactttatccagcggcttgccgtaaaggagggcaatcgagtcgctttgggagaggggcagtgtgttgtccaatgtctgttccataaggaaaaaacacggccggatgccgcgaaggcatctggccgtgcttggtcagtcaaaactgatcgcagatgccttattcgtaatcaggcgtgtacatgttgtcggtgacaaacttctcgatgtcagccggagcctcaatctgagcctgcccggtcgccagcgcgagcttgatgatgttcacggcaacgaggtgagaaatctcacggacgcgcgtgagggacgggtagagcgagccatgagccaggtcgtcttccgtcaccatatcggcgcaggtgtgagccgcagagaggaacacttcctgcgtgatttccttgcactgggcgagaatggcgccgagaccgatgcccgggaacacgtacgaattgttgccctgacgcggcacgtaggtcttgcccttgtaggtcaccggatcaaacggggaaccgcagctgaagagcaccttgccgtcagaccaggtgtaggcctgttctgccgtgcactcggccttggaggtcgggttggaaagagcgaagacgatcgggcgctcgttgatttcagtcatggccttcacgatcgattccgtaaaggcaccggactgagcggagagaccaacgatagcggtcggacgcagcgtgcggatggcttcctcgaaatccttcaccgaggggatatccttcgcgaacggcagcttgtgggccgcgagcgtatcaccgcgggtcgtggtgacgagtcccttcgagtcaaagagatacagacgggcgagggcgtcttcacgggagagaccatcctcaaccatggcgtcagcgatcaggccggcaacgccggtagccgcttcaccggcaccgaggaagagaatcttttcattcgacagcttggacttcttggcgcgcatggcggagaagaagccggaaacgacgatggaggccgtaccctggatgtcgtcgttgtagcagcagtagcgggaacggtagcgggcgagcagatcgaaagcgtggttgttgccaaagtcttcgaactggacaacgcacttcggccacttcttgtaaaccgactggaaaaattcctcgatgaagtcgtcgtactcctgaccgctgacacgggggtgcttgtgtccgaggtacagcggatcgttgagataacgttcggtgttcgtgccgacgtcgaggataaccggcagcgtgcggcggggatcaacaccggcgcaggcggtgtaaagggcgagcttgccgaccggaatgcccatgccgttgatgccgaggtcgccgaggccgagaatacgctggccgtcagtcacgacgatcatgtcgaccgcttcctgcggaagattctcgaggatctcgctcacgtggcccttgtcttcgatagacaggtagaggcccttcgcgaagcggaagaggtggctgaacttctggcagacttcgccgaccgtcggcgtatagacgagcggcagcacttcttcgatgtgctcgaggagcagtcggaagtacagcgtttcattgctggaccgaagcccatcgaggaagagcgccttctggaacggcgtatcaaacgcgcggagctgttccatcatggcttcgacctgcatagagatcgtggccggaaccggcggaaggagtcccttcaaatggagggcagcgcgctcttcttcagagtaggcggttcccttgctataaactccgttctgcaacagcgtagtaccggttaaattatgagcacccataacctttatccttaatttaacttgcttgataactatggcttaagcctgagcagagaacactgcacaagcataaagataaccaccgcaatgagctgcagaaggggtgcagtcgctattgcggtgtaatacctctctttttttatggggcgaagagtcgccccctctgagagtggatgtagtttagcgcgccttctttttccctgctttgcttgtcttaggcgcggcttcgggttcgggcggcagcgcggccttcagttccttctgtctctgagcggcgagttttgcctgttcagttttcgggaaccgcttctgcagtgaagtgagggtcgaatttgcggcgcggatgttgccaagcgcggtctgcgctgaggccagagaaaggagcgcgtccggagtccgggtggaattcgggtactggcgggtcaggcgatcctcaacagcggctgcttccttgtacttctggagcgcgaagtaggcgttgccctgccagtacatggcttcaggcagataggtggactgcgggtagcccgagatcaggctcgaaaaggctttgacactgtccgcgtactgaccgctctggaaggaggagaggcctctgtcataaaaccccttctcattcgaggctgccgcggcctgcccctgggcagcgggatcggatcctggttcaccagccggagcgttctgcgcggcggtttcagctttcgccacgcggccgtcaagctttctcagacggctgtcgagatcggtgtagagatcccgggaatttttttcctgctgggcgatccggttttcgagtgtttcaagacgtccggagagaacggattgccgttcctggagacttgcgatctgatccgacagagcgaggctcgctttctggccattctccagccggctgatctgagcctgcatggtaaccatgtctttccgcatggcgttgatggcgatgcgggcgtcattgtcttcaaaaagcgcctgagcgctggagacatagccaaggccggcaatcatggcggcggctagcggtaaaaggcggcgattggacattctttcgaacctcatcctgttctgtaaaaaagcagcccggaaccaaaggatccgggctttggatcagcgaactatcaacggtagcggatatcggcgcggcggttcttcgcccaggcttcttcattggaacccttggcgagcggcttttccttgccgaagctcaccgcttccatgcgggtggcgggaacgccaagcagcttcagcttggagatgacggcctcggaacgcttctgaccgagtgcgaggttgtattcgctgctgccgcgttcgtcggtgttgccttcaacaacgatgttgcggttctgatggctcatcagatagtttgcgtgagcggacagcatctggtcgtactgcggagcaaccgagtaggaatccagggcgaagtaaacggagcgctgagcaagcgggctcttcgggtcattcagcggatccacttcaacagtcttcacggcgctgttatcgacagtaacgccctgaccattctggctgcctgaggtggaagcagcggtcgtggtcgtgccggcggtcttggctccgtcaacaggaacagaagagcagcctgcgaggatgccggcagtggcgagcacggcaaccagggtgcgaactgaaaattgcattttatgtttctccaaaggaaagaaggacttcctgaactatcggatcaaaggtccccaggcgggttcgcggatgcttccaccgcggctgcgaagccgggacgacatgcttccgtctgcgctggccatagcgagaacaccctgcctgccggagactgttgcgtaaacaatcaattcgccgttgggcgaaaaacttggggattcatccccgctggtcttggtaacggccatgttgctgccgcttgcaagatccagcacgttcacctggaatccacctctggagcgagcaatatacgccagctttttgccgtcgggcgaaagcgccggactgacggcgtagccgacagagaatgtgacgcggctggccttgccgcctgagaccggtttgcggtaaatctgaggatttccgccacggtcagaagtgaagtagatccaggcaccatcagggctgaagacaggctcggtattgatgccggcccctgtcgtgaagcgggttgccgaaccgccgcgggtgctcatcagatagatctgagtgccgccgtcgcgggaaagcgcaacagcaagcctggatccatccgggctgaatgccggagctgaattgttgccggggaaattcgccaccacgcggcggtgccctgacatcagttcgtggatataaaccaccggtttccgggattcaaatgagacataggcaaggctcgtgccattcggggcccaggtgggcgaaatgatcggctcacggctgcggagagcgacgcggggattctcgccgtcgctgtcagcaatcacgagctcatagacacctccccggttctgcacataagcgatccgggaagcaaagcagccgggcgtgcctgtcagcctgaaatagattctgtctgcgatctggtgcgccgccatgcggaggttgccggtcgtgctcgtattgacgaaattgtcgaggagcttcccgctcaccacgtcgagcagcttgcagctgatttcccagcggccggcgccttttggcgcgatggagccgataactgcggcattgctgttttccgctcggaacgcctgaggatcgggattcagcacctgcgcataggacacctccgccgtggatccgacctgacggaatttgcctgatctcaccagatcagccgcaataacggagctcaggctgccaggagctgaacccgtaccggaaaaagccggaaccgaaatggggaaaagctgggagccaacgcccgtgatttcaatatcgagctgcgcccaggcgggcaggcttagcagaccgagtccggcagccgaagcggcaagaaaagcgcggcggctgacacctgcttgtttattggcgaccatagagatgcttccaaatacaaaaaggagacagataactgtctcctcatgctactacattgaaaaaagcctaaagcgcggtgccgcttcaagtcgtgactttttgttaccgcgcttcggctcctttctgattagtggcggaaatgacgttcgcccgtgaacaccatgacgatgccgcgttcatcagcggcagcgatcacttcagggtcacggatcgagccgcccggctggatcacgcaggtcgcgccggcgtcacagatcacgtccaggccgtcgcggaacgggaagaaggcgtcagacgcggcggcagagccgacgagcgacagaccggcttcctcagccttttcctcagcaatgcgggcagagtcaacgcggctcatctggccggcgccgacaccgagcgtcatgccggcgtggacataaacgatggcgttcgacttgacccagcggcagacgcgccaggcaaacatcatgtcggcaatctgctcagaggtcggctgcttcttcgtcacaaccttcagagcgctttccgggcagatctggatatccggggtctgaacgaggagaccgccgccgacacgcttgaagtcgaagtcgttatgggcaccgccgttcgcgacaacgaggagtcggaggttcttcttctcgctgaggagcgcgcgggcttcagcggagaaggacggggcgatgatcacttcagcgaactgcttgctcacgagctgggccgtttcgaggtccacttcgcggttgaaggcgatgatgccgccgaaggcagacttggagtccgtcttgaaggccttggcataggcttcagccggattgagacctacagcggcgccgcacggattggcgtgcttgatgatcacgcaggccggcatgtcgaaggagcgggcagcgtcccaggcggcatccgtatcagcgatgttgttgtaggagagttccttgccatgcagctgggtgtagccggcgaggagacccggggcgacctgctgttcacggtagaaagcggcctgctggtggggattctcaccgtagcgcatatcctgaaccttgacccactggcggttcagcacatccgggaacttggtggccggcttgttttcggcatcgaggctcgtgaggtagttggtgatcatgccgtcgtagcgggcggtatgagcgaacaccttcttcgcgagggcgagacgggtcttggcggtcacggcaccttcagccttgatctcctcgacgatcttcgggtagtcagccggatcaacgacaactgcgacggagccgtgattcttggccgcggcgcggatcatcgtggggccgccgatgtcgatgttttcgatggcgtcagcgaacgtgcagttcggcttcgagatcgtctgctcaaacgggtagaggttcacgacgacgaggtcgatcggatcaatgccgtgctcttccagagccttcatgtgctcggggatgtcgcggcgggccagaatgccggcgtgaatcttcgggtgaagcgtcttcacgcggccgtcgagcatttcagggaagccagtgtagtctgcgacttcttccacagccacgccttccttctcgaggagcttggcggtgccgccggtagaaagaaggtggtagccgagggcgacgagctcacgggcgaaatccacaatgccggttttatctgaaacgctcagaagtgcctgtttcttcatgtcgttctatttccttaaaaatccctggtcagagaagtccgtaaagtcggagtttctttcgcagggtgtttcgattaatacccaaaattgccgatgcggcgctctgatttccctcacagcgccgcatgatgtattcgaatagaggcttctccacggcactgatcaccatttcatgcacacggttcggctgcgctccttccagattgctgaaatattggtccagcatctcattaagcgcctggtgcaaaggcgttgtggcatgttcgctcacgcgggattcctctgaaaaaattttccgcggggatgttccggtccgaccccccgcttgttgtgtgctaatgataaagcactaaaaggtcttcttgagaaaaatagagagcccggagactagttctgaagtattgctgaggcgtgagagagggcggaaagcctccgtgccgccggggaatctctccagataccagagcaaatgcttgcggaaagaccggatgccgtttttttcaccatagaagtcaagatgacgcttcaggtgacggaacaccgtttcagctttttcctgcactgaaggctcaccaggatcgacaccggtttcgagatacgcgctgatacgcccggggagccatggcgccccgagagcgcctcgccccaccatgatgccgtccgcgccggtgaaatccagaacagaagcggctttctgaggagaatcgatgtcgccgttcgcgataacaggaatacggactgcgctccggatttcgcggatggttctgtactccgcctcacccgagtagccctgttcacgggtccttccatgaacggtgatcagcctcacgccggcagactccgcgatacgggccagttcgggggcgttcagatgatcactgtcccagcctgtccgcatcttgagggtcacagggacggaaaccgttccgcagactccccggataatctcgtccgcaaggggcaggtttttcatcagggccgaaccgcagtctgtcttgcagatcttctttgcggggcaccccatgttgatatcgataatgtcagcgccgcactcttccacgaaagaggcggcccggttcatccaggcgggaaccgcgccgagaagctgcacgatccggggagagggttcatctccaaaggcgatcttcctctctgactcattcgactcaagaaggtcggggttggccgacaccatttctccctcaacccagacgcggccgaagtcatgaacggtctcgcggaagggaagatcggtaacacccgccatcggcgcgaccatcacggcgggcgagagagaaaaggccccgacgttcatggctcgttcagctgctcaggagtgccgatgttccgccattctcccgtgaagagctctcccgtcacacggccgagatcggcgaagtggtagagccacgggaagagtttcgcccggaccgccggaacacctttgaaaattctcggcgaataaataccgatgctcgagaaggtgagcgcctgaggggcacgccggacgagcccgttttcgagggccatatcgcctgctgcgtggaacgccggattgggcaccagaacgaggtgcgcgtcggcgtctcccctcatcagggcgtcagcccgcgcggtaagccgtgagtagtcgaattccgtcacgatgtcgcccgccgccacaataaatggcgtcacgccatcaggagaaagaagcgggagcgccttggcgatgccgccgagggtttcaagtgcttcctcttcggaatccccttccttcgagtagcggatcgtgatcccccgctcgtgaccgtccccgagctgcgccgggaactgatcggcgagatgcgccgtgttaacgacgaaatcccggactccggcccggatgagcgcgtctatttgccagtcgatcagccgctttccatggaaccggagaagcggcttcggagtggagtcggagagcgggcgcatgcgcttcccccgcccggctccgagaatcagagcccgtacgctttgcatcagtaggtccatccttcggatttgctcggtccttcgagtctgtcgatgatgacgagaatcggcttcagctgttcatagcggtaagcgacgtgccggacataggcgatgaaccggggcgtgtcggcaagatacttcggcttgttatcccgatactggagacgggcaaagatgccgaggatcttcaggtggcgctgcatgccggtccactcgatctgacgccagaattccccgaagtcagccggaacggggatgccggcttttcttgccttttcccagtaccgtatcgagatgtcgagcgtgaaggattcatcccaggagataaaggcgtcccgcatcaggctcgcgatgtcgtaagaaaccggtccgaggagagcgtcctggaagtcgagaatgccgggcatcggatccgacaccatcaggtttctcggcatgaagtcgcggtgcacgatgaccttcggctcagcaagcatgctcgcggtgagcaggtcgcagacctgattccagatcttttcctctttggcatcgagcgccgtgccgcggtgatgcttcacgtaccactcggggaagagggacagttcggagcggatcttttcttcggaataatccggcagaatacccggctcgctgatggactgaagcgaaacaagcgccgtggtcgccgcgtcaaaatacttcggagcgagtgagcggtcttcgttgaatttgtcgagataggtgtagcggccgagatcagagagcagcatgaagccgagtttctcgtcggccgccaggatcttcggcggattcagccccgcgcggacgcagagcgcatcaacgcggataaacggacggatatcctccttcccggggggcgcatccatcaggatgtagctgcgggtgccgccggccgcgtcaatccggaagtagcggcggaagccagcgtctgaagaggcagaccgaatggttgagaggtcaagctcatactggtcagcgtaggcgctcagccagtccttcagttcggcaaggcgggtgtcagtaccggttgtattgggcatgaatcgaagtccttcacttattattagcgttgaaattgtacggttttcgcgtgagtctgaggcttttacaaatagcctccgccctagtccgtataattcccaacatactagaaatgtcgtttcctgatacccatcataatggttccacgcaatcttaaaagaaagtttctgcccattcgcccgatcacgctcgcggtcgcgggcgttttcggcgtctattcacagatggcaggagctctgctgaccctccattcggtgccggaactggatccctcgccccgcggaaccgtgcagaacccctcaacctacgcgatggcggatgaggtcacgggcaatcctcaggacgtgcttcatctgatcggcaatgcggaaatccgccgcggcggcgctaccctgaagggcgaccgcatcacctatacgcaggtgactgacgaggtggaagcgcagggaaacgtgttgctttccaaggacggcaccgtatttacgggcgatcaggcgaattaccgcattgatgcggaaaccggcacgatgcctaaggcggactacacgttcggcccgagaggtctccggggctgcgcggatcaggtggactttgttgacggatcccacgtcacgatgtcgaaagcccgtatcacgtcctgcccgaagggtgacaacgcctggtgggtggatatgaaccggctcgaccttgatcagggggatctcacagcggaaggcacgggagcgtctctctacctcggcggcgttccggtgatgatgatgccgtggtttgaattcccgatcggccagcagcgaaagagcggttttctcacgccgacactcggcatgagtacgtcgaaaggtatccagatcgcggtgccttactactggaatatcgcgcctaactatgactacacgatcacgccgaacctgatggtgaagcgcggtctgatgctggaaaacgaattccgctatctgcagcccaattactccggcaagctcgtctataacatcatgccgcatgaccgtgactatggtgaatcccggtacggtctgcattttgagcatcggtatgcccgcgacggtttctacgccggcgtgaactacaaccgggtgtcagacgatgactacatctctgacttctccggcaacatccgcgagtcttcggaaaacgttctgaatcaggacttctggatgggttacgggcgtgacttctggaccaccaatctccgtgtgacgaagaaccagacactcacctccaccatgcaggcggggcagccgtatgagcgggtgccgcagttctcgtttaacacctataagggcgatatcggcggtttcgaatacatcggccacatcgaggcaacccgctttacgcatccgaatccgagccgcccggacggcgaccgcttcgtgatcgatcagggcatcagctatccgctgcgcggctcctactggttcatcgagccgaaggcccgctggatcggcacctggtactcgatgcagaagtcggatgccatgatgggcgatgtggcgcttgagaagagcgcgagccgcgaggttccgatcctctccttcgatacggggctggtctttgaccgtcagacgagctggttcggcaacgcggccgagcagactctggaaccgaggctcttctacgcctatattccgtatcggaatcaggatcgcctgccggtcttcgataccacgctctctgatctgaacatcacgcagctcttccaggagagtgtcttctcgggctacgaccgcatcagccaggccaatcagctgaccgcggctctcacgacccggtatctcgactccgcgagcggtattgagtggttccgcggcacgatcggacagcgcttctacttcgatgaccagaaggtcggtatctacgactactacacgaatcagctgatgggtatccgcaccgattcgaagagtgaccttctcggcagtgtgggcgtccgcctgacccggactctgaccgctgacggcacggtgcagtactcgtcctctgagggacgagtttcccgcgcctacgccggattccgctggcagccgaagcgcgcctcggcggtgagtctctattaccgctataactacgcgccaaacgacacctataacaacatcaagcagctcgaccttgcagctcagtggccgatcaccgataagctctatgtggtgggccgctacaattattccttcaacaagaagggcatcattgaagcgctgggcggctttgagtatcacgccgactgctggacgcttcgcgcagtggtgcagcggtacataacatctacaaacaaatatgacaatactttcttcctgcagcttgaactgaatggtttaggatcggtcggaaccaatcctgtttccgaattgcaggaaagcattcccgggtaccagagccggagcccggtacccagtgtgactggacggtatgaatactatgactaatttccgcattaccagcctcgcgcttgtcgtcctggctgcttcctctacggcttttactgctcaggcgcagctgaagactcccgcccagagcgcaccgacgcgcacgctcccggccgcgccggcagccgcagcagcccctgcagcccaggctgccccggcggtgaaacctgctgaaggcgcccgcccgctcgatgaaatcgccgcagtcgtgaatgacgacgtcattactgagtttgaactgcagcagcagacccatatcgcggcgctcaatctccgccgtcagaacatcaagctgccgccgatggacgtgctccgccggcaggttcttgatcagctgatcatggataaggcggttgagcagcatgcccgcgaggtcggcatccgtgtggatgacgcgatggtgagcgccgcaatcgagcagatcgccgcgaataacaaagtgactgtcgcccagatgcagtctgatctcgcgaaggacggtgtcccgtttgccgcgttccgtgaacagatccgccgtgaaatcgtggcgcagcgtctccgtgagcgtgaagtggattcccagattcatattccggagtccgagatcgactcttatcttgcctctcagggcaagggtgccgcggcgaccgagtatcacatcagccacattctgattccgaccgatgccggaacggatgtcgccaaggccaaggctctcgccgaagatattctgaagcgcgcgaagtcgggtgaggatttcagttcgctcgccgtgtcgtactcgaaggccggtgacagcatgaatggcggtgagcttggctggagaaccagccagaacatgccgaccgcgctctggaacgcgattcaggaacaccaccagaatggttctgttgagctctcccaggacagctccggattccatatcgtgaaggtgaccggtgtccgtaacggcattgataatccggcaaacggcggtctcattcatatgacccgcgcgcgtcacatcctgatgcaggtctcccagctcacgcctgaggcgagtgttgtcagccgcctcacggatatccgtaacaagattatttccggcaaggaagacttccagacgatggcgcgtctccactctgttgacccgtcctcgacccgcggcggtgagcttggctggctgcagccgggcgataccgttcctgagtttgaatccgcgatggataagctgaagccgggtgaggtttctgagccgatcaagtcgcgcttcggctatcacctgattcaggtggaagagcgtaaggacgccaaggcggatccccgccgcgtccgtctggccgcgctccaggctcttcgcgagaagaagcttgccgaggctgtgacgaactggcagcgtgagctccgcgacaaggcttacgttgaaatccgccaggtcggcaactgatcgcggcagccgcggggcagacggctgccccgtcggttttctcccgggatcagactccggatagaagcacatcctttcctcgagaggcgccgggcatctgccctccgcctctcgaaacataatcagagaaaagaaccgcaatggtgcaaaaacttgaaggtcatcacgcccgcaagcgctttgggcagaacttcctcaatgacccgcattggatcggaaaaattgtcgattcgatcgatccccagcctgagcaggtgctgattgaaatcggcccgggacaggcggcgctcacccgtgaaatcatcgcgaagagcggacacgaaacggcgattgagattgaccgtgatcttgccgcctggctgcgaagcattttcccggagacacttgagctgattgaggcggacgccctgaagcttgactggtcgaaagtgcaccccggggaaaaactccggatcttcggaaatctcccctacaacatttcaagcccgcttctcatttccctgatcgcggtccgcggccgcgtgacggatcagcatttcatgctgcagaaggaagtggtggatcgcatggtgagcgcaccgggcggaaagacctatggcaggctttccgcggtgcttcagcgctactaccgcatgatgaagctcttcgatgtgccgccgggcgccttcacaccggcccccaaggtcacgtcaagcgttgtgcggatgattccgattgcccgtgaggagacttcgccggaagaagatgccgcctactcggaagtggtggcggcctctttcagcatgagaagaaagacgctccggaattcgcttgggaaactgctgacggcggaggaaattgagtccgccggaataaacccgggtgtccgggcggagacgctctcagtgagcgactttgagtcgctgacccgcgtgtatctcgcgaagcgcgcggccggctgagaatcggtcggggtcagagcggcagatctccgataacgaccttacggagcgccgctctcgccttttcgtagttcggcttgatcgcccggacctgagcccagaagcgcgcgctgtggttcatttccaccaggtgcgcaagttcatgcgccgcgacgtaatcgatcgcgtcattatcaaaaaagatcagccgccagttgaggcggatagcgcctgaggcgctgcagcttccccagagtgtcctggcggaattcagtcgcagcgaggcggcggcgcgaggcgcgaactgctgaacatagtcgaaccgttcgcggatcacgcggacagcctcacgcttcatccagagcgtgatgatttccttcagatgtgccggatcctcgccttcagaagcgggaattctgagttccagatttccgctttcagcggttcttatctgaggcgcggcaacttcggaactgagtgaaattctgagtacccggccccgatagggaagttctcccccatccgcgaaaacggttctcggaataccgctctcctcacgctgctttgcccgcacggcgagatgctttatcacccagctgctgttcctcacgagcgacatctcaatgagtctgatcggcgcccgcatgggggcgaggacggaaatcccggtggaatccactctgaagccgatcgtacggcggcgggagcggtagagcgtataccgtacagaaacggccccggagggactctccggagccggcagatcgatgatccggacggagtccggttcgagcttcttaggcattctttgcgggatgcggaaggagcagcgcgtcgctttccgtggtgatccagtcggcgacctcagcttccaccgttttcagatcacggccctcagtggggatcggtttaccgatcgacaccgtgatagtgccggggatcttcgcaatggaattcttcggccagcaaacaccggaattcagcgcgacaggaagaatgggagcgccagtagcggctgcaagcctcgctccgcccgtcttgaatttcacatgctcaccagggggcacgcgggtgccttccgggaagagaatgatccaccaaccccgcttaaggaaggcggggccttttgtgaccagagtgcggaaagcgctgcggccgttgctgcggtcaatggacagcagtccgaaggaccagagagcccagccgaagaacggaatgcggttgagcgactccttgtagacataggcgccggggtaagggagataggctcccagccagaaggtttcccatgccgactgatgcttggacagcacaacgacagggcccttcgggcagttttccattccctttacctgaacccggacaccgcagatcacgcggagcgcggcaatcacgaacctgccccaggccctcatgacgccgtaccgggtttcggcccgggtgaacggcgtgagaatgaggacgatgaagcagacggggatgaccgtgatcgccagaacgatataaaagatgaaacctcgaactgtattcacagccatcacctccgattactgagcaatcttcgcaagctcggcaacctgattcatcaggtggtggagacgggcgaggagcgcctggcggttggcgcgcagcgcgggatcgtcagcgttcaccatgaccttatcgaagaactcgtcgaccggggtcttcagcgtggaaaggcgggaaagcatttcctcgtagtggccggcttcgaagtcagcgagagcggcaggttcaacctgatcgatggcggaggagagcgccttttcggcatcgctctcgaagagcgacggatcgatcttggtcgggacttcgccttcgatcttcttcaggatgttgctgatacgcttgttcgcggcagcgagggcttccgattccggcagcttctcaaaggagcggacggcggcgaggcgggccgggatctcattcagctgatccgggttcaggctcagcacggcgtcgatttcctgagcggtgtagccctgatccttgaacatgacgcgcagacggtcgaagaagaagtcgcggagttccttgcgggcatccttgacaccttccacgtggcgctcaatttcgaagccgagttcgaggaggtcagaaagcttcagcgggagattcttctcaatcaccatgcgcagaatgctgatcgcgtggcggcggagagcgtacggatccttttcaccggtcggcatctggccgataccaaagagaccggtcagggtttcgagcttgtcagcgatagcgagcgagaggctcaccggagtggagggcagcgcgtcgccggcgaagcggggctggtagtgctcacggatcgcgagagcgacatcagccttttcaccgtcatgctgagcgtagtactgccccatgatgccctggagttcggggaattcgcccaccatcagggtgcggaggtcagcctttgcgaggtaagccgcgcgggcagcatcctcggggctcgcgtgaagaccgatggcgatgaggcctgccatcgcgcggacacggtcagttctttcaaactggctgccgagcttcgcgtggtacaccacattcttcaggccgggaacgcggctttccagcgtttccttctggtcggtttcatagaagaacttggcgtcagccagacgggcgcggacgacgcgggcgttgccggcgctgatttccttgccgccgtcagccgcaacgagctgcgagacgagcaggaacttgttcatgaggcgaccggaagcgtcgcggagcgggaagtacttctgattcagctgcatcgtgagaatcaggcactcttccggaaccgagaggtattccttttcgaattcggaagcgtacaccacaggccactcggtgagcgcggtgacttcatcgagcagcgcctccggcatgatggccgtgccgccgagttcggcagccttgtcgttgaggagcttgcagatcagagcgcggcggtcagcgtaggagaccatgacacaggcgttcttcagctgctccgcataggaatccgcgctgtcgatcgtcatttcgccggcagacataaagcggtggccgcgggtcacgcgtccggccttgagaccgaggaacgtcactggcaccacgtcttcaccgtaaagtgccgtgagataacggaccgggcggacaaactcaaccgtcgtttcgccgtcggggagctggtagctcatcacgcgcgggatcgggagcttcttggcggagtcttcaatggcagcctgaaggccttccgcaagcgggatgccgggcttcgtgtcttcaacgtagaggaagtccttgccgccttcagtcttcgtgacgagcttggcgtcagcgccaaggccgagagcctgaagcttcttcagaaggggagccgcgggcttgccttctgcgtcaaggccgatcgccttcggcatcagctttttggagaaaggttcgtcggcggagtggtcaagcacgttcgtgatgtgaaccgcgaggcggcggggagtgccgtagcaggtggcaaccgaaccggcttccgtcaggtgctgggccgcgaggctcttcgcgatttcatttccgaaggccttggaaagcgtatcaagggctttcggcggcagctcttccgtctggagttcaactagcagattcgtcatttcaggcctcctccttcttatcagccttattcagcatcgggaatcccaggcgctcgcgggagtcgtaatagctttgtgcaacagcacgggagatgtttctgatgcgggagatgtagtgggcgcgttccgtcacggaaattgcaccgcgggcatcaagaaggttgaaggtgtggccggccttcaggaccatttcgtaggcaggcagagcgagctgcaggtccatcaggcgcttggcttcggtttcgaagtagtcaaacagcttcaggagcttcgcaggatccgacttctcaaaggtgaagacggactgctcatattcgttctggtggaacacgtcaccataggtcagcgtgcgctgacggtcgccttcgccccagcgggtatagacgaggtcgaacacgttgtcgcagttctgcagatacatgcagaggcgctccagaccgtacgtgatttcgccggtgatcggcttgcagggaagaccgcccacctgctggaagtacgtgaactgggtcacttccatgccgtccatccagatttcccagccgagaccccaggcaccgagcgtcggattttcccagttgtcctcaacgaagcggatatcatgcagcgacgtatcgatgccgagcaccttcaggctgccgagatacaggtcaacgatattgacgggggcgggtttcaggacaacctggaactggtgatgctgataaaggcggttcgggttctcgccgtagcgggcgtccttcggacggcgggacggctgaacataggccgcacgccagggctccggcccaagggcccggaggaaggttgccgtgtgagaagtgccggcaccgacttcggtgtcgatcggctgtagcaatgcgcagccctgcttattccaataatcctgcaggcgcaggatgacttcctgaaaagagatcattttttcctaactgccccctcttggagggaaaagatgaccgttttctgcatcgcaacacagtcatcatagaatcagaatgaagccatcattttagatggttggcgtttttttgtttttgctccgcgattctctgaaaaagactgccgcaaaaaggagaatgcagaggagaatggctggcgcattcccgacgcgtatatagggagtcgggccgccgtccgcggtgcggatgaccgcatcctttgagacgggaccgaggccggcttcgtacgtaatgacgccccgcgggctgataagagcggatgcgccgttgttattcactgagatcagcgggagcgcggtttccagcgctctcatccggctgaagagcagatgctgatactgcacggctggtgagaaccaggcaaggttcgagctcacgagaagcacattcggcatccggctttttccgtcatccttccagaagtccgacagctcgtccccgaaggagttttcgtagcagatcatcggagccacggtaatgccctgcagcggaagataaagcggtttctgaaaacggtcccccggcgtctggtcactcatcggaattcccagcgcatgaacgaaccagtggaagcccggcggtacaaattctccaaagggcacaagatgacgcttgtcgtaacgctgcgtatcggagccgggagtcaggagaaaaagtgaattccggaattcacggggatgcggttcccagaacgcgttgaggacgagtgaagttcctttttccggcgcgggaagacggatcagtgacgcctcttccggcatcaggcgctgaatggatgtgttgataacagattcgggccagatgatgagcgtgcggtctgcgatcgggcgtccctcaggagaggaaagccgcatcgcgcgggagatcctctcagactgagataggggttcaacgccggaaagtccggcgagcggcaggtctggctgtacgaggcggacagaaagcgattctccgggagcggtccagctgaccgcacgcagcgcctgcccggaaaccagaagcgcggctgcggcagcgatgcaggcgcattgccgcttcgcgcttccccgcagaagcacggttgcgaagacgagtccaagcgcgagcgaggcggcgagttcagaggcataaacgcctccgaccggagcaaatccctcaaacggggttccggtctgaatgtacccgaaggaaatccaggggaaggagcagagcgcggctccccggatccagtcaaaaaacacgaaggcggccggaaaagccgccgctgcccggagcggtcctggacggactttggaaacggcagcggccgtcagagccgtgaatatggaattcgcggcccccatgaggagcagcgcggcgcctgacagcagagcaggcagaccgccgaagtcatgaagactctggtagagccaggagagtccgggcgtgaaggcgaacagtccgaaaatgaaaccgaggagcgaggcctttttccaggacgtctcttccctgagactgaagagcagagcggcgagaccgataaaagcggcgatctgcgaaacccactccgcgctgtgaggaaagaacggagacgcgtaaaggagaccgccggcggcggccgcagctgcactcagccagaaattcacgcctgggctcccttatcggaagccgccttgggcgcccgctccacaagcagcacctttgcctggcggtcgtccgcccgcagcactttgaaccggaaaccgtcgatggtcagctggtcgcccggacggggaacacgctcgaggcggtcagcaatgatgccgccgatcgtttcgcagtgcggatccgtgatgtccgcgccgaaatactgattgaactgcgtgaggtgcgtaatggcacggatcttccaccgcccgcgggactcgctcacgatgtttcccgcatcgatgtcgaccgtgtcgaactcatcatcgatgtcgccgacaatctgctccagcacgtcctcaatcgtgaggagaccggtcacttcaccgaactcatccacgacgagagcgagatgctgatgctcgcgcttgaattccttcaggagaagattcagcggcatcgtttcagggatgaactttgcctctctcagatgctcctccagccgatagtcggggtggagaagcgcggtaaggagatccttggcgtgaaggagtccctttacgtcactgaaatcaccttcaattaccgggaagcgcgagtgtccgctctgattcgcttccctcagccacttgtcctggggctccgagatgtcgatcgccttgatctggcttctcggaaccatgatgtccgaggcggagagctcagaaatcttcagtacgccttcaatcatgaagagcgcgtcatcgctcagaacgccgtttgtctttgcggcgcgcagcgccgagacaaactgctcgtgtgcatcggaagcaggctcgtgaaaaagggacgcggtaagcctttgcagaaagctaggctcagcccccttctgtgacgagggtgggtcagaaatcatagtaagaattgccttttaaaggtcccggtcctgatatggatccgggaaccccagagactgcaggattttgatttcaaggggttccatcacattcgcctgctcttcagtgatgtggtcatagccatgcgcgtgcagtgtgccgtgaacaatcaggtggcagagatgctgcaggaaggttttctgctgctcttttgcctgttcgaccagcacggggacgcagatgacgatgtccgcctccacgacgggctcatgctgatagtcgaaagtgagaacgttggtcgcatagtccttgtgacggtagcggctgttcagttcgtagccttcctctttatcaacaaagcggatcgtaatgttcaccgggcgctcggcggccgccctgacccaggaggtcatgacgtcttcgctcggaagctccgggaacagttcgttctgtaaataataaacagaaacgggtgattctttttcctgagcctcttcggcttcggtttctttattcgattccatgtctgcctttttccctcgattccgcatccttctcgtacgcctcaacgatccgggccaccagcgggtggcggacaacgtcggccgccgtgaagtaggtgaacgcaatgccgcggactcccgcgagcacatgctgcgcctgaatcagaccgctgtgcgtgccgcgcggcaggtcgatctgggtgatgtcgcccgtgatgacggcttttgagccgaaaccgatacgggtgaggaacatcttcatctgctcgggagtcgtattctgcgcctcatcgagaatgatgaaagcgttgttcagtgttctgccgcgcatataagcgagcggcgcgatctcaatcgtctggcgctccatcagcgtgcgggtcttctcaaagccgagaaggtcgaaaagcgcgtcgtaaagcgggcgcagatagggatccaccttctgtgaaagatcgcccggaaggaagccgagtctttctccggcttcaaccgccggacgcgtgagaatgattcgctcaaccgtattccgctcataggcgtccaccgcggaggcgacggcgagatacgttttgccggtgcccgccggaccgataccgaaagcgatatcacagtcctggatcgccttgatgtagtcatgctgacgcggtgtccggccgcggagatcgcgccgccgggtcttaaggggcgcgaggctgtcatcctgcggaacgccttcggtttccgttctttcatcaacgaagaagagctgaaggtctttggccgacagttcctcacccgttgtgcggatgcggttcagaagtctctgcagggcatggatcgcgcgccgaacgtgcgaggtgctgccgcttacgcggaaaacattgccgcgccgcgcgatgctgacatccagaatggtctcaatctggcggaggttggcgtcaagcggccccgtcagattggcgagctctgcattgctcgcgtcagccgaaaattccagctgccgcgtctcttccttttcgtttgacatcgatcagttgaagtccttttccttattgatcagggtgccgccgagcgtgtgcacgcggacatccgtaattttgacctgaaccatcttgccgagaagatcgagggggccctcaaaattcacgacacggttgttatccgtacgggcggcaagcatgccttcgcccttcttgctcgcgccggtgacgagtacgcgctggatggatcccaccatcgcttcggaaatccggagcgcctgggcatcattcaccttctgcagcttctgcagccgctcaagcttcacttcctgaggcgtgctgtcaggcatgtccgcggcgggcgtaccagggcgcgggctgaaaacgaaggagaaactcgcgtcaaaccggcactcgtcaatcagcttcatcgtagcctcgaaatcctcttccgtttcgcccgggaagccgacgatgaagtcggaagtgatgcagatatcaggacgggcctcacggagtccgcggatgatcgacagatactgttccgttgtgtagccgcgcttcatcagttcgagcacatggtcggagccggactgaaccggaaggtgaacatggctcacgatcttcgggatcgtccgataggcattgatcaggcgaggcgtgaagttcgtcgggtgagacgtcatgaagcggatacgctcaatgccgtcaatcgcggcgatcagctcaagcagcatcgcgaaatcgatttcgtcgccgtcaggcagttcaccttcataggcattcacgttctgaccgagaagcgtgatttcgcagacgccttgctcggcgaggctcttcacatcgcggagcacatccgccacgggacgcgacagctcctggcctcgggtatacggcaccacacagtacgtgcagaacttcgagcagccttccatgatggaaataaaggcggcggaaccgttcttatgcggctccggcatgtagtcaaacttttcgatgccagggaacgacacgtcgacctgcgagtggtggcaggtcttgcacttatcgagcatgtcgggcaggcggtgaagcgtctggggcccgaagacgacgtccacgtagggagcgcgttcaatgatctttgagccttcctggcttgccacacagccgccgaccgcgatcttcatgccgggacgctgttccttcagagtccggatccggccgagttcggaatagaccttctgctgggccttgtctcggatcgaacaggtgttcagaatgacgagatccgcgtcttcggcggaattggttttgatatagccgctgctgtcagtcatcaggtccacgatccggttcgaatcgtattcgttcatctggcagccaaaggatttgataaagatttttttcgcagtcacggtttttatccgggggcgatcgaaaagaaagagtctttctgctagcgatcaggtaggggaagaagcgcaggtgtaatcctgcgtcaaaactgctaattttaaacacttttagtttcctgtacggtgcctgagggcagaatccgcagagaattagaatgtgtgccctctatgcattactccggaattcggaactttattcatgctggaaattcatcaggaaacgggctgccggctctgcccgagaaaatgcggtgtgctccgtgaggggattgtgacggctcccaagcgggcgctctgccgcgcgtcagggaaagctgaggtggcgctcgtgtcactgcaccgctgggaggagccctgtatctctggaagccagggtgcgggaacggtcttcttttcacactgcaatcttcgctgctgcttttgccagaatcacgaaatcagcgcggaaggaagcggctttgccgtgacggatgagcggctcgcggagatcttcctcgagcagcagagccgcggagcgacgtgtcttgaactggtgacaccgactcactatgtcgaaaacatcatccgggcgatcgatatcgcgagaagccgcggtttctcgctccgagtggcctacaacacgaatggctacgatctgccggaaacgatcgggcggctgaggggctacgtggatatgtatatgccggacctcaaatactttgactcccggtacggcgaacgctattcaggagttccgcattactttgagacggcaagcgtggcgatccgggccatgtttgacgctgtcggccggtatcgggtcggtgaggacggcctgatgcggagcggtctcatcgtgcgacatttggttcttccggggctttggcgtgacagctgccggtgtcttgactggctgtgggaaaatttcggtaatgatgtctgcgtcagcctgatgaatcagtacatgccgctttacaaggcgtcgcgtcaccctgagatcaaccggaagcttttcacgctggagtatcagaaggtcgtgcgtcacgccgagtcactcggataccgcaactgtttcattcagatcggcgagacggccgagtcgaaattcatcccggttttcgacggcacaaacgtactccgtgcctcagactgaagtcttttcggtccgcacgttttgttttgtgctacaaaaagaataagtaagcctgcggaaggcagacatctcgagtaacgggagaaagaaaatggatgaaaacatggaactgcaaaatcatctgcttgttgcgatgccttcactgcgcgacccgaatttcgccggaacggtggtctatatcaccgggcacgatgaaaaaggatcccggggcttcgtgattaaccggcagacggaactgatgctgtcggacgtgctcgagcagtcgaaggtgatcgcgaagggctcgccccggctgcctgaccgcgtctttatcggcggtccggttgatccccagaggggatttctccttcatgagaaggcgggggaatacgcggcgtcccgtgagatttcccccacgctgtgtgtgacactgtcagccgacgtgctgagccgcatgtgccgcggggaaggacccaaacgccgccttttcctgctgggtctcgccggatggctccccgggcagctcgaggcggagatcgcgattggcagctggatcactgtacccgcgacggaggagatccttttcgatgtgccgcctgaagagcgctatgactatgcgctttctcagatcggcatcagccgcgaacagcttgaagcttcagaggagcaggcgggtcatgcctgataaagcaaatccccgggatctttccggaactattgtcgcttttgattttggactggcgaggattggcgccgcggtcggcaatacgctgtcgcgttctgcccgtcctgtcaggatcttccccgctcgaacgaatgccgataagtggggtggtgtggaggcgattctccgcgaatgggaaccggtagcggtggtggtcggcgtacctctccgctcaggaggggaacgtcaggaactcacggatcgggctgaacgattctcccgtcagattgagggaaggttttctcttcctgtgtatccggtcgatgagcggttctcgtccgttgacgtggaacagggccggatgaaaatcgatgatcagtcggccgctgtgattcttgagcagtggttcagtgaaaatttttaaagctttgaggatatcccgatgaactatctgaccggggctttgcgcttcattctgatcgtcatttcgataccgttcttcatgttcgttgccggggtgcgtttcccgaaagcggaggaagcggaatatcggaaactggttgaaacctggtgcaggaggcttctcgcgatgctgggggtccgggtgtcttataccggaaggccgctgcggcacccggcgccgggagaaaaagggtacctgctgctttcaaaccatatttccttcctggatatcttttccatcgataccctgatctgctcgcggtttgttgcgaaggcggagatcagccgctggcctgcattcggcacgattgcgaaaggggtgcgcacgatctttattgagcgaggcaaccgcagagctattctcgcgattgcggagcagatggagtcagcgctgaaccggggtgaaaacgtgatcttcttcccggagggaaccaccagtcttggcaatacacttctgccgcttcacgcgaatctgattgaggccgccgtggcgaccggcgccacggtgcagcctctggtgcttcgctataagagccggggaaaactgacgacccggatgtcatacgcgggggatgtatcgattttccactgcctatggaatgtagtgacaacgccggatgcgacggtagaggtggaggtgcttgatccgattgaccctgcggggaagaaccggcatcagatctgccgcgaggtgtcggcccggatggcggccgctcttggcgttcgcgatccggcgattgaagaggaacggcgggaacttactttgcggccggttttgaagcagacggttcgcaccaaagcggacagcgttccataaagatccggcggtcgctcatccggatagcggtgagcgatccgccccagaggcagcccgtatcaatggcgatcaggttggggcggagcatcaggccgagcatggaccaatgaccgatcacgatcagctgatcgagaagccggcggtccgtccgcaggaaccacggcgtgagccccgcgggagcctgggcaaggccttcccgtgtatcgaagtcgagcgttccgtcttccttcacaaaacggatgcgggtgaaggcgttgaaaatagcgcgcattctctcgcttcctgtgagatccggagcccactgactcggaccatacatatccttcagatagtctttccagccgtcgcccgagagatgggactcggcttcctgcgcgagtttcagcgcgtcttcaaggctccatgacggatgaacaccggcatgaacgaagagagctcccgcctcataaatcgcgatcttctgacggcggagccatccgatcagctcatcggcatccggtgcctcaagaatcggtgtgatggtgtcccggcgatgaacgttcccgtgccctgcagccaccgcgagcagatggaggtcatggttgccgagaaggcactgagcccttccggattcctgaagctccttcacccgtctcagcgtttcaagcgactgagggccgcggttgacgagatctcccatgaagatcaggggagcggtatcgggaagctgttccagcaggccttccaggctttcatagcagccctgcagatcaccgatagcaatgacagaagaagtgttcaaaccagccacagcgtatttcctcaagaattaatgcccgcccgacttcctgacacgttcaagaagcgaagtggtggagcgctcatactcaaaactgatggtaagcgcttttccgccccaggtgctgacaagtttcgcttcgggcagatcctcaacccgatagtcgccgcccttgacatagatatccgggcgcacggcttcaattgccttcagaggcactttgtccgtgaagaccgtgacgagcgacacgctttccagcgcggcaaggacagcggcccggtcctgttcggtgttgatcgggcggtcatccccctttccaagcatccggaccgaggcgtcagaattcacagcgacgacaaggctttttcccagagcggccgcctgcgcgagatacgtgacgtgtccgcgatgaagaatgtcgaagacgccgttagtcatgacgatcggatgaggaagctctgacgcgcgttccctcagatcctcgaaggagacgattttgcgggtgaagtcaggaatcgggagatgttcgctcatgagtcagatatccgtgcagaagctgcggaaccagggactggtgaccgcgctcagaagattattgaaaacggctgtcgagtcagcggaggcggaaggaatcgcttttccatcggtgccgagaagaatcctctcccggactccggctgccgcgccggcctccatgtcccgggggctgtcgccgaagatgacgctccgggcgggatcgatcccgaattccccgatagcgtcaaggatcatgccgggctgcggcttgcggcagcggcagactctgcgatagcgctcgattttggcatcggggtgatgcgggcagaagtagaccttttcgatcggggcaccgtcagacgccatttcgttctgcatccaggaggtgagcctgagaaagtcttcttcggtgtaatagccgcgtccgatcccggactgattggtcaccacaaaaagcttaaagcctgcgcgggagagaatccggcaggcttcaactgccccgggaacgaacacgaattcgtcccggcggcagacgtagccgctgtcgatgttgatgacgccatcgcgatcaagaaacgcggctctgatatgggaatccatattacgggttcgggtagcgggcaagaagatccttcatgtagagggcggtgccttcctcgacagtcttgaaggtcgtcttgcatcccgcgccgcgcaggttggtcagatcagcctgcgtgaaggcctgatacttgcctttcaacgcttcggggaacggaatgtattcgatgtagccctgagacacggcttcttcgagggtgagcggcttcgtgatcttcttctcttccgcgagcagcgtgttcaccacggtgagcgagatgtcgttgaacggctgggatcggcccgtgccgaggttgaaaatgccggtcaccgggtgatcgaagaaacccaggatcgtgtcaatgacgtcgccgacgtaaacaaagtcgcggcgctgttcgccgttgccatacccgaggcagccctcaaacagcttcaccttgccttccttgcggaactggaagtactggtggaaagcgacggaagccatgcggcccttatgctgctcatgcggaccgtagacgttgaagtagcggaagccggtcaccggagagacgacagcgccgcgggccatatcccggcgcagcacctggtcgaacagatacttcgagtaaccgtagcagttgagcgggccttcatacttcacatcttcaacaaacgtggtgctcgcgccgtaagtggcagcggaagacgcgtaaatgaaaggcaccttttcccgctggcaccagtgatagagctcaagcgtgtagcggtagttgttatccatcacgtagcggccgtcggtcgccatcgtgtcggagcaggcgccctgatggaagaccgcttccggacggggcattttcccctgacgcacgagatcgatgaagtcgtgcttatccatgtagtcggagatctggcattcagaaaggttcaggaacttgtccgccttggtcagattgtcgaccgcgagaatgtcggtgtatccgcgcttattcagtgcaatggtgttgttgcagccgatgaagccggcagcgcccgtaacgataatgctcattcaatgactccagaaggaaacagttcttcgaaggaaacggtggccgtgccgagcttgcccacaacgatgccgcctgcgcggttcgcgatttcaacgcacttcttgatgggaatgccggcagagatcatggtggcgagaacggcaataaccgtgtcgcctgcacccgagacgtcgtacacttcgcgggcctcggcgggaaccgaaaatttgccttcagaagtataaagcgtcatgccttcctcactcctcgtgagaaggagggcctgaagctccagatgctcacgcaggttctgcgccttttccgtgagatcttcctcggacttccagtgcccggtgacttcagcgagttccgcgcggttcggggtgatgatggaagcccccttgtagcggtcgtagtccgagcccttcgggtcgataagaatggtttttccggcatctctcgcgatctgaatcatctttttgatatgcgagagaccgcccttgccgtaatcggaaagaatcacggcgtcatgcgacgcgatttcccgacggaaagtgtccaggtgcgcaagcagaacttcctcctgcggcatactctcgaagtcagcccgcagcatctgctgctgccgggcgacgattctcagcttcacggtcgtttccagcttcgggtcgaagtggaggagcggccggatcgaagagtgatgcaggagcgcctcgaggtgctttccggattcatcgtctccaagcaccgtgaggagagaaacaccggctcccatggcggcgatgttacgggcaacgttcgcggcgccgccgagacgttcctcgcggcgtgtgatgcgtacgacgggcacgggggcctcaggggaaatgcggttcgcatcgccaaaccagtattgatccagcatggcgtccccgactacgaggagccgccgatcgtgaagaagttctgtcaagggaacctccgctaataaaagaaatctgacagcttgtatggtatacgtgattttacgtatcagaggctgaggtgtgggcggggtcatttttgccggggagtctgtccttggcgctaaactctcgcctgaacacgtgacttcaggagaaggtttcaatgcaggtgatcgatcccagtatttttaaggcgtatgacattcgcggagtggcaggtgagaatctgaccgccgatgtggttgaaaagatcggacgggttctcggatccatggcggtggaaagcggtgtggggccggtctgcgttggacgcgacggccggctttccggccctgagctgaagggtgcgcttatccggggcatcgcggcggcaggggctgatgtttatgacatcggcatggtgccgactcctgtgctctactttgcaacgaagtacttcggatccggttcgggtgtctccgtgacgggcagccataaccccagccgtgacaacggcctcaagctgatgctgggcgggaagacgcttttcggccccatgattcaggatatccgccgccgtgtggagtctgaggagtggagcattgcttcgaagcccggcaaggtggaagtgaaggacgctgaaacgccgtacttcgaaaccgttacccgtgatattcatctcgagcgcccggtgagcgtgctgctcgattccggtaacggcgtgacgggaccgcttgccatgcgtctttaccgcgcggcgggctgcaaagtggaaggtcttttcacggaagtggacggtcacttccccaatcatcatccggatccttcgaagccgaagaatcttgagcagctgattgagaggctgaagtcgtctgacgcggaggtgggtctggcgtttgacggtgacggcgaccgccttggggtggtgagccgcaagggtgagattatttatcccgaccgccagatgatgctcttcgccgcggatatcctggagaagaagcccggcagccggattatctatgacgtgaagtgcacgagaaagctggttgactgggtgaagagccatggaggcatcccgaccatcagctgcacgggccactctttcgtcaaggcgaagcttgcggaaaccaatgcgccgttcgccggcgaaatgagcgggcatatcttctttaatgacggacgctggccggggtttgatgacggcctctacgccggcctccgcatggtggagattctgtcccgtacggatgatccgacggctctcctcagcagccttccgacggccgtcaatacgcctgagcttcaggtgccgatggctgagggcgagaataagaagtttgtcgagcgcctccagaaggaagtgcattttgatgacgccactgacgagatccggattgatggtctccgcgttgagtggccggacggttttgctctcgcccgcgcgtcgaatacgacccctgtgcttgtgatccgtctggaaggcgatacgcctgaggctctgaagcgaattgagcaggtgttcggcgcagctctgaagaaactcgatccgtcgatcaagctgcctttctccgcggaataatggcagttggtatctgagaaaccggagcgtgaaccaatgaagattctgatcattaagtcctcgtccatgggggatgtcgtccacgctctgccggtcgcattcgatatcgcacagcattttcctgatgctgtgatcgactgggtggcggaggagagtttccgggatataccgagactctcaccttttgtaggcgacatcattcagacggcattccgccgctggcagaaacatccgaccgcagcagaaacctggcatgaggccggtgcggtcaagcgccggctgtgcgatgcccgctacgacattgtgatcgacctccaggggctcgcccgtacggggctggtaacgcattgggcgcatgccccgaaagcagctgggttctcttttggctgtgtgagagagtggccggcagcgctcttctattcctccgggatgcggttcccgcttgaggaaacgatgggcgcggtgcaccggtaccgagctcttgcggcggctgctcttggctataaagcggaggggcgtccccggttcggactgaagaccttccgcccgaatccgatgccgcttcccggggcatacgcggcgcttgctgtgaataccagccaggcgcgcaaactctggcccgaggaaaactggattgaagtagcccggcagctttcagagcatgggctttcaagtgtgctgttctggggaaatgacgaggagaagcagcgggttgaacggatcgcaaaacaggcgccgggatgtattgtcgccccgcgacttccgcttgccgatattgcttctgtgctggcggacgcctcgattgtcgtcggtgtggacaccgggatttcacacctcggagcggcgcttggccgtccgacgatcggaattttcgttcagacatcgcttgaaaaagtgccgattgtcggagatgccgaatatgtgaaccttggcggccctggacagatgccgacagtggatgacgtcatgcagcagtgcgggggatttctcaagtgaagattggaatgaagggctatcggctcctcacccgggcagcggtgcccgccgcgatggggtatctcctttaccggagccgccgccagcctgcttatcggaatttctggggtgagaggttcgggttctctgaatatccgccgcccaaggggtgcccccgggtctgggttcatgcggtgagtgtcggtgaaacgaatgccgctaagcccctgattgccgagtgcctgaagcggtggccggaagcggattttctcctgacgcatatgaccccgacgggaagagatgcggggaaacgcattgtggcgctggctcccgaccgtatctcccagtgctacctcccttatgacattccgggagcgatggaatcttttttccgcgaaacaaagccatccattggaattgtcatggagacagaaatctggccgaccatgatggctgaggccagaaagtggggagttcccatggtgctcgccaatgcccgtgagtctcagaaaagtcttgatcaggcgcttcgcgtccccagactgatgattccagcggtgaaacagtttgccgtgattctggctcagtccaggcccgatgccgtccggttcaaagaactcggggcggagcggattcaggttgtgggcagtatcaagtttgatattcagccggatgccggtcagcagaaaaaggcccgggaatggaaggctgcgatcggacgcccggtggtgctttttgcgagttcccgtgagggagaagaggccctttttcttgaggcgcttcagaaggggggaaaggcgctctttcaggggaatccgctctttctcgtggtgccccgtcatcctcagcgatttgcttctgtccggcagcttttcctgaattcggattaccggatccagagccgctcagagcttgcgtccccggatgaaattgcacctgacactgacattctcctcggtgactctatgggggagatgtccttctactgcgcgctctctgatatcgctctgatggggggaagcttcctcaactacggctgccagaatctgattgagccctgttcgagcggcgtgcccgtgattgtcggtccgagcacctttaatttctctgaagtggcggcccgggcgatagaggaaaaagcggccgtgcaggtgatggatttccgggagggacttgaacgggcggccaaactgcttggcagcgctgaagctcttaaggaaaaatcggaaaacgcggttcggtttgcctcttcctataccggagcgactgaacgcaccatgacggttctggacaagatatggaagaaacagccgctcggatcgttcccaacattctgagtcttgccggcgtggatccgtccggaggggcgggtcttcttgccgatatcaagacgatcagcgcgcttggcggctatgcctgcggcgcggtgacggcgctcactgttcagaatacgcggggcgtaagcggggtccggatcatgagcggagactttgtttcggctcagatggaatccgtgctttccgatatccggattgacgcggtgaaaatcggcatgctgggtaattgcgaggttattgaggcggcagcgggaatccttcgggatcaccccgtgaaacatgtcgtcctggataccattctggcttctaccagcggaacaccgcttcttgagccagaagcggtaggcgtcctgattcggaaacttctcccgctctgcaccgtgtttacgccgaacctgcctgaagccgcgattctgcttggggatgaaaccccggcggacgaaggcggcatggagaatacggcccgcagactctggaatcttgcgggatgcggcccaacggtctatctgaagggcggtcatctctcgggagaccgtatggtggatctcgtctttgacggaaaggaagtccgccgctacgaatcaagccgggtgaaaacagagaatacgcacggcacgggatgcgcgctttcctccgctatcgcggcactgctacctcagaggtgttcggcgtgggaggcgttttcagatgcgcacgattatctgcgcggcgctattcaggctgcggatcgcctgtcagtgggaagcggacacggtccggtcaaccatttctggcagaagtaagagaaattttttctgaattccttgacaaagtaaaaaaaataccgcataattcgtattctcatggcgggttagctcagctggttagagcagaggaatcataatccttgtgtccggggttcgagtccctgactcgccaccaggtttccgaaaaccacagaccttacggtctgtggtttttttgttgtctggaaagaaaaaagcgccccggttcagaaaccgggacgctctgcgctgaagcgcttactggatatgaccccaggcgaagtagatcgcttttgatccgcctgatgtcttgccgacgacgaggtaaatcgggccgatccaggtatcagctcctaggaagaggccgtaagcctgcttccagccggaattctggcttccgctgctgttatagaccttgccggcctcaagcgagacacccgcccagacaggcgctccgatctgcatcagcttggagctgaggctccggtacaccatgaggcgaccgaactgcatccgatccccggagtaccgtccgtatcctgagcccgacagattgaaggcaccgcccagtttgaagacgccttccagtgacgaacggcctcctttcagagacgcattgacggtccaggggccgaatgtcttcaccgccgtaccggatgcgtcaaacgtgtcccggctgcggctcgttcccatgtcgtgatagaagtgcatgccagtggcatccagcttgtagcccttcgtcgggaaattgacgttatccagccgatccagactgagattgatgaaggagccgaggctgctctgattgggaaccggcagtttgtcatttccgactgtacgggtgttcctcagcgtgaagtagccggtgccggcactgatagttccaagacggccgatttcatagccaagttccagagacgcggccgcggttttgttctgccaggaagaagaacggttgtcgccgttatagaggtcgtagctctccttattcgcgtagatcctggggagcagatagaagggactcgctgttccgatcggctgatagagttgcattgagaacgacaccttttcaccgatctgcgcttcggtcctcagttctccgccccagctgttcagccagcccagggtgtgctgcagcatgaactggaaattgttgtcgtcatcgaagttcgtctgaacgcggcctccgaaccggaatgaagagtagccccaggttttttcctgcggctcaaagaccagcacttccatcccgtcaggtcccggttcaaaccggtaggggaccgagagaaaatcgtcatcctgccagatcttcttatccgcggcctcgacctgggaagtggtaacagtgtcccccggccggatcttgatttccgcgagaacactcttcgggttcacggttttaagaccgtcaacccggatgtcggcgagctggtgaggtttatccgtctcgatcagttcgtggcgcttggcgttccaggccgcgaattccttctgcgggacaccaagtttcttcagctgatcaaaaatcttccgggcggcatcctcgccgaccttcatgatttccgccgatttggtgaagtcgcctgacgtgtatttggaaagatcaggagtgatcaggatgtcttctttccgcagttccttcaggcttttctggacgttctgctcggtgagaatattcagcatctgacccatcacgccggcaatgcttccaaggtcctttctcggggaaagcggcgtgccgacgttgacggcaatgatgatgtctgcgcccatggcgcgggccgcatccacggggagattctgcacgagaccgccgtccacaagcagcttcccctgccactcggccggcgcgtaaacgccagggatagacatcgaggcgcgcatggctcgcgaaagcgaaatgtttttctgcagctcaaccgccttgccggtttccagatcggtcgcgaaagcggcgaacgggatcggaagtttggcgaggtcgttgatcatggaggccggttcgttcgtcttcgcgaggaagagatccagttcctgtgtggtgacgatgccgtaaggaagggcaaaccctttggggcctatgccgagctcggtgtcagaaagtccctgttccttatcttcctttctccgccagttgaggtcagcccgatttggttttgccgcgaacatctgcgtccagttgacgtttttgacgatgttcgccatctcttccggtgtgtagccttccgcgtaggcgccgcctaccatggatcccattgaggttgcggtgatgacgctcaccttgacgccggcctcctcaaggactttcagcacgccgatgtgtgcgaatccccgggctccgccgcccgagaggacaaggccgacccgaagcggcctctcagcgggagcagtgctctcaggcggtgtaatgacgtgagccgggggctcatccgccgaggctggcacagatccggaagccaggagcgcggcaaagataatcagtaaaaagggtttcattcagcatcactccggcacccgcaaagaggggccgatgatatgactcagaagacgatttcctatagtaagccaaagatcaggctatttttttctgcaggaaccggcctgttacgctttcggggcaggcggcaatgtcttccggcgtgccttcgcagagtatccgtccgccgtcctcgcctccgggtcccatatcgatcacccagtcagcgctcgcgaccacattcatgtcgtgctcaatcacgacaacggtgtttccggcatcgcagattttctggagcagggcaatgagctgcgaaatctccctgaagtgcagcccggaagtcggctcatccagcagatagagagtgcggccggtatccgttttggcaagttcaactgcgatttttacccgctgagcctcgcctcccgagaaggtctgcgaggactggccgaggcggatatatcccagtcccacagcctcgagcgcctccagtttccgcagaatggccgggtgattggcgaagaccggaatggcctgatcgacactgaggtcgaggatctccgcgatatttttcccctgatagcggacttcaagcgtttcctggttataccgtgtgccgccgcagacgtcgcatggaacctgcatatcgggcaggaactggagtccgatcttcagaatgccttcgccctgacaggcttcgcaccggccgcccttgacgttgaagctgaaacgatccgccccatagccccgttcaagcgccagagcggtgccggcaaagatttcacggataccctggaagattcccatgtaggtggcagggtttgagcgggatgtgcgcccaagcggctgctgatcaatgcagatcactttatcgaggtgttccagtccttcgatcgcgtcgaccggaagcggcgaggctgaagcccggtagagcttcgcggcgagcgcggggtacagcgtgccattgatgagagaggacttgccggaccccgaaactccgctcaccacagtgagacagccaaccgggatagaggcggagacatttttcaggttatgtccccgggcccctttgatcaggagctttttgccgatccgccgtgagcggttccgctgaaccgtggtttccgggtgactgaggtaagttccggtgaccgacttcgggtctttcagaatttctttcagagagccggaggcgatgacctcgcccccggattctccggaccccggccccatgtcgatcaggtaatccgcgctccggatcgtgtcctcatcatgctcaaccacaatcacggagtttccggcgtcacgcagccttttcagagagtcgagaagcttctcgttatcagccggatgaagccctgtggagggttcatcgagcacatacataacgcctgaaagaccggagctcagttcgcacgcgaggcggatgcgctgcgattcgccgcccgaaagcgttgtgaccggacggtcgagtgtgaggtaagcgagaccgaccgagttgagatagcgaaggcgatcaagaatcgggggcagaatccggtcggcgaccgcccgtgctgtttccccgagctcaagcgatccgagcagcggttcgagttctgaaatcggcatccggaggagcgagggatagctgaagagtttaccttcggacgtaagaaacacattccgtgcttcccggctcagtttttcacccttgcagtcggggcacgttttctccttgaggagcgggccgagaagcttctcgcggtccgctttcgaaagagtctcggcttcttcggtgatcagggattcgatgccggggaattctggttggtcagggtctccctgaagcatgaattgccggtcttttcctgacagctcttcccaaggggtatcaagcgacacggacgcccggtttgctgccgcttcgagcagagcaaaatgcttcggcgaattctctccccaatttggaatcgcgccggcccgaagtgaaagctcaggatgaataatgctttcaattgaaaccgcgggaactgttcctgttccgccgcaggttgggcatcggccccgggcggtctgaggagagaaaagtccgggctcgagctttttcagagaaaagtcacagagcgggcagctgaaattggttgaaaacgcggtttcttcccgggttctgtgattcattgctgaaacacggcctccggaaagccttgacgcgagatcaagactttctgtcagacgcccgcgggaagactttctcagtttcaaccggtcaaccacaatatcagctcggagactgagatccgcgagcgcatcaggcgacgcctcttcggtttcaacaatgtcactcccgattctgacccgaaggaacccctgacgcgcgagatccgcgaggagctgcttaggattcgcgcggcggtctgccggaatgggggacagaagaataaccggtgtttcctcaggccaggcaagaagccgttccgcaatgacggacaccggtgtcgcttccagcggcaggtggtggtcggggcagtaaggcgttccgacccgggagtagagaagccgcaggtaatcgagaatttcggtggaagagccaaccgtggaacggggattgtcggagcggtttttctgatcgatagcgatcgcgggagagagtccctcaatgctgtcgacatccggtttattgcggatattgagaaactgacgggcgtagggggagagaccttcgaggtaacgcctctggccctcggcataaagcgtatcgaaagcgagcgagctttttccggagcccgagggaccggtgatgacgaccagctgattccggggaagctcagcgttcacgttcttcaggttgtgagtcttcgctcccctgatgatgatcttctccacggcagtccccccttgatcattcagtgcgcctcggcagccgcagccggggccgcatgttctctctgtctcagaattcgggccttcaggctttcgtacacggggtcagctcccatatagcgggcaatcagattgccggcgatggaggcgacaagggttacgggaagcagcgtccagtctcccgtcatttcggtcagcagtgcggcagaagtcagaggcgaccggacgacagcagaaaagaagcaggccatgcagagaatcataatggtgccggactgtgagctgaggagtatgccggccgattgcccgatggaggagaggaggcagccgaggattgcgcctgcggtgagaatcggcatcagaatgccgccggcgataccggaggcaaagctgaagcaggagaagaacgctttcacaaggaagagcagaagcagaaagtcgatagaaagcctgagctgctccatctgtgtcggcgtggggccgaaccccgtcagaacggttggatagaagagcagcagcagtgccaccatcacgaacggcacggcgagcctcacccagcgggaaggccacgggaggcggtcttcaaagcaggtgatcgagaccagaatccagcagtacaccgttccgagaacgccgctgagaatacagacaggcaggagcacccagagctggagaaagccgagaggctcaaggccgacaaaagggaataccagcggaagccccaggatgtgcttcaccatgaaccaggcactcatcgcggtgatcgcgaggaacgcaagcattcgccgatccagaatcaccttcatgtcttccacggcgaacagaatgccggcgatgggggatgagaaagcggatgtcatgccggacacggcaccgcctgtcagatagcggtgcatcgtctgagcatgttttccgtagaaaaatgtaccgacgccgaccccgaccgcggctcccatctggacacaggggccttcacgccccacagagagtcccgccgccagagcagtgagtgtgccgacaaacttggtgatgagcacacgaagccagttcatcggcggaaatttcccgatctgggcaagctctacctgagggatgccgcttccgctgatcataggttcgattttcagcaggaaccccgagagcaggcagcagaagataagcgcggccgcgatgaagaggaatccttccgcccccttctgaaattcctccacaacccagttcgtcccgagaccattcagcacggtgaaagccattctgaagataccgatcacgaacccagagatggcaccgattaccagggcctgcagcacaaaggcgagctgtcccagagcaccgagtttctgagactcacggatctggatccgggtttcttccgaaagatgattcacaggacgcttttttcccgtcagccgggggaatctctgaagcataaggagaggaggctttttctctgacggagcttatccgggagagttaaatcaaaaagttaatcagatgtgacctgcattgtagaactaaatccccggcgcttaacccgtccgacggcatccggaagtgcgaaagcccggtccgccagggattgacgcagcctgcgggaaaataagtcctgaagaaaaaaatcaccacttataatcattcatcagggatcgtcttccgggcgattcgaagcatttcatcggcgagcggaattttttccgttccgcaatttcaattaaagagacgaactaggctatggcttctgtaaataaagttattcttctcggcaggctgggtcgggatcccgaaacccgctacgcgtctgaaggcggcaccgcaatctgccacctcgcgctcgcaacgtcccgccgctacaaggatcgtgacggcaaccgcaaagaagatacggagtggcacaacgtggtggtctttggccgtcaggctgaaattgcccagcagtatctccgcaaggggtccgaggcttatattgaaggccgcctgagaacccgcaagtacacgggtaaggacggtatcgaacgctattcgacggaagtcgtctgtgagtctctgcagcttggcgcccgtcctaccggatctgccggttcgtcggatgcttctgacgagtttgagtccccgcagcgagcgccgcgcgctgccgcgccgactgctccggcgccgaagccccagcagccgtctgctccggatgttgattcctcgttcgatggggatgacattccgttctgagtctgagcgtgacgcgtttcggataaaaaatggccgcctgtaaaaggcggccattttgttcaggaggcagatccgcagaaaagcggatctgcacaggctgaatcaggctttcggagcagactcgtcatccgcggcgcggatgatgaggagcggcacattgccttcagctgcgatatgagtcgcggtggagcccataacggcagacttgaagcgggtgtagccgtgggagcccattacgatcagatcaagcttgttcttcttcgcgaaggcggcgatttcgtcgctcggattgccgacgaggcagacttcagtcggcttaaggccggccttctcgaaaagcggacgaagcggatcgaccgtttctgcgaattccttcttctgcagctcaagcacttcgctctcggagagggcggggagcgccatgccggccatatcaggcatcacagcgccggcgtagtcattcacaacgttgatcagatagaactgagcgcccttgccgaagaagtcgattcccttcagcacgtgattgacagcagccatgccgtacttggaaccgtcaacagcgataccgacgcggagagcgtccgtgagcggcgcttccttgccgcggagcaggagcaccgggcacttcgtgcgggcgagcacaccggtcgtgacggaacccatgatgagtcccttcagcgcggtaagaccgcgggaacccatgacgatcaggtcggcgggaagcttgtcggcttcctgggcgatcatttcatccggagcgccgatccgataggcctcggtcaccgtaatgttgtcgcgcttcagaaccttgcgggcagaagtgaaaaccttgtcggcttcctcttcgtagtagcggtcaagcgcttcgcgtcctacgaggcggctggcgcgggcaggcagcggaacctgaatgttcagcagctcaatcgtcggattgttgcccaaaaccgtagtccgggatgcgacaaaatcaatggcatttttgctgtattcactgccgtcgataggtagcaggatcttcatagcgaaacccccttaaaattactgtcatagatgagctgattgatcgaatctcggcatcaaataggacgaaaccgcttgagacccgagaaaccataggctcaagctttagtatcactttagcgcaaaaaacacgatttgcgctacagtcatacttccatcacataaaaatagaatccgcatcaaagaaaagggtaattatgggaacaactacagataaacggcgcttcggcgggatcgagcgcgtttatgggcctacggccgcccaggctttcacgcgtctccatgtgacgattgttggcatgggtggtgtcggctcatgggctgtggaatcgctcgcccgtgccggcgtcgggaaactcacgctcgtggacggagacgtgagtgaagagagcaatacgaaccgtcagtgtcacgcgattcaggggaactacggccgctggaaagctgagctgatgggagagcgcgtcaagctgatcaatccagactgtgaagtgaaggtcatcacagaggtgcttgagcctgacaccatggatgcgcagctgggaacctcagatgccctgattgatgccatcgatacgctgaaggcgaaagcggctctgatcgcctggggtcacaagaatggcatcttcactctgacaagcggcggcggcgccggacgctgtgatccggggaagattcacgtggcagacattgcggccgttaaggcggatccgctgattggcgctctgcgtcgtgaactccgcgcgaagtacggtttcccgcagggcagtcccaagggcaagtcgcagcggttcaatatcccggcagtgtattcgacggagcccgtccgccggctgtccgcggaagacatcgcgcgtctcccgccgggttccggcatgggtaccgtgatgaccgttacagcgtcgtttggtctgaggctggcctccctggtactgaatgagtttgccgcccgcgcgaaccatgcggggtcggagacttcggaagagtaactgccggctatggcagaaaaggacggaaggttatgttcaataagattctggtgacgacggacggttcggaactcgcactgaaaggcgttcggggtgcggcgcagcttgccggacagctgaaggctgaattgatcgtcgtgacggttgaggaaccctattcctactccaacgtgacggcctaccgtcctgagagctttgagcagtacaaggatcgggtcaaagcggaaaccgaggaaagactggaaagcgcccggaaagcggttgacgcggagggcatcaaggcggagaccgttgccgtcaatggctcgaatcccgctgacggcattgtgcagttctgcaatgaacggaagtgcgatctcattgtgatcgcgagccacggcagaagcggtctttcggcagtgctcctcggcagtgtggcccggaaggttctcacggaagcctctgttcctgttctcgtctatcggtgagacagcaaaagggggcggaatccgcccctgtatgtgggataataaagcccgctgcagccccggtcagccggggcgtatgtttttatgcaatttattcgaattcgataaggaagcaaagatggcagatctgaatggtctcaatacggaaatggatgccggcaatctgtttgaggaaaagattgtctcggacagaaagatcggcacgatccgcgtgatgaccccggtgaaggatgacggcacccgcgacgaatcccgcaagatgatttttgtcggcgaagcccagatcatgacccatatgggcgctcttccgatcaacttcgagatccccgctgagacgcttgccgaagccgtgaagggttacggcgcggctgccaagcagggcgttgaggatacgctgaagaagcttgaggatctccgtgaacaggcggcccaccgcatcgttaccccgggttccgaaggcttccaggtgcctcccgcgcagggcggcaatggcagcggactggtcggcctctgatcagtctgatgccgggactggcttcatccggacgggttttcacccgcgaggattttgagtcgggaagcagaacgctgctgcgcgagggccgcatggccaacgcgtgtgtctatcggttccgctaccgcggtgaagagtggacggtgaaggatttttccacccgcccgtggtgggtaaggaagatccttgcccccatactcttctggcgcgaacttcgagctgtacgccggcttgcgggtatcgagggtgtgcccagccgaggattccggctggatgctgccgctatcgcgattcagtatcttccgggtacttccctctcgaagtcgcccaggtcgacgatgacggttgagttcctgaaagaaatggaagacctgatgacccgcattcatcaggccgggattgtgcatctcgatgcgcgcggaaccggcaactgggttgttctgtcaaacggaaaacccggtctgatcgactttcaggcaggcgtctgtacagtcggacttccgaaaggactgcgaaaagtccttgaggatatcgacatgagcggtgtccttaaaaaatggaatgagtttcaccccgaagccatggggccggagcgcattgcccgttttgaacggggcacgaagctccgcaagctctggcggatccgcggttactttggaaaacgcaagtaacagatccgcatgaaaaaagcgcccgttcccggcggttctgccgggtttacggttacaatattgtttttattagatttatccatagccaccacacatgcctcagtatgtcttttccctgaacagggttggtaagatcgtcccccctaagaagcagattcttaaggatatttccctctcattcttcccgggtgcgaagatcggtgtccttggtctgaacggtgccggcaagtcgacgctgcttaagatcatggcgggcgtcgataaggatattgagggcgaagccgtcccgatgaaggggctgaagatcggctaccttccccaggaacctcagatcaatcctgaattcacggtccgtcaggctgtggaagaaggcatgggtgatgtgatcaatgcccagaagcgcctcgaggaggtgtacgccgagtacgctgaaccggatgcggactttgataagctcgccgccgaacaggctgagcttgaggccatcatttccgctgccggcacgaatgctgagacgcagatggaaatcgccgctgacgctctgcgtcttccgccctgggatgccaagattgaaaacctgtctggcggtgaaaagcgccgtgtggcgctctgccgcctgctgctgtcgcagcccgagatgctgcttctcgacgaaccgacgaaccatctcgacgcggaaagcgtggagtggcttgagcagtatctgcaccgcttcccgggcactgttgtggctgtgacgcatgaccgttacttcctcgacaacgcggctgagtggattctggagctggaccgcggcgagggcattccgtggaagggcaactattcctcctggcttgatcagaaggaaaagcgtcttgaaatggaaaagcgccagaacgaggcccgcagcaaggccatcgctcacgaactggagtgggtgagacagaatccgaagggacgtcaggcgaagagcaaggcccgtctggctcacttcgaggaactctcctcctacgagtatcaggaacggaatgaaacgaatgaaatcttcattccggtcgctgaccgccttggcaagtcggtgattgagtttgagcatgtgagcaagggctttggcgacaagctcctgattgatgatctgtcgttcgttgtgcctcagggcgctatcgtcggcgtgatcggcccgaacggcgccggtaagtcgacgctcttccgcatgattaccggcaagcagcagccggattccggcaagatcacgatcggttcgaccgtgaagctcgcggctgttgatcagatgcgcagctcgcttccgaatgacaagacggtgtttgaagcgatcagcgatggtcttgacatcattcaggtgggcaagtttgaaatgccggcccgctcatacatcggccgcttcaacttcaagggccaggatcagcagaagcgcgtcggtgatctttccggcggtgagcgcggccgtctccatctcgcgaagacgctgctcgcaggcggcaacgtgttgctccttgacgagccgtcgaatgacctcgacgttgaaacgctccgcgcgcttgaggatgcactgcttgagttcccgggctgcgcgatggtgacgtcgcatgaccgttggttcctcgaccgtattgccacccatatcctcgcttttgagggtgactccaaggtggtgttcttccctggaaactaccaggagtacgaagccgacaagaagaagcgtctcggtgaagctgccgcagccccgcaccgtctgcgcttcaagccgctgaagcattaagagaggcattcggcaaaaacaaaagggcttaattttttaagcccttttttccttatgcgaggcagtctccggctgaggggatggttctgcctccaccggcgtcttcgggaacaacatggatttgatttactacatacaggtcattctgatgggcattgtggaaggcctgacggaatttctgccgatttcttccactggccacctgattgtggctgccgatgtcatgcggttcagtccgccggatcgggagacatttattgtcggcattcaggcgggtgctattttcgctgtctgctggttttaccgtgagcggatctggaaggtcgttatgaactttctccgtccggggcgtgagcagaatctcgccgtgaatacggtggttgctttcctgccggccgcggtagcgggcgtgctcttcgctcacttcattcagagccggctcttcaatgtcgtcacagtgtcgacaacgcttgtgatcggcggtctcattattcttgctgtcgagcggatgatcgccgcaggaaaaatcgccccccgggtgcatgagatggatgacatgaactggcgcgacgcgctgaaggttggcgtcatgcagtgcttcgcgatgattccgggggtcagccgatccggagccaccattatcggcggcatgatctgcggcctttcccggaaagcggcgacggagttctccttcttcctcgcgattccgacaattttcggcgcaacggtctatgacctctggaagatgcgtgacagtgtggcggagcttaatgtcggaggcctgctgctcggcggcgccgtgtcattcttctccgctctgatcgtcgtgaactggctgctccggtttgtggctcacaacaatttccggggattcggctggtaccggatccttttcggagctctggtgatggggctctggtacacgggagtgattctctaagacatgaaaaaaaagccggcgttaaaagccggctttttcgtgggcggtcgttttatcgcttgatataaacgagatcccagattccgtgaccgaggttttctccccgggcctggaacttggtgcgggggcgctcacagagcggattcccctggatcgggcagtagccctctcccttccagtcctggagcgcaggctcgtgggacagcacgtccagcatctgctcggcatagttctgccagtctgtggcgcagtgaatatagccgccctgacggattctcgtgcagagtttcccaatgaaaggctgggcgacgaggcggcgcttatgatggcgggctttgcgccagggatccgggaaatagatatggacgccgtcaagcgattcgggcgggatcatatgctcgatcacatcgaccgcgtcatgacggatgatgcggacattcttcagctccatttccttgatgcgctttgacagtgcgccgacgccggcgacaaacacttcgcagccaaggaaattgacttcaggatgggcctgagcgatcgctgccgtggtttctcccatgccgcagccgatctcgaagacaacgggagctttgcgcccgaaaacctcttcaaaattgagcggggcttcagcgtaaggcacttcgtaaagcgggaagacttcttcaaaggctttttcctgtgcgtggctgatatggccgcggcgcatggagaagcttcggatatgcctcgacttcagttcttcaagctgttcgggggaaagttcattcggcatttgaaacgggaaattcctatgaaaaaaccgacacactcaaaggtatgtcggtttctaatctggagcgggcgaagggaatcgaaccctcgtcagtagcttgggaagctacagctctgccattgagctacgcccgcataggcattgaataataacagggatcggagaaaattgccaatctccgatctccgttgttatcagcggtgagagaccttgcggacggtccagtcaccgagagactgcatggcctggacgaacacgatcaggatcaccacgaccgagtacatgatttcaggcatgaagcgctggtagccgtagcggatggcgaggtcgccgagaccgccgccgccgatcgcgccggccatggccgaggcaccgacgagggacacgagtgcaatcgtgataccggcaataatgccaggcagagcttcagggagcaggaccttgcggatgatctgcatgctggtggcgcccatggagagagcggcctcaatcagtcccttgtccacttcacgcaggctcgattccacgagacgcgagatcatcggagcggccgcgatcgtcagcggcacgagagcggcggaggtgccgatagacgtgccaacgatcaggcgcgtgagcggctgaatggcgacgagcaggatgatgaacggggtagaacggaccgcgttgaccagcacaccgatcgtgcggttaaagaccttcgccgacagaatgccctgaggggaagtgacatgcagaaggatgccaagcggaatgccgatcgccccgccgatgactccagcgatacccaccatgatgagggtttcgatgaaggagtccagcatcatatcaatcatttcaggcgttaacagcatcgttaagctcctcaatctgaatgttgttggaaatcagatattcgcggacccggtcgtaagcttcctgagagcaggaacacacgacggtgaggctgctgaaagtgctttcctggatttcggaaatctggccagcgagaatattgaagttcacgccgtagcgggtcgcgcaggtggcgatcacaggctccgtcgcctcttcgccgacgaaggtgatgcgcagcgccttattgcaatcgttcgggtgagccttgaaaatgtcgcggatgtgctgcacgacctgagccggaagctctgtgcacaggatgccgctcagcatgctgcgggtcgtcgggtgacgcggattgcggaagacatccagcacgctgccctcttcgatcacttcgccatgatccatgacgacgatgcgttcacagatctgcttcaccacttccatctggtgggtgatcatcacgatcgtgacgccgagttccttattgatcttgcgcagcagggcgagggtggacgtcgtggtttccgggtcgagagccgaggtggcttcgtcagaaagcagaacagtcgggtcgttggccagggctcgggcaataccgacacgctgcttctgaccgccggaaagctgcgcgggatacttcttcgcatgttccgtaaggccgacgagctcaagcagcggcgtaaccttttccctgatcttgtcacggctgacaccggcaagctcgagcggcagggccacgttgtcatagaccgtgcgggaggagagcaggttgaagtgctggaagatcatgccgatcttgtgacggacgcggcgaagctcggaggcgctcagcttcgtgagatcctgaccgtccacaatgacattgccctttgtgggccggttgaggaggttgatacatcgaaccagcgtggatttgcccgcgccgcttcgtccgaggacaccgaaaatttctccgtcattgattgtgatggagacatccttgacggcatcgagtgtcgtctttccgtccggggacttataggtctgccagatatgtttaagttcaatcatttcccaaatctcagcattgacagttcgaaagcctgccaaagaagttgactttcatgcagtgtatcggtgaaaagccgaaaaatgcggaaagttcggatttaatgcgtgatcttatgccgtattaccaaggccgggctgaagaatctgaatacggtccggcggctaagaaaaaagggcagaactgttacgttctgcccttctgaattggtgggtgcgcagggggtcgaaccctggaccgacggattaagagtccgctgctctaccaactgagctacgcgcccatacttgcaaagctttcgctttggtacatcgaattttggtgggtgcgcagggggtcgaaccctggaccgacggattaagagtccgctgctctaccaactgagctacgcgcccgaaattctttagttaactgtaatggtgggtcgtgtgagattcgaactcgcgaccaacggattaaaagtccgctgctctaccggctgagctaacgaccctcgcaacccaggcctctcttgtgaaagacagggatacagctaatcagaccacgaattatgttacggattcctaaagatgtcaagggaatcggaaaataaaaaaatttgagcttacaatttggtctcattgtttagggtaaacactaaaacatctgacctcaataagcctctacagtatttacgacagcagtcaagatgatgtgcagaaaaaacgatttggtacccctgcctgacgcgcaccgggtgtccgaaattcaataataggatcaatcttcccccgtgtcccggccttacctaagggcgtcaccggaaagagggaaagggaacaagttatggcagcagataagaagtccaaggataaggcacctgtccgcgcggtccgcatcgaagaggaacaggagcgtcagaaggctttgaacgccgcccttgctcagattgagaagcagttcggcaagggttccatcatgaagatggacgacacgagcgtcgcgcaggatatcagcgttgtgtcgacaggctccctcggcctggatatcgcgctgggcgtcggcggcctgccgcgcggccgtgtgatcgaggtctacggccctgaatcctccggcaagacgaccctcacgctgcaggttgtggccgagatgcagaagatgggcggcacctgcgcttttatcgacgcggaacacgcgcttgacccgcagtacgctgaaaagatcggcgttgatctgaagaagctcctcatttcccagccggataatggtgagcaggcgctcgatatctgcgacgcgctggtccgatccggcgcggtcgacctgattgtggttgactcggttgccgctctgacgcctaaggctgaaatcgagggtgaaatgggcgatgcgctccctggtctccaggcccgtctgatgagccaggcactccgtaagctcacggcatcgatcaaccggactcagtgcatggtgatcttcattaaccagatccgtatgaagatcggcgtttcctatggcaacccggaagtgacgacgggcggcaacgcgctgaagttctacagctcggtgcgtcttgatatccgccgcgccggttccatcaagaagggggacgatattatcggcgccgagacccgcgtgaaggttgtgaagaacaaggttgcgcctccgttccgtcaggccatctttgatatttactacggcgaaggcatttcccgcgagagcgagattctgacgctgggctctgacctcgatatcgttgacaaggccggtgcctggtacagctacaacggcgagaagatcggccagggcaaggataaggcgagcgaatacctgaaggaacacccggaagtggctctcgaaattgagaacaagatccgggcgatcaagggtgtaaaccgcgttggggagggcaccgtgaaacccgcctcccccgccaaggccccggcggcagcggctgacaagcccgctgctgagaagaattcttcggatgaagtgccggaggaagagacccgcgtggatgatctggatgaggaagaagatttctccccggatgagctgctctgaaagtgatggagcagactcctgaagagatgggagccggccgtcgcgccggttcccgtaaagaaaagccgtcccttctcgcaagagcggtttcctatctttcccgccgtgagtattcgaggcgggagcttggggaaaagcttcgccgcctgggttccgaggacgacgccaaggtggacgaggtgctcgactatcttgaagagaagggatatctctcaaacgaacgtttcgctgagcagtttctgcgagccaaagcttcgcgctacggtcagtcccggctccgcatggagctgaggcagcggggactgagcggggaggaaatcgatcgggcgatcgagggactcgccggcagcgaggaggaccgcgcctggagtgtctgggagaagcggttttcttcttatccggaagatcagaaagagaaggctaaacagatccgctttctgatgtcccggggtttttcgtatgcaattgtgtcacgggtactgcaaagagcccgtcagaacatataagataactgtttggtagaaatcaactttaagaggatgaagtgctagcttggataattgacgtatttacaaacatgcattggggagcggtcggtcagatcatcatgatcgacatcctgctcggcggcgacaacgcggtggtgatcgctcttgcgtgccgcaatctgccgaaagatcagcgatccaagggtgttttctggggtacggctggcgccatcattctgcgtgtgatcctgatcaccttcgcagtgctcctgctgaatctccccttccttaaggtggtcggcggctgcctcctgctctggatcggctacaagctgatcctgccggatgacgatagtgaggaggagcatatcaaaggaaatacgaagctcttcagcgcgatcaagacgattattgttgccgacatggtgatgtcgattgataacgtgatcgccattgcaggcgccgcccagcaggcacatgaagcgcatcagacgatgctcgtgatcttcggtctgcttgtctcagtcccgttcattgtcggcggcagccagatcatcatgaagattcttgataagttcccggtgatcgtgctgttcggcggcgcgatgcttggctggatcgcgggcggtctctttacgtcggactcgttcgtggtgaaccatgtccccggcgtggaaagctggaagatggtcgctgaggtgatctgcgccctgattgtgcttctcgcaggtctctatacccggaagaagatcgcggccaagaaagccgcttccgcttcctgagtcagactgaaaccgtaaaagaagagccccctgagggggctcttttttgtgcctgaaagcaggggcctaccgtgcctggccgttgctgagcccttcaataaaaccgccgccgaggcagacttccccgtcatagagcacggcgctctgaccaggggtaacggcccactgcggttcatcaaacttcaccgcaaactgctctccgtcaactgaggcaagcgtggccgggcagtcagcctggcggtagcgggttttgacaccgagctttgatccggcttctggcgcgtgaccggaaatccaggaaggggaatccgcgaacagatggtcaccgaggagccacgggtggtcatgcccctgcacgacccaaagtgtatttgtccggatgtccttttttgcaacaaaccagggcttttcttccgaatcgcggcatccgccgataccgatcccctttcgctgaccaatcgtatagaaagcgagtccgatgtgctttccgatcacacggccttcaggcgtgccgtcaggcgttctgatctcaccctctttcgtcggcagatagcgctcgaggaattcccggaaggggcgttcaccgataaagcagataccggtggagtccttcttctcggcaaccggtagcccgatctttttcgcgatggcgcggacttcagtcttcatcatgccgcccaccgggaaaatcgcgcggctcacctgctcctgagagagacggtgcaggaagtaactctgatccttcccgggatccgatcccttcagaagctgcaccgtgccgtcatcaaggcggcgggttctcgcatagtgacctgtcgcgatccagtccgcgcccatattgaccgcgtgatcgagaaacgcccggaatttgatttccgagttgcagagcacatccgggttcggcgtacggccggcttcatattcgcgaagaaaaatggagaaaacgcgttccttatattccttcgcgaaattcacggcctgaagatcgattccgatcagatcggcgacgcttgaggcatcgatgagatcctgacggctagtgcagtactcgccgttatcgtcatcctcccagttcttcataaagaggccgaccacgtcgtacccctgctctttcagcagccaggcgctgaccgcggagtccacgccgcctgacattcctacaacgactttttccataacccgatctgacggatgcatgcatccagtgattttcaattagagctcataataaagtcttttcaattcccgcatgacagatgcggcccgctgaggcgttccgcatcatgcggacagagtgacaacgggaggtttggccatgacgctgagggtaaagagaatccgtgatttctgcgggcggctgggaattgaggtgccgctgctttcagcgccgatgacgagtattacgacgccggaactggtagctgccgtgagtaacgccggaggtcttgggatcctggcggccgacctgatgagtccggaggaaattatttcggcggctgctcagacgaaacgactcacggaccgtcctttcggcatcaatcttcggattcctccccgtgaccgaggatctctggagcaggctgagaaagtggcgtatgccctttccgacctgagaaaggaactgggactcgaggaaaaggtcgacttcagccgtttcagcgaacccgagtttgagtctcagctggaggcggttctcgaaaccggagtgcctgttgtgagctgcactttcggcggtttccgcgaggtctacggagaaaaactgcatcaggccggggtctatatcctgggagccgccacgacgctacgtgaagccaaggtgcagcgtgcggcggacagcgacgcggtgattctgcagggcgttgaggcgggtggcccgaggctctactttgagagtgatcccgaggaagcctccgtggggctttccgttctgcttcccgaagcggcccgggcactgaagctgcccctgattgcctcaggcggcattggttccgcattctcagtgaaaggggccatgatggccggagcatccgccgtgatggtgggttccgcgctggcctgctctcctgaagccggagccccgaaactgatgcgcgacgcgatgattgcggcgagcgacacggccacctgtctcacggatctcttctccgggcggctggaacgcgtgatgaagaatggtcttatcgaggctctcagcagggcaggtgtccgttctgccggttatccgtaccagcgctacatcatgcaggatatgatggaggcagccgtcagggccggccgtcaggatctgctccgcatgccggtcggacaggcggtcaatgcattctcctgccgcagcgcggcagaaaccctctccgagatccggactgcgcttctcgaagtgatcgaactcatggataaagaaggaaagtaagaatggctcaggaaaagtttctgctgaatggtgaattcatcaagttggacgcgcttctcaaggcgaccggactcgccccgagcggcggtgtcgcgaaggagatgattcagtcgggcgatgtgaccgtgaacggcgaaaaagaaacccgccggggagcgaagctccggggcggggaggtggtatccgttcagggaagcggccgcgagattctcgtcgaagccgccgcgtcctgatttacaggctttcagcggatattccgcagttcccggcggagaatctttccgaccggggacttcggaagcgcgtccgcaaagacaatctttctcggacgcttatagcctgtcagccgttcgcggcaccagtcgcggacttcctgtgccgtgagggaaggatccttcttcacgatcacggccttgatcgtttcatctgacgacttggacttttcaccaatcacgccgacttcgagcaccttcgggttcgacgcaatcacgctttccacttcattcgggtagacgttgtagcccgagacaatgatcagatcctttttgcggtcggtgatcgtgaccttgccctccgcgtccatccagccgatgtctcccgtgcggagccagtcgccgttcataaccttggcggtttcatccgggcggttccagtatccggccatcacctgaggccctctcacacagatttcgccagtgtgggcttcaatctgggcaggatcagcgcagcgcccaagatcctcaaagtcatcactccggatagagatttcggttgacggaagcgggtaaccgacagacccgtcccaaggggtgtccgggagattgccgcagatgccgggggatgcttccgtaaggccatacgcttccagaatcgtgtgcccggtgatcttttcccacttctcggcgaccggtttctgcacctgactgccgccgcctaccgtcatcttgagtcctgagaagtcgagcttcgagaaacgctcgctgttcgtgagcgcgttgaaaagcgaattgacagccgggaaagcggagggcttccacttctcaaactcatcaatgacgtggttgatgtcgcggggatccgcaatcaggacctggcgcgcggcacgcttcaggaagcagagcgtcgcggtgaaggagaagatgtgatagagcggaagcacggtgagcgcggtttccttgccgatcacaaaggtctgggaaatccacgtgccggtctgctcgacattcgcgagcacattccgatgcgtcagcatggcgccctttgcgacgccggtcgtgccgccggtgtactgaagaagcgcgacatccgtgttcttaagcggcacggggcggaaaccggaggagtgtccctgggagagcgcgtcgcggaaacggacgagatgcggcacgctgaagggcgtgatcatttttttcacgtacttcacagcgaaattcacgagcgtccgcttgaagaacggaaagaggtcggcaataccggtggaaatcaccgtttcaacggcggtgccggaaatggcttcttcgagcgttttgccgaaagtttcggcgatgatcaccaccttcgcgccgctgtcagcgagctgattatgcagttcgcgggcggtgtagagggggttcacgttgaccgcgatgcagcccgccttcagaacgccgaaaagggacaccggatactgaagaatgttcggcatcatgatggcgacgcggtcgccgggtttcagggtgctgagcgactggagatagcccgcgaggtcagaggagatgtcattcacctggcgataggtgagcggctgctccatgctgatgaaagccgggtagtcggcgtagtcctttgccacccgttcaagaaggccagggatgctggggcagaagtccggatcgatctttgcaggaacacccttcgcataatgagaaatccacggaaattctggcatttttaagtccttctgttatgactgggaggctctctttcgtaagagaccgtgaggaggagagtcggagcgggctaaggcctgttttcaggccagtgtcaggcagtgccgggcatacgcctcgacatcatcccagttcgtaaaatcattgacggaatgcttgtcggtcggccccttcgtcatcatcatgatgagacggatcaggaatccgtccacgggaccgcagttcgggtagtcaaccttgccggcgaagcatttcatctcgtgcggcttccacggattgttttccatgaatttgcgcgcgtagacgttgcccgctactgtcgctttttccggattacgggcgatagccgtgatgttgaacatgctgttcggcttggcgtcgagcttcgccttgttcttgttcacgaagttgacgaactgcttattgaattcgccgtatcggatggcgcagccgaggagaatgatgtcgtagctgtcgaggtcaacgccttcgcgttcggcctccatcacgtgcatcatggtcgccttgtgcccctctgcttcaatgacttcgcagatccggcgcgagatgcgggcggtgcgtccgtcatggctccagtagataatcagcacatttttcatgcgtaactccaggccccgcggttcgggatacgaacagcggcagcgcagcaactatataaaagggtagaagagccgggccgggagaaacgaggccggaaatcgtggttaatacggatttacgcgcgggtttcagagaatggccagtaagaaaaagcggcactcaaaacctctattttaaaaaaggttcatcttttctgccgcacaaatttttggtcgtccgcaaggctctcttataattcgcatcaatacaggacttctccgccaggcgaccccacatggccattatttccgcgcttttctttgcagctgccctgctcgggctttttcttccgggatatacgcacgaagtgctcggtctctgtttcctcgcggccgtcattctgcataatgccggaagcctcggcttttaccgtgatcttgccgcggggaagctggaagggaagcggaaaaaagatgccgcggtgattctcgcgatcgcggcggccgtgattctccttattatttccggctgcgtgatcttcctgaattacttcatgggagcctcaatcctgccgtctttcgactggatgactcttcacatcgcggcagccatcgtttcattcctcctcatgctgcttcatatgaagcaggagtggagctgacaggaaaaaagaatggggcggataattccgccccgtttccctatcaggctgcgttcttcgcgcggcgggctctgacggccgcggccagttcatcgagcagcggcaccgtgtcctcccagctgaggcaggcatccgtgacggactgaccgtacacaagctccttccccgggacaatatcctggcggccttccaccaggttgctctcaatcatgacacccatgatgtttgcgctgccgcccgacacctggcgggcgatatcctctacgacgctgatctgatttcggcagatcttgcggctgttcgagtggctcgcgtcaatcatcagatacggcaggtgatgggctttgacgagggcttcagaggccgcgcggacgctttcggcatcgtaattcggttctttgccgccgcggagaatcagatggcagtcgtcattgccggtggttgagacaatagccgagatgccgcccttcgtgacagagaggaagcagtgagggtgagccgcagcgccgatcgcgtcgatcgcgatcttggtattgccatccgtgccgttcttgaacccgatcgggcaggaaagaccggaggcaagttcccggtgcacctggctctcggtcgtccgggctccgatggcgccccagctcacgaggtccgcgatgtactgcggggtgatcatatcgagatactcaaccgcggttggaagccccatttccgtgatatcgagaatcaggctgcgggcgattctgagaccgtgattgatgcggtaggagccatcaagatccgggtcattgataagccccttccagccaaccgtggtacggggcttctcgaagtagacgcgcatcaggatttcaagatcaggagagaggcgcttccggacttcgacaagacgcgaagcgtattcgcgcgccgctttcggatcgtggatcgagcaggggcccacgatcacgagcatccggtcatctttcccatgaatgatgctgtgaccggcgttgcgcgcgagctgcaccgtggctgaggccttgtccgtgcaggggaactcgtggatcagatgcgcggggggcgcaagttcccggatttccttgatccgaaggtcgtcggtcatgtagcgttcgaattcttgattcatgtttcacctcagcagtttgaatggggatggggaccgacgtacaaaaaaaccgccggacccaatgtcctggcggtttggagatcgttcgagagtgcagatgaaactaggcgcacgaaacaactctttccgccggacaggggaaaaagttgaacgtaaagtagaaacgggcgcggtagttcattgacattccaaacaaaagaggattgctgcacacttctgaatagcaaccttcagatactctacacccgcggcaggatgatggcaaaaaacgtatctgaaggcagcataaggacttttacatgttgcgggcgcggcggtcgcggacggaccgcgcgagctgatcgagcagcggcacggtatcttcccagctgatgcaggcgtccgtcactgactgaccgtaggtgagcggctgccccggcacgatatcctgacggccttcgaccagattgctttcaatcatcacgcccatgatgttcggggagccctcagaaatctgctccgcgatgtcgctcacaacattaatctggttgcggcagatcttgtggctgttcgagtggcttgcatcaatcatgaggaagggatcatggccggctttgacgagaccttcagaggccgccttgacacttgcggcgtcatagttcggcgccttgccgccgcggagaatcaggtggcagtcgtcatttccggtggtggaaacgatggcggagataccggcctttgttacgccaaggaagcagtgcggatggttcgcggcgccgatcgcgtccgtcgcgatcttgatattgccatccgtcccgttcttgaaaccgatcgggcaggacagaccggaggcgagttcgcggtgcacctggctctcggtcgtccgggcaccgattgcaccccagctgacgaagtccgcgatgtactgcggggaaatcatatcgaggaactcaacgccgatcgggagtcccatctccgtgatatcagagatcagtccccgggccacgcggaggccgtggttgatgcggaaggatccatccagatccgggtcgttgataaggcctttccagccgaccgtggtgcggggcttctcgaagtagacacgcatgatgatttcaaggtcccccgcgagacggcggcgttctgcgacgagtcgctccgcatactcacgggccgctttcgggtcatggatcgagcaggggccgacaatgacgagaaggcggtcatcttcgccgtggataatccgatgggcggccgttcgggcacgctgcaccgtggctgaagcgagatccgtacaggggaattcgtgaatcagatgcgtaggcggggtcagttcccgtatttccttgatccgaaggtcgtccgtcatgtagcgctcaaattcctgatgcatgttgttatccgtttatcgtgatgggttaatgaagaggggttggtgttcaggtacaaaaaaaccgccggaatccggcggttttttcttgcgttcttgatcagtgcttgaaaacgtcaggcgcaccaaagaactctttccgccgggagacgaaaaaagccgtaatagtagtaagcgccgtaaacgtgattcagcatttgatctggagtcgcagtaaaagtgtgacagtgttcagagaactctactcctaaccggctgataaaagcaattccgcttttttcagccggctggatatcagttcatgaagaagatcacggtgaggtgataaaacaccggtgccgcaaaggtgagaggggccatgcgttccagaatccctcgcgtgatgtagagattgtcgactgagttatagcgggcgccgagactctttttcacggacgagatcacgaggtcacccatgatgccagacacaatgatggcgagtgtcatgagcccggcctgccagagacggaacggcgtaagccagtaaagcgcaagaccgcagagcagtgtgatgaagctgccgacaaaaacgcccttcgatgtcttgttcgggttcgacatgagaggcttgccgccgaggatcgaactcatcagcaccgcgaagaggtcaccgaagaagatcatcatgaggaagtagacgagcatcagcgggccgctggaagcaaaccggttgaagtcgagaagcgaaatggccggtgcgtggctcacgcagaaaatggaaagcatgatgccccactgcaccttggcaacacgctccagatagcggtcagtgtcatgcgttgccgccatcacaaccgggagcagcaggaaaagatagaccggaataaacagcgtgaagaaccagtactgctcaaaagcgatcaggaggtactgaagcgggatcgccacatagaaagcaatcacgagggcccagtgatcggtgtaatgggtcggcgtgagagcaatgaattctctcaggacaaagaacgagagaaaggcgaaaacaaccagaagcgctccctgtcccagccagaacgcgacggcaaaaataccgatcagccaccaggcggaccgaacccgcgagttaacaaggcggatccgttgctgctgctgggttgtggtcgcgcgggatgaggcccactggccgtacccggtcgcaaccgcggcgagcagaatcaggacagagaggatgaggagataagcctcttcaagatgaaaacctaagcgcatcatcgtgaattcctcctaggactcagccagctggataacggcattgcgggcgcggttgaggaagtcctctttgctgtcatcaggtgagtgtggaagcggcgcgccgaatcggactgaacagatcgttgggatcggaatcagagtgcctttcggcatggagcgatgaaggttctcaatgtagacagggatcagctcaacatccggaaactcgcgcatcagacgccagagaccgctcttaaagggagagggcagaggctgaggacggcgggtgccttccgggaagatgatgagagatgagccttcgtgaagcgcctgaatcagcgggtcgagaggattggcgtgcgctgtatggtgccggtcgatcagcacaaccttcagttccttgatagcgatgcggcggcgcagagcgcccttttcccagtagtccttggcggcgaccggacgggttttcgcccggagctcagccggaagggacgaccagatcactatcgcgtccatgtggctcgagtggttggcgaaataaatgcgctgtgtacgtgacggtgcgcagccctgccactgcgggtacgcacctaccagcagtctcgtaagcagggtgagcagggttacaacctgaaaagactcaaacataacggtcactgaataatcgtagataacccattatctcactaagcagcaaaataccgggttggcgcctgagatcgctactttttcccagactctttctgtgttcccgaattggcttttgtgacggacagattgtcgaacggcccctcaaccacatattcggaggagaggatgtgagaaagcggaaccttgaggccgaaggaggcgataaaaccgccgataccggcaatcgggttcgcgagggtcagggcaagtgccggaccctcaatatggatgtcaggcagtacgagcaccttggcgtccactcgctgacggggaagactgacggagccctcggccacaatggacgccgccgatcccgataccgacatgttcttcgtcgagagaacgccggaatgaatctgcccggtcatatcaatcgtgtcaaacgagaaacccttgccgaaaacatccctgaagtcgagcgtcagccgcttgagcagagactgcatggagagcagagagaggaaccggccggccagacctggatccacctgcaggaaccggccgcctctgatgtgagagaccagatcgccattcagattggcggcattgaagtcctgcggtgctcccttccaggagagattgagatacacctcacccggagcgccgctgatgacgccgctcggggcggagagctccttcagaagccgtccggtatcgcgggaaatcagttcggcgctgaccttggtgagattctctttgctgttctttgtccaggagcctgaggctgtcagtttggctgccccgttatccgcggagaggttcttcagcgtccagacatgaccgccgcctgaggtggcagctgaactcgccacaatcgcaatgctgccaagcttcatatcctcgagctggagatcgcggattcggagatccatcgacgggagctgctccgcaggagtcgtggcgatgtagcggcggaaccgggtgccgccttcctccggaatatagaggtgggaaagctcacctcggatttccgcgggacgtcttccggccgccgcgcggtagcggacgtttccggaagcgctggaggaatggagactcgcgagccaccagtcaccctcgggttcaattgcgaggctgacatccgggaacgagcggcgccctatcacgaggtcttttgtttttgcccggatctccgtaatggggagcgggagctgggacttggccacagcggacgaattcgtgatcggttccagttcctgctgccagtgattgacgttgatacggtctgtcgtgacacggacagagagccccttcttcgggagtttcgcagcctcaccgacaccgaccgccgcgttgagcggctcatagccctccgtcttcagaggcttcatggtcgcgagagcgttcagaacgctgccagcctttgcggtgagagaaactgtgccgtccttattcgtatcccaggtgaacactgaagggagggtttcgtccgctctctttttaaagggatgcgggaaatcgacagcgatgcccttcatgtcggaattgacggtaaaggcgagattgctgccgtccgcgacacggacatgcacctgcgcgtccgagctgccggaaaaatgagcgagaaccggatcaagcgatccatcactgccgaagagccgtttgagatcatcaatccctgcgcgggctttggcatccaccaggatggagtcatcgtctgccatccggagggtgccccgcgccggaatcccccagactgaagcattcaggccgtcagaccagaagtttccctgcgtgaaccggatggtgccggaggcgttatcgaattccgggatgttgtttccaagatcaacccgattgctgtcgagacggacggtgccggcgacaagggttctctcgggggcggaaagcgggatgctgagcgcaagagagagggagccggtgccggtggcccgtgccgggtcgaggaagtgatcaagccatccagaaaccggggactgcgtgaggtagtgcagcatctgctgcgagcttcctgaggcgcgtccgctgataaagaggtttgagtccggagcgtgcccgcccatgtgcgggatttccgcgatcacgcctcggagtggcacctggtccgaaatgccggtgtctcccgcaatcaccatacggtccgcttcaaaaaggaactgtccgttcacacggctgacaatcggccagtcgccgccgatcacccgagcaccggtttctgttcgtttgtcagaaggcagaaagtcgaggcttgaattccggaagttacccgtcacgaggaagaggccgctttttgcgtcccgtccgttataggggaagcggtcgatcgggccgtaccactcgactgcggcgttctgggcggtgcccccgagaagcgcctgatgcagccagtcgatgattccggcaccggccagtgtcggcacgtacttataagcggacttgacgaggctgttcgcggctgtggctgtcacgcggatagttccgctgccgccggtgtcaatccagtccgcatcgcccttgatattgatgtcctgattgtgaagttcaatatcgcggaaattcagttcaagcttcggagagacagaccagaatgccgtgccggaaagcttccggaacggaacccgtgggttcgggaagatgccggggaaagaggcctcaccgttttctccccaggctttcaccatgccggtctcggggttcgcggcaatgctgccattcagatgccggacaccgggcatgccgggaatctcgggatcacggtccgggatatcgcggaaactgacatcgcggaagtcggaggtgaaatcccagacaggcgttcctttgggagagccaagaagagcgaagcggaagttttcgagctgtcccgtgggggtcatctggcgcatgagcgccgccgcgtcactcttgggtgcaaacccttcgagagcagcggccgcttccttcaggccaagcgagtcgcccgccgcattgacggtgtcatgcgtatggtcatcggagagcgaaattctggcgtcagccttcagtgtccgggccggattcccggaggactgaatagaaagctgaggaatggtgaagaccgcgagattctccttcttatcgagttttccatcgaaaagcgcggaagcggacacgctgaaagaccggtcggaggcggatgcgggtttcaggttatcaaggcttaatgtcccgaggagatggctcacagaggcgtttgcatagtcagcccagagtgttccatgagcgccggcgccgctcaccgggagcttttccggaagagcccggattaccggcatcagatccttctgcgaaaaatccgcatagatgcggccgtcccacttcttccagtcgtcagcgcggcggaatggatgccggcggatggagaagcggatatcaagcggctctgcggtctgtccggcgacagcaaggttcccctgaagaccggtgttccaggacttcaggctcttgatataagagatgcggccatcctgaagctcaatcgtcgggaattcagcattggacgcgtcgcggtacaggatccggcttccgctcaggtggatctgcttctgcgcgaggagccagctgatgaagccgccgctttcggattcggtcccgaagtcaaccgtgatgccgccgatatcaaacttggcaccggagagacgggttaccgtcagattggggcttttgatcgagagattgacgaagattggtgtaagccgggggatggaagaccagtcgagatcgccttccgcttccggcacccggagagcccggggagaggcgtcagaactgatttcgacgtttttcagtgtgagtttcggccagtaggtgtcccaggcgggggaaatttcgccgatccggacattcgctttcagtgtctttgataaataggcggatatctcgtcccgatagtcattgacgtgggggagaaccacaaaacgaagagcaatgatgaacagcgcggcaagcaaatagagtccgatcagcgtggccgcgatcactctcagccacccgcgtggatgcttccaaaaagcattgccctccgcctttttcatcctctccgccgcccaacaaagaccgaaaaaaatcctacggaaaacactgtaacacagcgaggaaagctgaaaagaggaaaagtgctaatccggactgaagggccccggcgggaaaggcgagtgcagaggagctggaatcccgctcttcaggtatgagtttccatagattagggggaggctttatcagaggagagccttgctgcgccataatccaaagatcagctgtcagaagtcaatcagaaaaaagggttccccatgccgaaatgtgatttccgaggagttatcgagaattccccctttgtcgaacgttctctgaagagcatgtatccgggaacggatgaagcggagctgcccgcgaggctggaagcgctcgctcagatgtcgccctcggccgaagagatccgctccgagatccgggagacggaggacgaggaggcgcttgcgcttcgcatgcgggaggtccggcgccggatacttgtgacactggccgcgcgggacgcgaccgggcttggcggttatccggaggtagtccgcgtgatgacagagcttgccgaggagacgattcaggcagctgtccgctgtcagacccggctgctcgcggaacggttcggtgttccgatgtcagaggacggcgtgccgcaggatctgctcgtcgtgggtatgggtaagctgggcggcgcggaacttaacgtgtcctctgatatcgatctgatcttcctctatgactgtgatggcgaaacccggccgacagaagaatttccggcccggcggtcgctctccaaccgcgagttttttgagcgggtggcgcgccgtgtgattccgatgctgtccgatatccgcgggtgcggttttgtgttccgcgtggatatgcggctccgcccgaatggaacgtcaggcccgatggtctgctcaagcggcatgcttgaggagtacctctatacgcagggccgcgactgggagcgcttcgcctggctgaagggaagaattgtgtcagaaccggtcttctcgtcgcctgacgcctataagtcgcagtgcgcctcgattgagtcactggtccgcccgtttgtctaccggaagtacgtagacttcagcgccatctcgtcccttgctgcgctgcacgacatgatccgcgcggaaaccatccgccgcgagctgaagcatcagggacagggggtcaatgtcaaacttggcagcggaggtatccgcaatattgaatttatcgcgcagacctttcaggtgatccgcggcggccgtgacccgcttctccgctcccacagcacgcttcagacgctggggtatcttgcggaccggggagctctgactgcaagtgttgctgaacgcctgaagcgaagctacgtgatgctccgcaatctggagcacgccattcagtatgtggatgatcagcagacgcagctctggccgacagatccggcggcgcgtcaccgcgttgccatgctgtatggagaagaggagtcagcgctggacgcgaagctgcaggaagtgcgggaatttgtccggacgacatttgactcgattttccacgctcaggagcagacagaggaatccgcctctgactggcctgaagggtggaccgccgggcttccgggtaccgagaagccgctcgccgcgaagatcgcctccctcgggtatcaggattcggattcactcgcggcccgggttctcgctctgatgtcatcccgcaatatcggccggagcaacggggctcttgaacgcatggcgagtgtgctgaaacaggtgtttgagcactgcaccgaatgggccagatttgatacaagtacggtgagcagcgatgaggagctggatcgctgcctcgggctgcttgaagtgattgcggggcgcccgacctatgtggcgctgctctaccagtatcccgatatgctgaagcgggtcggccgggtgcttgcctcgagccgctgggccgcggattacctgaaagagcatccgatcattctggatgagctgatggatcagcgtgttgaagagttcagtgacgacacgccggcggactggtccgcctgggctgaccgtctccgcaccgaactccgggctgcgtcagatgatcaggagcggcagcttaatctgatccgcgatgctcatcacggcgctgttttccgtcttctgatggcagacctcgaccgaaggctctccacggtgcggctcgccgatcagctttccgctctggcggacgcggtgattgaggttgtgctggagctggcgtggaactctctcttcagaaagtttgaaggggatccgaagttcgctgtgatcgcctatgggaaacttggcggcaaggagctcggctacgcctcagatctcgacctcatttatctctatgacgacgatcggatggattccgatatggtctacacgagactcgtgcgccggatgatgaactggctcacgatgcagacgtcatccgggcgtcttttcgaggttgacctccggcttcgtccgaacggtgccgatggtctcgtggtgtcctcttttgactcctggcagaagtacgagcggaatgaggacggcaagggagcatggacctgggagctccaggccctgacccgggcccggttctgcgcaggtgacccctcgatcggtgaaaagtttgaggctgaaaggaaacggattcttcagagcccgaggaaccgcgcggagcttgcctctgaggtgatcagcatgcggcagcggatgctggacgggcataaaaacccgacagagcttttcgatatcaagcatgaccggggcggcatggtggatattgagtttgcggtccagtatctggtgcttgcctattcaaaggatttcccggagctcgttgggaatctcggcaatattcatctgctcgccatcgcggcggatgccgggctgatttcgaaggaccttgcccgtgattgctctgaggcctacaggaagtaccgggccattcagcgtgaggttcggctcgctcagggggatggccccgtgagagtggatcccgcccgggttgagggagaaatcgcctctgtgaaccagctttggaatgacgttatcggcgctgccgcgcagacgggtgaggaggcgcatcatgccgcgtcttgagtgcgactacgctgcgccctcctgggcgcctggcgcgcatcttcagaccattatcccggcgaggatttctccgagacctgaggttaagtaccgccgagagcattgggacacgccggacggggacttcattctctttgactggtgtctgcctgagcccaaagacccgaaaaccccgattctgattcacttccatggactggagggggcgtcagacagccactacgcgatcgctctgatgcatgaagcgtcgattcggggctggagagggtgcgtggcctgctacaggagctgcggcggcgagctgaaccgtctcccgagagcgtattttgcgggtgataccgctgagtgcgcatgggttgttcagtgtgtgcacgcccgttttccggaggctcccatttatctcgcggggatgtcgcttggcggcaactatgtcgccaagtacgcaggcgatatgggggagtccatcccgtcctacgtcagggcgatcgcggcagtcggcgcgccgcttgacctcgtggccggctccgaaatcgtcagccacggcgcgaaccggctctatgccaagatgttcctcagcacgctgcaggaaaaggtggagaggaagatccagattttcggtgactttattgacgtccgggccttccgccgggtgaaaaacctttatgagtttgacgaggtttacaccgcgccgatccacggattcaagaacgggatggattactggacccgctgcagcgcgaagtacgtactgccggatgtcagagtgccgctcctgctgctgaatccgctgaatgatcctttccagccgatctgggcgctgccgacggaaagcgacatatcggactttgtgttcctggagcagcccgctgagggcggtcatatcggcttccccacgggaaagtggcccggtacgattgactggctgccgcgtcatattctgcatttctttgactttgttgaaggctctccggcattaatcaggaataaataagacgtatcccgtaaaatttcttcttctttactgaagcagcccgccggacggcgggctcggatccgtgaccggaggagtcttccggcccggcgtaagttaggacgaagaactatgggtaagaagcctcagattgctgttttgctagcgaacacaggaactccggatgatccctctcccgaagcggtgcgccgctatctgcgggattatctgaaggaccggcgtattgtcgaaatgccgcctttcatctggctgcccatcctgtacggcacggtcctcaggaagcggccggcgaagtccgcggcgaagtatcgccagatctggacgccggaaggttcgcctctcgttgttcacgcgagaaaaatcgcggaaggcctgaatgaacggatgaaggcttcagaccttcccgtgcgcgtcgaatattccatgtgctatgggaatccgtcgcttgacgcccagatccggaagattgtggccgaggggatagagaagctctttatcctgccgcttttccctcagtattctcctcagactgtcgggtctgtcatggataccgtaggcaaaacctatcggacactgcggaacattccggcaacgagaaccgtgaagcggttctgtgaccgtgatgactgggtgcaggcgatggcgcagcacgtccggaattactgggcggagcatggcgaaccctggagcgaaggcgggaaactgattttcagtttccatggtgttccggaggagtgtgtgaaggaaaagggcgacacctatcagcaggaatgcctcgactcctcaaaggcgatcgccgcggcactgaatctcacctctgagcagtgggaaactgatttccagtcccggttcggcccccaggaatggctgcagccctatacgattgaacgcgcgaagacgctcgcctccgaaggcgtgaatcgtctcgatatcatctgcccgagctttacctgtgactgccttgaaacggatgaggaagtcgatctcgggatccgcaaggtctatgaagaggccaatccttcaggccattttcactacattccctgtcttaacagcacgccgggtgccattgatttttatgaaagactcatccgggatgagcttcagggctggttataaagggttaacccttatgtaaatctgcttccgccgaccccatataagtttggtagctctttttatgcggatttggaggaataaatgacggaagcagcatgcgacaaacagaaggctaaggcacaggacacggaaaacgtgatgccggatgctgcccaggcggatgcgaagaccgcctgcgggtgcggaaaggaagccgcttcttcagaagaaaagaaggacacggcagtggctgagctcactgaaaagcttcagcaggccgagaagaagatcgctgaaaactacgacatgtatgtccgcgcgatggcggaagtcgaaaacacccgcaagcgcgcagaagccgatgtgctgaaggccgagaaattcggtatcgacaagttcgccacgaatctgcttcccgtgatggattcccttgagaaggcgatggagcatgcccagaaggaagagggcccgatgaaggacggtcttctcgccatctaccggcagctggttcacgccatggaagtttccggcatgaagagctttgaacccgtcggtgaaaagtttgatccgaaccggcatcaggcagttaccgtggttcctcccgcggaagggcaggagtccggcacggtcgcaacggttttccagaaaggctggatgatccaggaacgggtgctccgtcctgcgatggttgccgttgcgcagggttgaaaaaaaacaaaacgtccccatatagggattacgggtgatccaaacaggtcacctcagaactgatttgactaatgaaatgaggctgttcaagacagcggcctcgcagataaaggactggcaaataaatgggcaagatcattggtattgaccttggtacaaccaattcagctgtggctgtgatggaaggcgacaaggtccgcgtgattgagaacagcgagggcgctcgtacgacgccttccgtcgtggcgtatatggacagcggcgaagtggtcgtgggcgtgcccgcgaagcgccaggccgtgacgaacgcgaagaacacgatttttgaggtgaagcgtctgattggccgtcgctatgacgatccggctgttcagtccgccatgactcatctgccgtacaagattgttcaggccgataacggtgacgcctgggtgcaggtgcagggtgaccgcaagcttgccccgcagcaggtttccgctgaagtgctccgcaagatgaagaagaccgctgaggattatctcggcgagccggtgacggaagccgtgattacggttccggcctacttcaacgacagccagcgtcaggcaacgaaggatgctggccgtatcgctggtcttgaagtgaagcgcatcatcaacgaaccgaccgcttctgctctggcctttggccttgacaagggcggcaagggtgaccgtaagatcgccgtgtatgaccttggcggcggcacgttcgatatttcgatcgttgaactcgcggacgttgacggcgacaagcagtttgaagtgctgtccacgaacggcgatacgttcctcggcggcgcggactttgaccgccgtgtgatggactacctgatcagcgagttcaagaaggatacgggcatcgacctctcgaaggactccctcgccctgcagcgtctgaaggatgccgctgaatccgcgaagatcgaactctccagccgtcaggaaacggaaatcaacgttccgtacatcacggctgacgccacgggtccgaagcatctgaatgtgacgctgacccgctccaagttcgagagcctcgttgaggacctcgtgcagcgttccatcgaaccctgccgcaaggctctgaaggatgccggcctgcagccgtctgacatttccgacgtgattctggtcggcggtcagtcccgtatgccgcgtgtccaggaagtggtgaaggagttcttcggtcaggaaccgcgtaaggacgtgaacccggatgaggctgtggctatcggtgccgcggttcagggttctgtgctttccggcgacacccgcgacgtgctgctgctcgacgtgaccccgcttaccctcggcattgagaccctgggcggcgtgatgaccccgatgatcaagcgcaacaccacgatcccgacgaagcatcagcaggtcttctcgacggctgaagacaatcagccggccgtgacgatcaaggtctatcagggtgaacgtcagatggccgaaggcaacaagctactcggcgagttcaacctcgaaggcatcccgccgtctccgcgcggactgccgcagattgaagtgaccttcgatatcgacgcgaacggcatcctgcacgtgagcgcgaaggacaaggctaccggcaaggcgaaccacatcgagatcaaggcgagctccggtctgtcggatacggaaatcgaccgcatgatgaaggaagccgaagcgaacaaggctgaggatcagcgccgcttcgatctggctcaggcccgcaatcaggctgatgccgccatcgcccaggttcagaagaccctgaaggacctcggtgacaaggtggatccggctgaccgtgctgcctgtgaagctgagatcaaagctgttgaaaccgctcagcgcggcgaaaacaaggacgcgatcaacagcgcagttgagaagctgatggctgccgctcagaagatcggtgagaagctgaacgccgctgctcagcagcagggtgccgctcagcagcaggcctccggtgccaagccggaaggcgctgccaagtctgacaagtccgatgacgacgtggtcgacgctgacttcaaagaagtcaagcattgatccgcgcccgatgcggcaatgaagtaatgtaaccgcacacagggtcgattccccgattaagggaaccggcccttttgcggttttgatgcaaattgattgattaggatgctgcagaatttgcggtgtttctttccacagcggacggcaaaattaaatggctgatagagattattacgaggtcctgggtgtttcgcgcgatgctacggctgaagaaatcaagaaggcgtatcggcgtctcgctatgaagtaccacccggatcggaatcctggggatgagaccgcaaaggaaaagtttgaagaggtcggggctgcctatgcggcgctgtccgacccgcagaagcgcgcggcctatgaccgattcggaaaagaaggtctgaatggcgccgccggcggcccggatatgggcggcatgggcggaatgaacggagccgatattttcggaagcgtgttcggagatatcttcggcgacatgttccgcaaccaggcaggcggcggccgcgcggatgcgcgttcctacgcgtacccgggcgaggatctccagtatgagctcacgattacgctcgaggatgcggcgaagggcatgaagcccgagatccgggttccggtctgggatacctgcgaaacctgtcacggttccggctgcaagcccggcacctccaagacgacctgcccgcactgcggcggccgcggtacggtccgtatgtctcagggcttcttctcggttgagcagacctgcccgcactgccacggcaccggtcaggtgatcaaggatccgtgccctgactgcggcggcaccggtcaccagagaaagacgaagactctccaggtgaacattcctgccggtattgatgacggccagcgtatccgcctttccggcatgggcggtccgggcacgaacggcggcgagccgggtgacctctacgtggtggttcatgtgaagccgcatgacctcttccgccgtgagggttccaacctttacgtggatcagccgatttccttcgtgctcgcggcgctcggcggcgaaatcacggtgccgagtctcgatggcgagtcccggatcacgctgccggaaggcacacagaccggtcaggtcttccgcctgcgcggcaagggtatcaagaacctgcgttcaggtgcgaagggtgatctcttctgccgcgtgtatgttgagacgccggtgaatctgagcgccgagcagaagaagatcctgaagagcttcgatacgagcatcgcgaagaacgaatcgaagcactccccgaagcatcagggattcctggatcgcgtgaagaagttcttttcggattgactcgaatcgttcctgaagtggatcaggaactgaaaatcgggaaaaccattcagagcagcacctctttccaaaggaagaggtgctgttttgttgtggagaaccggggcaggttcagatgtcgagcggaacgccctgtggggagtcggtcgcctgctgcacggcagttctgacaatcagtgataggccgagagcgccgagcgccgccgcgatcagaacgattgaagtggagaccgtgacggagtagaggccgaccagaggcgagacgatgccgccggcgacaaagcctgaggcgccaaggaccgctgaagcggcgccggccatctttctctgtctcgacatggcgattgaagacgcggttgggaaagtggttccaagagacacgagaagcagaaagaagcagggttcaaggagccagagcgaagcgcctgtgagcagagatcctccgacgaggagcgagaagagcacaagccccgcggagccgaagacgagaacccgttcaggattcatcattttgctggacaccaccgcgccgagaccgataccgcaggcattgataccgaacatcacgctgtagccgatgctggagagcccatagatcttctgatagataaagggggaggaagcgatgtagccgaacagcaccgagaaggcaaagcactgctggagcaccgtgagcctgaagcagcggtctttgaaaacagagccgagtgagaggaaaacggttatcggattccggggattgcggcgggtctcatcgagtgtttccggaagcttggcggcgagcgcgagaagcgcgaccccgatcagcgtgagaaaaacaaaaattccgcgccagtcagtgacggtgatgagaagcgcgccgatgatcggcgcggtgaccggtgcgatgccattgacggatcccatggttcccatcgccttcatgagctcacggccctcaaagaggtcagtcgcgatcgagcgtgacagcacgatgccgcttgcgcccgcgaagccctggaagaaccggagggtgataaaggtgaggatattgggtgacaggatcgaaatcaccgtgatggcgatgaagagcacgagacagacgagaagcggtttcttgcgcccgaggtgatcggaaagcggtccgatcacgagctggccgacagcgagccccgccatgctggtggtgaggccaagctgcacaagggcgggcgtcgtgccgaagtattcgacctgttccggaagggaagagaggtagaggtcagtaatgtaggggccgaaggctgtcagaaggccaagggtccagagcaggtaggttcttgatatcttcatgctctggattctagtgtttttcagatcgggctccgaacggaaaacctacctatttccgggacctgcgccgagcgccagattgagcgccacggcgttattcagcccgttcagccgggtgctgatttcagaaagagccgcggcgttcgcggatctctgagcggtgagaagcgataggaatccgcctttgcccgcttcgtaaagcgttgaggcctgggcggccgctttctcagccgtgctccgggcaacggtccggctcctcgcttcctcgctgtagtaggtggcagccgagagactgtctctcacgtctgagtacgcctgttcagcggccatccgatagctttcaagcgccgcggtttccgcggcctttgcctgggagaaccgcgctgagcggcgtccgaagtcaaatatcggaagatcaagcgagagtcccacaaaccagatcgaatgcgtgaagagatcagagagtgcccgtgactgcgtcccggcgctcccggtcagcgaaatactggggaagaaggccgcataagcgacagcgactgaggcatgggcgcttcggagcatcgcctcagcctcacggacgtcgggccggttctgcagaagggtgctggggataccgggacggatcgcgggcacttcggggagtccgtacggagaatccgggagcttcagctcaggctgcgcggtgagaagcgcgagcgcgtgaagatgctgctccgcggcaagcttccagctgctcaccgctgtgcgctgcgtctcaacgtcggaccgagcggtattcacgtcgacctcggttgccgtgccgagcctgtattttgcttccgtaatggagagagtctttgccagggacgcaagagtgttctctgaaatcgcgagactctgccgagcagcgacccatccgaaatactggcgggcgatattgccggccagtgacagctccaccgcccggaccgcccaaaggcttgagtccgcgctggcaagcgccgcttcacgggctttgcggttcttgccccagaagtcgatctcccaggcggcttcgccctgaacgcgatggatcttggacttctgataagcgccagacgtggcgctttccgtccggccgttggatgcgtcagctcccagtgaaatatttgggtagagcgcggctcccgtttcctcggcgtacgcccgtgcctcttcaagtctcgcgagcgcggcccggacgttatgcgagcggctgagaccggtttcaatcaggctgctcagcgtcggatccgagaattcgttccaccagtcgctccgggcgctgaaagcgccgccctttacctcaggcgcgttccaggtatccggcagcgaagcccgggtatcgggaagcgttttcggaagtccgggcggcgtggagcaggaggcaagaagaagcgaagcggccaggccggacgcaagagtaatggcggttttcttcattacagctctcctttcccgggtttgtcggacgcggagtcaccgtcaggcggcgtgtccttcgtcttctttcgcatcttcgtgaaccaggtgaagaacaccggaacaaagatcgtcgcgatgaaggtcgatatcagcatgccgccgaacacaccggtacccatcgactgacgggcagcggatcccgcgcccgccgcggtgacaagcggcagaacgccgagcatgaaggcgagcgacgtcatgagaatcggacggagtcggatgcgggcggcgttcacggcggcctgggccggtgtatcgccgagcgccagtctctggagcgcgaattccacgatcagaatggcgttctttgcagagagaccgatcagcacaagaaggccgatctggaagtaaatgtcgttgctgaacccccggagcgtgagtgacacaaaggcgccgagaagcgcgaatggcagtgcgaacaccacggcgaccgggagcgaccaccgttcgtaaagcgcggccagaatgaggaagacgacaagaatgccgaacccgaacgcggtgactgatgagcttccgatccgcttttcctgccacgcctgatcaacccattccaccgtatagccttcggggagcacctgctgcgcggtttcctcaacaatccggatggcgtcacccgaactgatcccctgtgtcgcggcacccatgaactgcgcggcgaggtagccgttcagacgcatcatgctgatcggacccgatgtgcgtttcactgtaatcagcgtggagagcggaatcatcgcgccgcttgaagaccggacccaggaccggccgagatcctcaggcgtcatgcggtaggcggtatccgcctgcacgatgacgcggaggagcttcgagtcacgggggaagtcgttcacataggtgctgcccatcagcgttccgagcgtgtcgtaaacatccgcgatgctgacccccatggcaacggccttgtcttcgtcaacagagaccgagagctgcggggattcagcctgcaggaagctgcggagcgacgtgagttccggacgcttgcggagggcttcgacgaattcgtccgagacggcctgaagcgccttggggtcatcgttcccgcgggcctcaataaagcctgtgaaaccgttcgcgctgccgagtcccggaatggcggcggggagcgtcgcggtgccgatcgcgtccgtacgggcgttcgcgatcttctgcagcatctgacggacatccgtggcgctgacggcgcggtcttcccagagcttcagtttcgcagtgatggaggctacgtcaggccggaagtctgaagaggtagcgtcacgccccgcttcagtcagcacggagtcaacccctggaagtttctgaaccttagctccgacctcggccgcgagtttctgcgttctcgggtaagcggagccttccggaagccgcagcaccatgcggacgagcccctggtcctcagaaggaacaaaggaggtcggagtgatctgcacgagttcccacacaacacccgtgatcgcgaccagaatgaccgcgcaggcaaggctgtgcgagagcgcgagctgcacggtacggacgaacttcgccgtgatcttatcgaggcaacggttgaagaacacgaagaacgcgggcttctctttgcggtgctttttatccggtgccttgaggaagagagcgcagagagccggcgtgagggtgagagcattgaagcctgagatcacgacagccatggcaaccgtgatggcgaactgccggtagagttcacccgccatgccgccgaggaaggcgaccgggacaaagacagaggacagcacgagaacgattgcgaccagagctcctgacacttcctgcatcgccttgaccgcggcatcgcggggcgagagccgttcgtgaatcatcagacggtccacgttctccagcacgacaatcgcgtcatccaccacaatgccgatcgcgagcgtcatggcgaaaagcgtgagcgtattgatggagaagccgcagagccagagtcctgctgtacagccgatgagtgacaccgggaccgagatcatcgggatcagcgtggcgcgccaggactgcaggaagaggaataccacggccagcacgagaagaatcgcttcaccgatcgttgtgatcacttctttcagagacgccttcacgaaaactgtggtgtcgtctgtcacggtgtaggtgagcttgcccttcgggaaatgctccttcagctcatccatccgctttacaaccgcgttggcggcagcaagggcgtttccgccagtctgcaggaagacgccgatgttcgcggccggatacccgttctgctccgtctggaattcataattccggcggcccacttcgatccgggctacatcacgcagatggatggtgccaagcgtcgggtcgctcctcagcacgatgtttccgaactgctccggattcacgagctggttgcggccggttaccgtgtagaagagctgctggttctcgggggtcggcgctgtgccggttcggccgacaccatactgctggttctgggccgagatcgctttttcaatatcggacgtcgtgacgcgcagcttcgccatccggagcggatccacccagatacgcatggcggattccacgttgccgtagaccatgacgtcaccgatatcgggaacgcgcttcagttcgtcaacgatattgacgttcgcatagtccgccatggcgagcggcgacatgctcttatcgggagacgtgagaatgatgcgaaggaggttatcggaactgcgctttcttaccgtgacaccgacgttacgcacagcctgaggcagttttctctcagccgtacggacgcggttattgatttcgagaacggcgttattcggatctgtgccgatctcgaacgtgcagttgatacggacttcaccgcttgagcggagcgtcgtcgtgtagtagatcagtccctgaatgccggagagctgggcctcaatcggctgagccacggttcgggagagtgtctggatgtcagcgccgtcataggatgcgctgatcatcacggacggcggggtaatgttcgggtactgggaaaccggcagcacgcggacagagatgatgccggcgagcacgatcagaatcgccatcacggtggcgaagatcggcctcttgatgcagaactgggagagcatggcgtcagactccgcggtcaggaggcggcacgggaagcggcgggtgagccctttccgggatcggtgacctcgcggccgtcacgaagcctgagaatctggtcggtaatcacatgatcgccggtcttcagccctttccgcacaatccagctggtgtcatcccagggaccgacttccaccggaacgcgctttgccttgttgccctcccggagatagaccgcgtaagtgccgtcagaaagctggaggacagaggcctgcggtaccttatagacagcgtgttcggtcccggtctggattctcacccgcacaaactgtccggagaggatattggcgggggaggtgatctttgcccgcatctgacgcgtgccgaggtccggtgtcacggactgagatacatagtcgagcttcgcgggaatccgctttccatccgaattcacgacttcaaccgcgttcccgagagtcatcgaggcgttcccgagatcgcggtcactgatggcgaagacgaccttcagatccttcttctgcgtgagcgtggtgagctgcgtcgactgagcggtaatcagggcgcccgggttcacgagagccatgccggcaatgccgtccgcgggagcggtgatctgcgtgtgggagagcgagatggaggacgcggccgcctttgcctcagcggccttcagagctgcacgggccaccttagccgtgctttgggcgtcatccagatctttctggggtacggcctgctgcgcgtagagtctgcgcgtgcgggcgagttcgcggtcagcctgctcaagctgagccttcgcctggttcgccgcagcgcgggccgcttcgaggtctgcctggaaaggtgcctgatcgatgatgaaaagcggctggccgcgtctgacgaattcgccttccttataaagctgccgcttcaggatgccgctcacctgagagcggatctccacctgatcggcgccctcggtctgacccatcacttcatgccactcgggaacatcttcgggagttacagcaagcgtagtgaccggcacaggctttgtcggagcctttgtgtcggtctttttcgagcagccaaggacgcaaatggcggagagtcctgcggccaggatgattttgtaccactttctgggcatgatgaacctttgagggccttttttaaggcgtagattgcccagattgtatactgctaacgggttgaaaaacctcagttctttcgagtaaccaggtgagtgcttctccggatacccgatctttcagtttttctctcacaagccggtgatagtcattcagcttcgctatttcgtccgacttcatcatgcggggataaatgagccgcatgtcgatcgggcagagagtgagcggacggaatgtcatgaagcggccgaattcgcttgaggcctgcggaaccggcgtaatcagattctcaatccggattccccagcgtccttcgcggtaaagccccggctcatcggagaccacgatcccttccacggtcttcgtggcttcagagggaagcgagcggggagaaatcgagtacgggcgctcatgcacattcatgaagaaaccgacgccgtgacccgtgccgtgcccgaaatcggcatccacttcccagagcggggcgcgggcaaaggtatcgagctgagacgcgtaggcgccttccgggaaataggcgtccagcaggtgaaggtgtgagcggagcaccgcggtgtaatcccgccggatcgcgtcatcaggccgatgaatcggcgtgacgcgggtgatatcggtagtgccggactcgtactgggctcccgagtcaataagaagcaccgtgtccccatccagcaccgcgttatgttcattagacggctcatagtgaggcagcgcggcgttcgcgcccactgcggcaatcgtgccgaaggattcgctcacatagccacggcctttcgctctttcatcatgcaggcggcggaccacatccatttcagtcactgtggcacccgaagcgagcgcggattcaagccaggcataaaagcggcagagcgcggcaccgtcctcgatcatggcttcgtcgatcagacggatttcctcaggtgtcttgcgggtcttgaagagcgcgagaggcgagaggccttcggtaacacggacctgcttcgggatgcggttccggaagtaatccgtggttaccgccggatcaaagagcagagacgcattttccggaagcgaggcgatggcgtcggcgaacgccgcgtaggatcggacttcaaagccatcagagaggagcgccgccttcagatcagccggaagccgggcttcatcgatgaaaagcatgggcttcccgcggcaaagcagaaagtgggaaaggaaaaccgggttgtagtcaacgtcagacgcccggaggttggtgagccagccgatttcatcgagcgccgaggtcatgaaggagtctgcaccaagcgaagcaagctgcgccaccaggcgggagagtttgctctgacgggattcgggcgcgagcgtatgcgcgaaaaccgtcgaggagggcatggcgggacgatcattccagatctgggacggaagatccagatcctcgcggagcgagatgcctttgggggtaagaagcccggtcagccggtccgcggttctgacgctgagcgaacggccattgatcccgacagaggagccatcgggcgcgtgacgcgacagccactgatcccagccttcgacccccggagcgccgtccttcatcagcgtgatgccggagccttcgagctgccccgaggcctgtgtccagtagcggctgtcagtccagagcagcgcgtcatgctgcgtgacaatcagcgttccggcactccccgtgaagccggagagccattcacggtcagcccagtgcggcggcagatattccgatgcgtgggggtctgatgtgatggaaacccacgcaaacaggttttctttttcgagaagctgtcttagagatgaaattctgttttgaacgtctgacatttcattaatccaatcaaagattctcgcgccggtcgcagatcagaagagctttctcaggctgacgctgaagggaatggtgatgatgccttccggagttttggattccatcatatggatatcctcgatacgccacccggcatcacggaactctgtgagcgtagcggaaacgcggagactgtgacagatcaggcggacgctgccgagcttttcgcctgagaccagcggatcctcggcctcacagtggacgagtgtctgataaggcgcgtcgagcaggggatcggcaaggtcgctgagtgcccgggggccggacctcgcgcggtggcggggaagtgccgtcggcgcgggaccgtcagacgcctgatcagctgaaggcgaggcggcggacaggtcgccctgtgcagtcgcggcgcagccgctcagcacagcggctgacagcatggcgagcagggaaacgagacatgagcgcttcatgcccaaactccgaaaaaagaataatccctacattttaatttccgaagaaattaaaaattccctgatcccctctgcgggaatcaggaaaatgtaaggattattgaatggtattagcggtttcttgaacggccgccgcggcggggagcgagacccgggggcagattgctgcgggtgttgctgtcggtgtagcgggagttgcgttcaaagtagtccgtgctgcggtccgagcgggggccgcgggaaggacggcggcgcttttcggcaccgcctgcgcggtaggggcgttcgcccggcatgctctgcggaaggaagagagcctgatgctcgggcgcgaacggatccaccggctcatagcgcgcgatggtgtcgcggctgcgggagcggcctggagccttgcggcggggcgtgtagttgatcgagttgccgaagttatcaggatcgaaacggtcagagcgttcagcgcggtcaccccgatccgagcggtcggagctgccgcggcgggaggaagcctcagggctgcggcgggaggtgctgcgcttcacctgatgacggcgggcggcaccgcggcgttcaggcgcggagctgtcacggtcagagcgggagtcttcagcggagacctcggaagactcggaagcttcttcacggctgcggcggggagccgcggcggggcgtcttctcgcacggctctgctgggagagacgctgatgatgattttgctcctcgcggcggtcatcctctgcgagatcctcaggctggggaccggcgtactgagcgggaacgatcaggttgatcttttccttcagaagcttctcaatcgcggaaagcagcggacggtcttcgggcgacaccaggctcacggcgtggccggggacgccggcacggcccgtgcggccgatgcggtgcacgtaatcctcaggcacatccggaaggtcgtagttcacgacgtggggaagctgttcgatatcaaggccgcgagccgcgatatccgtcgcgacgagcacctgaaccttcttatccttaaagtcagcgagagccttggtgcgggcgttctggctcttattgccgtgaatggcggcagcggtcagaccatccttgatcagctgctggcagaggcggttcgcggcgtgcttcatacgggtgaagaccagcacctgggaccacttttcatcgacgatcagatcacggagcagttcacgcttccggttcttcggcacggcataagcctgctgttcgatcagggccgattccttattgggggaaatttcgacggagaccggggaattgagaagggagtccgcgagtttgcggatttccgggctgaaggtggccgagaagagcaggctctggcggttttccgggatcagcttgatcagtttccggatgtcatgaatgaagcccatgtcgagcatgcggtcggcttcatcgagcaccaggaacttcaccgcggagagcgacacatgcttctgaccgagatgatccagaaggcggcccggcgtggcgataagaatatcgacgccgcgggcaagggccgcggtctggggcttcaggtttacgccgccgaaaacgagggcggaacggatgtccagatacttcgagtacgccgtaatgttctcgtggatctgagccgcgagttcgcgggtcggagccagaatcagcgctgtcacttccttcggcttcgcgcggacgccggactcagcgatcttctgaatgatcggcaggctgtaggccgcggtcttgccggtgccggtctgagcggcggccagcatgtccttgccttcaagcagggacggaatggatttctgctgaaccggggtcggttcgcgataatttaattcgtcaatagccttaagcaaagggtcaatcagacccagagaggcaaaagattggttcactttgagagaaacctatgagaactgcgcggagccagtcgtaaaaaagaaagctggtccaggtttggggcagtccccggttaatatattggaagacaggatggcgctgttatcggtgcggggtgaaccctggacacctgtgaggcgtaggcagatgcttagttgtatcaggccgaaaccccggcaaacctggattgccgcgggataactgtcaagaatgccgaaaatttgcttttctgcatgtgtggccattgtacctgattacttctgatcgggggttcttcacgagagtgaagttttggagaaactatgagtgaattgaagattgaagagatcgtcgttggcgaaggcgatgaggtgaaggacggggactgggtttccgttcattacaccggctgcctcgaggacggaacgaagtttgattcgagcctcgaccgcggcgaaccgattgagtttcccctgggcggcggcatggtgatccccggctgggaacagggtatccgcggcatgcgcgtcggaggaaagagaaagctcgtgattcctcccgagctcgcctatggtgaagacggcgcgggtgatgtgatcccgccgaacgccgttctcgtgtttgacgttgaagtggtcggcgcccgctcgaaccagtaccccgaagagggcgatctggagattgaggagctcgaggccggcaccggggcggaggctgtgcccggggacacggtttccgtgcactacacgggatggcttgaggacggaacgaagtttgactcgagccttgaccgcggtgaaccgattgaattcccgcttggcgttggctacgtgattccgggctgggatcagggtcttgtcggcatgaaggaaggcggccgccgccgtctgacgattccttcccaccttgcctatggcgcaaacggcgccggcggcgtgattccgccgttcgcgacgctcgtctttgaagtgaacctcgtccgggttcagaaggcggctacggagccgtaagtgattcgagcccccggccgaaatggctgagcagttcaaccgtttcgaaaacgggtagcccgacaatgcctgagtaggagccttcaatatgcgtgatgaaggctcctgccagcccctgcacggcatagccgccggccttgtcataaggctcatcggtgccggcgtaaagcttcatcatcgagtccgtcatcgtgcagaacgtgacgcgggactcggaaatcacggtttccagattctcttccgtcgtgccgacagcgaccgcagtgcggacgacatgcgtttttcccgagagcagctcaaggaaccggagctcttcctcaacggactgaggttttctcagaatggtttcaccgaaaaccactgtcgtgtcagctgatacgacaggcagcacttccagttttttttcctcaatcatccggatagcaccgagcgccttttcacgggcggttctcagcacgtagctgcgggccgattcccccggacggcgttcctcatcagtctgaggggcagatgccggagaggcttccggcgcgagaaggcagatctcgtacccgagcccggcgagaatttcgcgccggcgggggctcttgctcgccagatagattcttgatgtcatgctttaggccctgtggtaggggtgattattcagaatcgaccaggcgcggtagatctgctccgagagaataacgcgggcgagggcgtgcggcagcgtcatggaggagaggcggatcatcatgcggctttcctgcttaagcgcaggatcaatgccgtcagtaccgccgatcacgaaggcaacggattcaccgctgtcctgccaggcgctcagcttcttcgcaaattcgactgtcgtcagatccttgccccgttcgtccagcgtgacgaggagtgatcccttcgggatggccttgcggatacggtcagcctcagcggccatcaggtcgcttttgctctgcccatgccggggttcttccttgacggttttcagttcaaccttccagtcccggggaaagcgggtgaggtaatcctcaaccgccgtggaagcccaggccggggaccggaggtcgacagccacaatggtgattttcacgggtatcccccgtcaggccttttcagtcttgcggaccgggagggcgtattcgggatcaatcttcatgttgacccgcttggcgccccagacttcttcgaggttgtagtattcgcggatctgaggctgcatcacgtgaacgatggcgtcgccgcagtcgacgagcacccattcaccggattccttgccttcaaaaccgatcacgctgccgccggcagccttgaccttttctttgacgttttccgcaagcgccacggtgtgacggttcgaagttccggaggcgaagacggcgcgcgagaactgatcggtcagtttttccgtgttgaacacgacgatgtccttgcctttgatctcaacgagggcgtcgacgataatgcgctgaagctttctgatatccataaaagttaatgcttggggcgataaagcccgtgttggttgatgtaaagagctaccccgtgcgggagccaactctcaagtttaattgcattttgcagtgaggcgggctctgcaagaagctttcggatctcggaggaattcgcttcatgcggcgccatctgaaagaagcagacggagcctgaggccgaagccgtgatgagatcgggcggcactgtttttccctcagcccaggaggtgatttcctgaggaactgagagacgcttctttccgcggttgaaaaccgcgaggttcgcgtagtccgtgagtgcctgccaggatttccaggttttcagattggcccactgatcctgccccatcagaagcacgagaggaacagggttgccgcccagcttctcccggagcgccttcagggtgtcaatcgtataggtcagaccggggcggaaaacttccgtgagattcagtttcagacggggattcccccggatagcctgctcgatcatccgtgcccggtccgtgacggacgtgagtacgctcttctgccacgggcggggggcaaggagaaaatcaatctgctgaagcttcagctgctctagcgccgaagcggcgagagcaagatgcccctgatggatcggatcaaatgtaccgccgagaaggccgatgccttttcttgcctcaaaggcgtcctggctcatggattggtggcctggcttgaaaacagccgggaaacccgtcctttctccagctgtacgcctgtccagttcatctgttcgcggctgttgctgaattcctcgatggtcttgctcgtggaccagaagtaccagtcatcgtctgccgcgtaggtgggctggccgaacttggcgagtacctgattccaggtcatgccgggcgtgatgccgccgatggagacattcttttcagaacccttcagcagatggcacgtgcctttgccgcgcggactgagaccatttgacgccatctgagcctcagtaacagcgggagaaccggttgcaatcagccagattgaaaaatcatcgctcccgcttcccgtcgtgagacaggtccagtcgcgggtgtagtcgccgtctccctcacgcatcagcgaaaagtgaagcttcttcgccagatcccggatgggggtggattcgagcgtaacttcctcggacccgatccggatgccctgagtaaccggtttgccttcaacaggacgcccggccaccaggctttcgggataagcgaaaggctcggcaacggaagacgcgtaagcggcggtttgcagacccgccgtgaccactgcgccaataaggagcttgaaagatgaaagtgttttcataatgtgcggaaaggcgcggaaacggcgcgcctcttgtcacagaaagtaccacaaaagccgggatgagaggcagtgagtcggatgaaaatccccaaaaagcaggaaggctttttggggagctgcgacagaacccggctgagcggaaaaacttacttgatcgctctccagccgatatccgtgcggtactgcataccctgccagctcaccttgcgcacggcttcgtacgcgcgggcctgggcttcgcgaatgccgtcacccagcccgaccacgcagagcacgcggccgccgttcacgatcatgcggtgctccgcgtcccaggccgtaccggcatggaagacgtgatgcgtttcgtcattctcagggagagacgtgatcacggcgcctttcttcgggctttccggatagccttcggcagcgcagaccacaccgagcgccacgcgggaatcccattcgatcttggcctgatcaaggcggccgtcgatcgcggcttcaaacacgtcagagagatcgctcttcacgcggctcataatcggctgcgtttccgggtcgcccatgcggcagttgaattcaagcaccttgacgacaggcgtgccgtcagccgcgtggctgatcatgaggccggcgtaaaggaagcccgtgaacggatgaccttcagaagccattccatcgatcaccgggcgaatcaccttttccatcacgatctgatagacatcaggcgtcaccacgggggcgggggagtaggcacccatgccgccggtgttcggtcccttgtcgtggtcaagcagacgcttgtggtcctgggaggttgccatcggaatcacatgctcaccgtcgcaggcgacgatgaaggaggcttcctcgccatcgaggaagtcttcgataaccacgcgagagccggcggagccgaagctgttgccttccagcatgtcatcgacagccttcagagcttcttcaaccgtcattgccacgatcacgcccttgccggcggcaagaccgtcagccttgacgacgatcggagcgccgtgctgaaggatgtactcgcgggcggccttgtcatcggtaaaggtttgatactcagccgtcggaataccgtggcgcttcatgaaggcctttgcgaaatccttggaggactcaagctgcgcggcagcctgtgtcggcccgaagatcttttcgccgcccttgcggaagacgtccacgatgcccgcggcaagcggtgcctcggggccgaccacggtgtagtcgacgccgttttcgcgcacgaatttcaggaggccttcaagatccgtcgccttgacgggaacgttcgtgaggagaggatccgcatcggtcccagcgttgccgggggcaacgtaaaccgtctgaacatgttcgctttgagcgatacgccaggcaagagcatgctcgcgaccgccgctgccgacaaccaaaactttcatagagaactccatagtgcgctcatgctatagatgagcgtggaaaatagcgccaaatataaaaaacggccgtgttgaagaacacggccatgtgaatcctgagcagaagggcggtccggcaggccgaaccgcgggagcgccctgattgctcttactcttcgtcttccggaaggtcgagttcggcggagcagtaaacctggctcacgtcgtcgttgtcttccagttcgtcgatgatgcgctgcatcttttcagcatcttcgccggagagaaccgtcttgttgaccggcttcatcgtgatttcagcgtagatgggggtcatgccggcatcttccagagccttctgcacggcttcgaattcctggatcgtggggggcgtcacgatttcgatcgtgccgtcttcatttgccacgacgtcctcggcacccgcttccagaccgacttccatcgccttgtcttcatcggcgcccgagggcagcacgatcaggccgcagtgcttgaacatgaaggccacagagccttcagtgccgagcgaaccgccgttcgaggtaaggatgtgacggacatcagacaccgtacggaccttgttatccgtcgtgcagtcgatgatgagggccgcgccggaaacgccgtagccttcatagcggacttcttcgtagctcacgccttccagctggccggtgcccttcagaatggcgttcttgatcgtgtccttcgggacattggcaccgcgggccttgacgagggcgaggcggagcttcgggttcatgtcgggatcaccgccgccgccagtgcgggccgcgatgatgatttcacggacgatcttcgtccacatattggagcgcttcgcatcctgacgacccttgcggtgttggatgttggcccattttgaatgaccggacatgctagtaccttaatgaatgttcagataaaacctcatcaacggcgcctgacggtgctgaagatgaacagaaagtcaaaagtgtctgtattctaatcatcccgacggggggataggaaacagaataggaaaaactgaggattattcctgaggagatagtttaaaagcactctgaaagcggttccagaggcttttggtgccgggcgtctacccgagaagggatagaaaaatatcagaatttaccctgaatatctatcaaaatgagtacagcaatacgctgtatctaacactccttgttgagaaaagttcataatccttttgtagtattgtgagtacccttcctgaccatggattccgagctcctgtggaggcgggtgaggatccatgcgtaggtaaataagaggacaaaatggtcgaagaacacgggcagaggacgctgttgatcgtggatgaaagccccatttttcgtcaggccctggctcagcttctgaagcagaaaggggtgtttactgacgttgtggagacaggttctgtatccgaggcagagtcggatatttccactcaggacttcaccatggtgattattgatctcgcgcttcctgaccataaggcgctggagattcttcgccaggtgaaggagcagaagaaagcctgcaaaggcgtgattctcctgcagggagctcataacgacgaactgatggcggcgatccgcctcgaggcagatggattcctgacaaagaaccacatgcctgatgacatggtgaccatgatccgccgcgtgctgcagggcgagatggtgatcagtgacagtctgacgaatgtgctcgcgctgacgctcagaaacgggaacgaagaagaggagcggaatgttgactgcctcacctcccgcgagcaggaagtgctgagctatatcgcctcgggcatgagcaacaagtcgatcgcggcccgtctctccattaccgatggcacggtcaaggtgcatgtgaaacatatgctgaagaagcttggcttccgctcacgcgttgaagccgctgtctgggcgagcgagcggggtttcaagagccctgacgaacctgcagcggattcggccgcttcctctcagcagaccgatcttcctacccgggtgcatttcgcctgacagaccgctgcggaaacagcgcttctgaacagaacatttactcgcagtttttctttccttctgaagaaagttgaggttcaaatggcaattcgtagctatgacttcgcctatgggcgtggccgcaagcagttctctctggatgactcgctcgtcctgaaggagatccgtactgaggatttcgctccgatgacggatatcaaaggcggggtgcttgaagccatccgccatccgatcggatgcccgccgctggatgaaatcgtaaagccggggcagacggtcgccttcatctgcaacgacctcacgcgcgttgcgaattcgtacgacttcatgccggtgttccttgatgaaatgaaccggcttggtgttccggacgaaaacatgaagatcgtgttctcgctcggcactcaccgcaatatgacgcatgacgaaatggttgaagccgtgggggcggaagtcgcttcccgcgtgaagatgatcaattcggactgccatgtggatcaggacttcctctattttggtcagacctcccgcggcacgcctgtgctgatcaataagaatatctgtgacgtggatcatgtcattctgaccggcacgattgtctatcactatttctctggttacggcggaggacgcaaggccgttcttccgggctgcgccgcgatggaaaccgtgcgcaagaatcacagcttcatgctggatccccatgcgggcctcggcaagacggtgggcaaccctgtttacgaagaccagatggaaggtgtggctcgctttgcaaagggccgctcgctcttcctcttcaacgcggtgctgaacgccaaacatcagttcctgaagatgtttgccggtgactatgtgaaagcccatcaggtggcctgtgagttcgttgacaaggtttacggcgaagtgatcaatcagaaggcggatcttgtgattgcctcctgcggcggctggccgaaagatatcaacgtctaccagatgcagaagacgatggataacgcctctctcgcggtgcgggacggcggcgttgtggttctgcttgctgactgcgaggaaggcagcggctctcaggtgctggaagaaacctgccgccgtctgggctccccggacgcgattgaagcggagctggagcataactttgtgatcggcgcgaacaaagcctatgccgtgacccggaatatgaagcatgcgaagttcattctggtgacgagcctggatcgcaagatggcgaaggaaatgctcttcacgggcgcagtcgacaccgttgaggaagcgctcgaaatggcgaagacctacgtgggcgatcatccgaagatcattctgatgccggaaggcagcctcacggtgccccgtcttcaggaagcataattaaccaggcataaaacctgctctgaccccatgtcggtgctccgccatggggtcttatttttaagcgatgagtgaaagaattctgtttgatgaggcccgcgacgcgcggattggcctgccggaggcggtgttcagtgaggggaaggatcccgagagcctgaaggagctgttgctgaggttccggcgaggatgcgggcatccgattctttttacgagactgagtatcaaagccctggaagctcttcccgaagatgtccgtgagggatacagctacgacccgatttcccgtacggcgtatggcgaaaagctgccggagagaggggaaggttacggctcagttgctattgtcacggccgggacctctgacgcttttgtctcgcatgaagccggacgcacgcttgagtatctcggggtaaggcacgaatactttgaggactgcggcgtggcggggctctggaggctcgagaaacgtcttcccgagatcaaccgccatagtgttgtgattgtctgtgcggggctggacgctgcgatcgcgagcgttctcggcggcctgacaggaaggccgctgattgcggtgcccacttccgtagggtatggggccgcgagtggcggcgaaacggcgcttcactcaatgctctgctcctgcgcgccgggcgtggccgtgatgaatattgataacggctatggagctgcctgcgcggcggtccggattctgaattcccgcgcttaaccgatcaaaaccccgcagctctggttgatctgcggggtttatctttgcgatgatgaggcggattacttttctttatccgccttcaggagttcgcggacttcccgaagcgaaacccccaggcgccgggcggccgccgcaagatcgtcaaactcaggcttcgctctggaaacccccatgccggaagcctgcttcaggcggatcgctccagccggggtggacacctctgagaaactccgtttcagcatgacacggtgacggatctcaaagcggatcccgagcgtggatgtgtgacggaagaagagtgactggatccggtcgagatcctccgcgtggcaaaggcaggagagcattgtggcagccctccctttcttcatgatgatcggagtgagccaggcgtcaagcgcgccgttctcgagcaggatatcccgtgcgaagctcagatcctcagccgtcatgtcatcaatattggcggacagctcagcgacgtcgtccgtgacagcgtttcccgtttcggaggattctccaagaagggatcgcaggcagttaggttccgggaactctttcgctccaatgccgcatccgcttgcaatcggagtcatcgccggcatagcgccgaattcatccgcgaaataggagatcagggcggcaccggtaggcgtgcagagctccccggggaacttgctcccataagacgggatcccttcaagcagcttcgcggtggcaggtgtcgggatggggaggaaaccgtgactggtgtacgtcagaccgcttcccacacagaccggggaacagacgattttgtcagcccccagcatccggatcaggagacagacggacacgatgtcactgatcgcgtccttcataccgacttcgtgaaagtgaatttctcccggcgcggcaccgtgagccgaggcttctgcctcagcaatcctctgatagaccgcagcggcgtccttccgtacgtcctccggaacacgcagcttatcaataatcgacagcacatcagcaagcgacgaatggctgtgatggtgatgatggtggtgatcctcttcagcgtgatgaaccggcgggtgagcaagaagtgtttcttcctcaacgccgttgatcacgacatgggcgtgaaggcccgccattccctttgaggctgatctgacgagcgttgtttttacgccatcaagccccgttccattgatggtatccagataaacattcggatccgggaggagtgatgcgaggcttgcggtcagcatatcgcccgccgctcccatgttgcattgcagatagaggattttcatagacagcaggatattcggttttatggatgaatcattatcagctgaatcagaaatacagctgacaccgggcaaacaaatagggctcccgaaggagccctactgtgtcttaatttctctcagtttttatgttttgatgcagcaagatgagccgctgtgaattagagccagccgtagaggtaaccaaggatggcaccgacaacagtagcggtgatcacgccaatcagacccggaagaatgaaggagtgattgatcacgaacttgccgatgtgggtcgtaccggagcggtcgaactgcagagcagccaggtcagacgggtaggtcggcaggatgtagtaaccgtagcaggcggagatcatggagactgcgatgccggtcggaacaccgacctgaatagcgacaggcagaatgatggccacagcagcggcctgagagttcacgaacttggacacgaccagcagcaccacggcgtagagccaggggtaggacgtgacagcgcccgtcagagcaaccttcagttcaggcaggtgagcctggaagagggagtcagacatccacgccacgccgtacacggcagcgatagcgacagcgccagcgcggaacacggagctcttgccaacgtcagcagcgcgggtgcggcagaagatcaccatcagagcgccggcagtcagcatcatcatctgaatgatgagcgtcatggacatagccttgccgccgaacaccggacggagacccttggtagcaccgaagacagccacgattgccacgcacccgaggaagatccagagggcagcccactgagacttggcaaacttcttgccgagcagcgtggtggagtcgccgtagacgtactctttctgctccggatcggagatcagcttctggaattccggatccttgtccagatccttgccgcggaacacggagtaggtggcttcagcgaacacaccgatgaaaccagccgggatcgtgacggacagaatcgtcagaaggttgacagcctggccgttcggcagagtgtgaccgtcaagaattgcgacggcagacaccagagcgacggaagcaggagagcagatgatgcccatctgagcagcgatcgtcgaagcggccatcgggcgctccggacggatgccggtcttgatagccacgtcataaataatcggcagcagggtgtaaaccgtgtggccggtaccgcacagaatcgtgaggatccaggcgcagtacggagcgatgtacaccacgagacgcggatgggaacgaagagccttttcagcgatctgcagcaggcagtcaagaccgccggaagcctgcagcgtagcggaacccatgatcacggccagaatggtcagaatcacgtcaaccgggggcttgccaggcttcacatggaagcagaacaccagtacgatcagaccgataccggagatcaggccgagagccataccgccctttcttgcaccgtagaacaagcagatcagtacgactagaagttcaatccagaatattgttggaatcatttttctctctctactccgagaagaataagacggtgttagtttctcataaggaggtagtactaggtaggaaaaaaggactaattcttgatttaggacgatatgtaaagatagctattttttatcgggttgacttggtactaatgaattcaggaaaaatgcttagatagattttatatatccgaacatataaagaaacccggaaatcgggcatgtcggagggtgatatcttgcattcatgaagcactgattgcatagaatccggcgaaacatgctgttttccacggtgtattcacctgatggaggagatgatcaggggcttttccggatgagtacctataaagagtaaacattttgggcgcatttcagagagcggtctgaagccgtggttcagccccatttttcattcccggcataaaaaaagccccgcatttctgcggggcttttctctggttccggtcgtcagaccggagtgagcggaattactcgttcacatcgtaccagggatgctgaggcacatagcgttcagccggggttccaagtttcacctggtcagcgccgatgctgtagtacttcagggcggtggcggcaccgcagaggatcatcagaactgtgatcacgatcatggccttgcggagaccttcacgttcgccgctccagatgccccacttcacgagcacgcggtacagaccgatcaggccgtgcgtttcagcggcaacgaggaagatgaaggtgtagagcaggccgtcatgataggcatgcacgccggaaaggttggggccgatgccggacggattggtcagcatggagatcacgtgcgggaagacgcagatcagcagcacgacggcggtcacgatctggatagcccagagggtggtgtcggtgtggtggatcaggcggacatggttcttcatgtcgcggcactgatgatagctgctcgggaagcggcgcagagcgcagagaccgtggatgcagatgaggagcgtgatcaggccgacaaagatcacgtgagcccattcatggggatggccgccgataaaggtgaggccggaggtcgccaccaggttccagaacagatccttggagatctggatggagctcgtgaatgccatgtggcagaaaaggaaaatggccagcagaccaccggtcacagactgggcgacatcgcaccaggccgtccacttggagcggcggggcatgtccttatcgttgatggcacccttgatgttttcatccagcgtcggcgtatgggcgcggaggatattgtctgggagttgcatggaacaggtctccaaaattgcagtgtgtcgccgtttattgaccggcgtaagtattttttctagcagaccatactacttttgtctgatggcctacattgtgctctccgccaccggaagtgaatttaacctatatcaataaataagccctattaaggaagataaaaggtcaaaaaataagggctaacccttaaataaaacctgatttatcaggttttatagaggttaacccttaaatttagcgaaaaacttaaagatcagagcgtgccgaaaattctgtcgccggcatcgccaaggcccggaacgatataggcattcttatccagcttttcatccaccgacgcgacatagaggtcgatattcgggtgagccttgaagaaaacttcaacgccttcaggagcagcaacgagagcgaggaacttgatgttatcttccatggcgccgcgcttcagaagcacattgacagcgtgcacggaggagtttccggtggcgagcatcggatccacaatgatgcagcgacggttcttcagttccggaggcatacggaccaggtactcgaccggctgcttgttttcgtcgcggtagagaccgatatggccgacacgggcggaaggcatcagagcgaggagaccgtcagacatgccgaggccggcgcggagcacgggaacaatcacatccttcttgccggcgatcacgggggcgcgcatcggagcgacaggagtttcgatacggcgggtcgtgaggggggtgtcgcgggtgagctcatagcccatcagcatcgtgatttccttcagaaggatacggaaatccttggtagaacacgatttttcccgcataagggtgagcttatgctgcacgagcggatgatcaacaatgtgaaggtggggatagcggggatcggttttcaagggagactccagataaaaacgatgattaaccgggtaattttaataccatgcatgaattcggaatctgcataagttttcggcaacagatgtggctttgctataggattgaattatgagctgtctcaaagcgcggaattcgtgagcaaatccgcggtgaaaggagaaaaaaatgacatttcgatccatgggtgttctgatcgttttcctggtgtcgctgctgttcgtcgtggtcaactggggcccgatcatgacgccgatgcctatcagcttcattctcttcaccgtcaatgcgccgctggggctcttcctgatcgtgggcggagcactggttttcgtggtttgtctcctctggatgctctggaaacaggcgacaacgctggtcgacctgcagaaggcaaaccgcgaagcgagaaccgcccgcgccgcggctgagaccgctgaaggctcccggatcgtgaaatttgaagaggggcttgatgagcgctttgtccggtttgaaaaagatctgcttgaaaaggtggccggtgagctgaaggcgagccgtgagtcagacgaagccgtgaagaaggatctgcagcagacaatcgagcagatgaagcagagtcttgatgcttcagtgaaggctctgaaggaagtcgaggaacagaccaatcagagactgatctgacacggttggattcggaaaactgaaagccccgcagaatcttttgattccgcggggcttttgctcgtcagggagtgtggtttccggaattactccgtgagaccggattcctgatgcagacgggtgatgtaatccacttcttcagcggcgccaaggaacacggcgacacgctggtggatcttctcaggctgaatttccatgatgcggcggaaaccgttggtagccttgccgccagcctgttcaatcaggaaagacatcgggttcgcttcgtacatcagacggagcttgccggggcgatccggattcttatcgtccttcgggtaggtgaagaaaccgccgcggcacagaatacggtggacttcggccacaaagcaggcaatccagcgcatgttgtagttcttgccgcgggggcccttcttgccatcaagcagttcgccgacgtactgctgcacgggcttcagccagtgacgctgattggagcagttgatagcgaattccgctgtttcggcggcgatgcggatgttttctttcgtgaggtagaaaacaccggtcgaaggatcaagcgtaaaggcagaaacaccgtgacccagtgtgaaaacgagctgggtctgcgtgccgtagagcgcgtaaccagcggcagcctggttgatgccaggctgcatgaagtcagcctccgtgatgtcgcgcttcttgccgcccgggcagggaagaaccgagaaaatagtgccgatcggggcatcgatatcaatgttgctcgagccatcgagcggatcgaaaaggatcaggtagggaccgacagcatattcgtctgagacgcggaggacttccgtcatctcctcgctcgcgaggccggagagcatgccgcagggctcattcgccgtgcacatgatctcgttgctgatcacgtcgagttttttctggtcctcaccctgaacgttttccgttccggccagacccagaacgccggcaagcgctccctgggagactttcccgcggatattcttcgccgcgtcagcgacggagagcagcagcgtggtgagctcgtggggaacgctgttctcgcgctcttcgcgggcgagatactgatgaagagtcatcagagccatgtttgaactactccttaagtaatcagttctgaaaaagacggtatcaatcggtgagaccaagagacttgtcgaggatttcctggacgccgaccggaagtccgggaatgtgcttcgcttcgttaagaaccctgtacatcatttgagcgcggtccggggtgtagcgcttccagtgatcaagtgtccgggcaacacgtgcagcgacatactcgttgacagagcagagctccctcagaatctgcagccagaactcgtagcctttgccgtctttgcggtggaactccggctcgttgttgcagaaggcaagaataagcgcatagacgttattcgggttcttgatggagaacgctccgcagtccatcagctggcggacacgggtaagcgtgtcggcttcgccaggctgtgtgccggcagaggcctggaccgtaagccacttgttgataaggatcgggttgccctgccactctttggcggcctcaaccagcatgttggtctttgcggggcttgccgaattcacgacactggtgagagcggcaagcttatccgtcagattgttggccttctcaaactggccgcgaagcgcgatcagcgccttcggattgccgcccgtgatcaggtagtcataggccaggttcttcagcgaacggcggccggcggactcagagtccggagagtagtcaccgggggtctcgtaggattcagccagcttgaagagaagcgaggaatagcggcggccgatcgcggccttcagctcagtacgggctttgcggatcgcatccggatcaataaccgcgcggggctcgccgatgaggttttcggcgggaagctgcagcgtgatggcacggaaggccggggtgagcgtctcatcggtcaggatctgctcaaacgaggagagcagattgtgatcggcttcaggctttccgcccatttcgatcacatctgtcatgtcctcaagaacgccgagcatcaggcgattcatggcatcccagcggttgaacggatccgcgtcattgcgggcgaggaacgccagttcatcgcgcgtataggcgtagtcgaggatcactggcgcagagaaatcgcggagaagtgaaggcaccgggcgggatccgacgttcacaaacgtccactcgttctcctcatccttcagttcaaggacacgtgttgtgccgagaggcgcggtttcaccctcaagctgcagaggaatgtcatgcccttcggaatccacgagcccgactgcgatcggaatgacaaacggatgcttcacaggctgccccggcgtggcaggagtgctctggctcgcaacaatcgtataggtgctcgcttccggatcccagtaggtctttacctgaacccggggcgtaccggcctggctgtaccagaggaagaactgtttcagatcgcggccattcgcttcggccatggcgttgatgaagtcttcgcaggtggctgcacggccgtcgttccgctcaatgtagagagacaggcccttcttaaagccctctttcccgagcatggtctgaagcatgcggtagatttccgcacccttctcatacacggtcatcgtgtagaaattgttgatctgacggtagctttccggccggatcggatgagccatcggacccgcatcttcagggaactgacgcgagcggagggcgcggacatccataatgcgcttgatgacagcggacttaccgagcatatcgcgcgagaactcctgatcgcggaagacggtgaggccttccttcagcgtgagctggaaccagtctctcagagtgacccggtcgcccgtccagttatggaagtattcgtgaccgacaacggattcaatattgaagtaatcgaggtccgtcgccatcttcggtgtcgcgagcacatagcgcgtattgaagatgttcaggcccttattctccatggctccgaaattgaagtcgtcggtagcgacaagcatgaagcggtccaggtcatactcgagtccccagcgggtttcatcccagtggatggctcgcttgatgcactccattgtgtgctcagtcttatcagcattctgaggctcaacccagacctgaagcaggcagtccttgccgtttgcgagcttatagacttcctcacgcttcaccagctttccggcgacaagcgcgaagaggtagcagggcttgagagagggatcttcccagatggcgaagtgccgtccgttatccagatctccctgctcaatgaggttgccgtttgagagaaggatcggatactgctctttgtcagcccggatttcaacatggaatcgggtcagcatgtccgggtgatccgggaaataggtgatccggcggaagccttccgattcgcactgggacatgaagttcccgttggacatatagatgcccgagagcagtgtgttggcctgcggatggaacttgttatagatagtgatcgtggtcttctggcggataccacggatgatgagagcctcgggtgtaaccgtatagcgttccgtggagagcgggctgccgttctcaaaaacggaagcaagctcgagttcgcttccgttcagcaccagatcgtggtctgaatccgtgagcggctcaatgcgcatcgtgttgtaaaccgtcgtggtgacggggtccagattgaaaaccaagttgatgttttccacgcggaaggcgggttcctggtaatcaagccggttaatgacggcagaactcatatcaacaaactccatcagaaaagccaatgagccacattgtaaatgggatgcagacgcttgaaaggccagtcagcgctataggcaagaaaaaacccgacagtcagaaactgtcgggtttttggatcagtgcttaggactgattactgggcggcaacagcgctggaggcggcagcatcagaagcagcagcttcggaggaagcggcggcggaggcagcggccgcggcggcggcttcagcagcaacgctgggacgcggcttgccagcgttcacggcgtcagcgtcagcctgggtgttgaggcccgtgtaatcatggccggccgtcttgtggcattcgatgcagttgacggacgtatccttcacgaactcagcgtggaaagcagccacatccgggttcttgtcgttcttcatcttggcgaggttatggcagccacggcagttggagaagccggtggacttcatgtattcctgaacgtccttgctgagttcaggagccatggccttctgcttgtcataggtgttcatgtgaccagcaacctgaccaaagaaggacttggaaccggaagtgcccttgtggatcagcatgccgatgtactggaagccgttgatctcgtgggtggaaccatacttcaggtggcagtcagagcagccggcggtcacgccagacggggtcttggcgtgctggccctgatgataggccgcatagacataatccatggagtggcagaaggagccgcagaattcagtcgaaccggcccagtgaatcacggaattgaacacaccgaaagcgacgaggccgatgacagcgccgacgagaccgatcaggatggcgccacgtttgcagtttttcataactcagtaccctactgtgcgtacagccttagaagtatcgggactctaaagactgtcacttttgtattttttagaaaaatagaactgaggcggacctctccatatccggctcaggcgccataatatgccgaagagttagaaaagggggctgcagaggtttgactgtggtcaaacttcttaagagtcacttaagaaacctaaagaaacctcaacttaagaactagtccattcgcgcgataacaacagcgttcgacgcaaccgttgcctgggcttccatacccggggcaaggtggtggttatgcttcgcgaacccgatgacaatgagtccggaaggcagtcggagcgccatttcgccgcctttttcggaccgcgtgcagcgcacaacacgcccggtcagacggttatccagattggcatcaggaaagctcttcgcgatttcaaccgctgtggccttcgccgcggcaatcatccggacaccaggcttaagccccagaagctgggcgctttccgcagtaacagacgccttaataatgttctcttcatcaagccgaaggaaaacacggaccagcgctgagccgtgtttcacgttttccaccacgcaaggaagattgtttctcatgctggaaagaatgccggatgtggtgaggtggttcgccagaggctgttcggcatcagtaaagctccggagcacctcgcttcgggcctgagcgatgcggtccgcaatcttcagaatctgctcccccgttacggtgagcgtggttccgccgccgcggtttccaccgaccagcttctcgaccagctttccgccagccagattctcaagcgtttcaagcgcctgccaggccgctttgtaagagacgccagacgcacgggcagcttcagaaattgagccggtttccttgattcggcggaggatgtcgatccgcttatcggataaagccgcaagagagcgggtgaattcgatcgggtcagccttatggccagagtcagaagtagtggtcgttttttccgaattgttttgcatgacagatggcaataaatgagggtaagattcgctattcagacgcgattattctaatttagaatagcgctgttgagttagctgtattttataactctatgttttatccacttcctagacaggtaagaatatgaaactttctactgctgttgtcgccggcgctgttgccgccgtcttttccgtcgctcttccggccggagctgaagaaatccaggttgcagttgctgccaacttcacggcgcctgctcaggaactcgctccgattttcgagaagcagaccggcaacaaggtgaagctgtctttcggcagcaccggtgctttcttcgctcagatcaataacggcgctccgttcgacatcctgctcgcagctgatgatacgactcccgccaagctccttgccaacggcaacggtgtgaagggctccgctttcacctatgctcagggcaagctcgtgttctggtccgccgatccgaagctcgtggataaggatggcaaggctgtgaaggaaatgaagttcaataagtgcgctgttgccgacccgaagctcgctccgtatggcgaagccgcttatgaaaccctgaagtccctgaagctcctcgacaagtatcagccgaagttcgtgaccggtaacaacatcggcaagaccttccagttcgtgaagaccggcaacgctgaggttggtttcgttgcactgtcccaggtttacaagaacggcaagatcacggaaggctccggctggattgttccgtccaagtactatcagccgatccgtcaggacgcggtgctcctgaagcacggcgaaaagagtgccgctgccaagagcttcctcaagttcctgcagtccgctgaagcgaataagctgaagcagtcctacggctacgccacgcactgatagggcgaaccgcattaaacctcaggtagattcccagaatgttcaacggcattgaattcacgtgggaagaactgcagccggtgtttgtcagtattcagcttgcagtcctcacgaccatatttctcgtgattctcgtcacgcctctggcgtggtggctttcgaggaagaaaacaacggcgcgttccgtgatcagctctatcgttacgctgcctatggttctgccgcctactgttctgggtttctacatgctggtcttcatgggaccgaacggaccgctcgggaaacttacggagtcgctcggcatcgggcttctcacctttactttcccgggccttctgatcggctctatggtttattcacttcccttcatgatccagccgctccagaattcttttgaggctctgggacctgtcccgggggaagtggccgcaacgctgggcgcaacgccgctcggcgcgttcttcagagtcattgttccgctctgcaaacctggattccttaccggtattgttctcaccttcgcgcacaccatcggcgaattcggtgtcgtactgatgatcggcggcaatgtgcctgggaaaacccaggttgtgtcgaccgagatctacactttcgtggaagcgatggagtatgacaaagcgcatgttctggcgggcggcatgctgatcttctccttcatcgtgctcttcgtgctttcgattctgaatcaccgctccgggaggtccaaggcatgagcgaagagaaaagaacaggcggcagcatccggctgcacctgaaacgggggaaagatttctccctcgatgttgaatttgagctgaaccagtccggcattactgtgcttttcgggccctccggatgcggaaagaccacgatcctccgatcggttgcgggtcttgagcatgccaagggcagggttgtcattggggacgaggtctggcaggacgatgaaaagaagattttcgttccgacatggaagagaccgcttggctatgtgtttcagggagcgagtctcttccctcacatgacagccggacagaatatccgtttcggtcttcgctatccccggggacggggtacgacggaagagcgtatcagtgaagctgtgaagcttctgggacttgagaagctgctggatcataagcccgcgcagctctccggcggcgagcagcagcgagtcgctattgcccgggctcttgtgctgaacccaaagattctgcttctcgatgaaccgctctcggcattggactgggagcgccgccaggagatcatgccgtggatttcgagaatccgcgacgagcagcatcttccgatgctgtatgtcacgcattcggcggatgagatggcgcgtctcgcggataacgtcgtgctgatggagcggggacgcatcaaggctcagggcagcgctcaggatattctgagtcggttcaaaacgcaggcagaagtgggtgaggcccgggaatccattctggaaggccagacggctgagcgggatgagaagtacggactcgtccgtgtcgctctgtccgattccgacgcgtcgctctggattcccgattcagggctgagtctggggagccgcatccggatagggctcttcgagcgggatatttctctcgcactgacgcctcacacggacaccagtattcagaatgtcattccggttgttgtgaagtcagtcgatcggaaaccgggagacgcgcaggtcggtgtactgctctctgtcggcagtcagcagctggttgccagaatcaccgccagatcctgtgatcatctgggtatcgcgcctgggtgccggctctgggcccagatcaaatcggtggtgatcaagtcctgagttaccgcaggataattggattcattcgtttcaaaacagcagacagaaaaagggcaggcctattgaaaagcctgccctttcttatttagagacgctgatctcaggcgcgcttcgcgagctcaaccgccttgccgatataggtcgaaggcttgagtttcaggagacggtccttcgcctcggccgggatctcgagcttctggatgaagtcagcgagcacggcttccgtgatgccatccttgccgcgggtcagagctttcagctgctcgtagggcttcgggacaccataacggcgcatcacggtctgaatggcttctgccagcacttcccaggcgctgtcgatatcagcagcgatcgcggggaggttgatctggagtttgccaagaccgcgctcgagggcgttgtagccgacgaagcagtagccgaaagcgactcccatgttgcggagcacggtggagtccgtgaggtcacgctgccagcgggaaatcggaagcttgccggccaggtgattcaggaaggcgttggccatgccgagattgccttcggagttctcaaagtcgatcgggttcaccttgtgcggcatcgtggaggagccgacttcaccggccttcagcttctggtggaagtaaccgagcgagatgtagccccagatgtcacggtccatatcgatcaggatcgtgttcgcgcgggtgatttcctggaagagttcagccatgtagtcgtgcggctggatctggatcgtgtgcgtatcgaagctgaggtgcaggcggttttcgatcacgttccgggagaaagcttcccagtccttctcggggtaggcaatgatgtgagcgttgaagttgccgacagcgccgttcatcttggcgaggatctgcacgttcgcgatggcgtccatcacgcgctgcagacgcacagcaaagaccgcgaattccttgccgactgtcgtcggggaagcgtgctggccatgggtacgggcgagcatcgggacttcagcccactcgtgggcaaagccggcgaccgtgtcgtgaagcttcttcaggaagtcgaggagttccttgcggccttcagtcagcatgagcgcgtggctcgtgttgttgatgtcctcggacgtgcaggagaagtgcacaaattcggaagccttggcgagctcggcgtcgtgagccacctgagccttgatccagtattcgaccgccttcacgtcgtgattggtggtcttttcgatgtccttgatctgctggcagctttcaaccgttaagttcgtcacgaggccgcgcaggaaagccttgccgtgctcggaaatttcgctgagttcaggcagaccgaattcagaaagggcgatgagccattccgtttcaacctgaacacgggctttcatgaaggcgtattcagagaagatttcacgcagcgcgtcagtctgccgggcataacgtccgtcgagggggctgagggctgtaagagaggaaagatccatttcgatatgatccagaattgaaagaaaaagtcgttagccgatcaattttaacagtcgccgtatgactttggcgttgataagggcacaacacagagagtctgtgccgtgtataggcgaggcataaccggaaagctctgaaaccgataagatgaagaagaagggagccagttttcggggctcccgcgagaaggaagattcctatttttccctcaaaggacacagatgacagctgccgcaggttctccgcttgatgtatcagtggggttgccgggaggttggagtgaggatcttttcggtgacaggccggatgacggtccggttatgcctcagccccagactgaagaaatccggcgcctcgcgaggattattccccgctcggtgaggctgggctcgtgttcatgggctttccctggctggaagggaattgtctggagccgttacagcggcgttcaggacctggcaaacgaaggactgagagcctacagcagtcatcccttgcttcggacggtcggtgtagatcgcgcttactacagaccgctcaccgttggacagtactggcatttcgctgagcaggtgccggatgacttccgtttcctggtaaaagcgccggcggctgttacggactgcatggtgcggggggcaaacggaagacctctgcgcgagaacgcgttctttctgaatcctgagaaagcagcgcaggaatttgttcatccggtcattgagggacttggaaagaaggccgggcctcttgttttcgaaatggctcaggtgcctcgtgaactgatttcaagtgccgagaaaagaatccgtctggtggaaaggatcggggagtttctgaatcggctgccgaagatcggcgaagaggcggagaatgccttttacgcggtggaaatccgtaccccgattatctatacgccgaggtttgtttcaatgcttcgaggagctggtgcgaggcttgtcacggggcttcacccgacaatgccggacgtcgcgcggcagaccaacgcccttcatatgatggattgtccggaggcggagtccccggaggattttcggcttgcggggccgctggttgtgcggtggacactcgccatgggagaccgctttgatgacgcgaaaaggcgttacgagccgttctcaaagatccagaggccggacccggtcacacgagaaggcattgcgactcttattcttgccgcgatccgcggcggacagccggcctatgtggtggcgaataacaaggcggaggggtgcgcgccgctcggcatggtagcactggctgaacggctctcagagcggctgacagaggagcgcgacagagacgagcaggagaaactcctgccgactccccctaaagctcatccctgagaggcggccaggcttcttcaaggctttccatacggacttcaggagaccagagcttctgaagtgtttccgtacgggcatccggattccccgtgcaccagaatctggaaatggctgaggcaccggcagttttccggatggatccttcctcagtcagtctctgagcgaggaatcgggcaacagcggggctcgggtcaatgatgacaacatcttttccggccaccgcctgtatttcgtccgcaaggaaagggtagtgcgtgcagccaagaacgagcgtatcggcgccctgatcaatcagggggcccacgtacttctcaataatgcggcgggtcttcggcgtgtgaaattcacctgcttcgacctgctccatcagtccagggcacgcgaccgggatcacccggtcatttccggcgaagcgctcgatcaggctctcgagacgattcgatgtaatggtccgtgttgtagcgagcaccccgacaactccgtcttttgtcatccgtacagcaggtttgacggcgggctcgataccgatcacggggaatgggaactctgctctcagccggtcaatggctgcggatgtcgcggtgttgcaggccacgacaatcgccttcacgcggtgggctgtgagaaatcccgcgatcttcataacgcggtcttcaatccagcttccagggcggtcgccccagggagctttgccgcagtcacaggcaaaaaggaggtcctcaagcggaagggccttacggatttccctcaggacagacagaccgccgagaccggaatccagggctccgatcggaagcgatggatcccgccagtcataattgagtgaagccattttcagtgttgtccggaggcggcaggctttggtgcgctggctcttgaaagacggtcattcacagcgttccagagcgagcccttcggcgggcgggcaatgaggatgtgagaggtgccggcttcatcgagcgcatggaggttggcatacagccgggccgcatactcaggctcggattcagcggactgcagacggaaaaccgcgttcgccggacaccggccaagaatgctttcgggcgccagtacggcacaggtttcgggagcgagagatgcggcgatttcaggaatcgcatcttcgtccgccagagtcacaggtgtgaccggggcgtaatgactcttcagctgaccggaaaccttgggagacgagggtttcggattgacgaccgggcggcccagtgcttcttccagcatttcacgggtcacggcaccgtaccggagcagttcgggctcgtcactcgcgagattgatgatggtcgattcaacgccgactgtgcaggggccgccgtccagaatcatgtcaactttgccattcggcttgacaccgaggtcatgcagcacgtgctcagccgtggtaggagaaattcttccaaaactgttcgcggagggaccgacgattccgcgatggcggggaccggaaaatgcctcaaagagggcatgtccaagcggatgggaagggcaccggaggccgacgcttctctgacctcctgtgacccatgagccgcagcgttctgcccggggaaccaccatggtgagagggcccggccagaatttttctgcgaggagctgagcagcaggcggcattggatccgcccaccagctgatgctttccgcatccggcagatgaacaatcagcgggtgccaagtcggtctctgcttggcggcaaagaccttgccgacagccgcttcattatcggcatcagctccgagtccgtacacggtctctgtcgggaaagcgacgataccgccggactccagtatggcgactgcgcgttcgatctcccgctcctgctcttttgtcagctccatttttcctacttttccaaaattacaccggggtcggcagcctcaggatgacagctacctttttcgcgcgctcaagagcctcttcgggggtcttcccaaggcaggtgacgtgccccatcttgcggccgtgacgggcttccgccttgccgtaaaggtgaagtttcacacccggaatagcgagcaccgcatcccagtccggttccttcagcccatcagccgtttcccaggaatcaccgaggatattcagcataacggccggggaaagcagcgtggtattgccgagcgggagtcccgccatcgtgcggacctgctgctcaaactggctcgtcatgcaggcctcgatcgtcgcgtgaccggagttatgcggacgcggagcggtctcattggcgacaacagagccgtcttccagaatgaagaattcgatgcagagcacaccgatatacttcaggccgttcgcgatgcgaatggcgtaaaggcgggcttccgcttcggcgtcttcaggaatacgggccggaagcacggtttccgcgaggatgccgtttttatgatggttttcgaacaccgggaaagtggcgctttcgccatcaaatccgcggcagacgatcacggagcattcggtcttcagctgcagcttcttctcgagaatgcagtcgacggaaccgagtgagtgataggcctgaagaaggtctgcgggagtgtcgaccgaaacctgacccttgccgtcatagccgagacgcgcggtcttcagaacgccggggaaaagatccggatcagcgtcaacgcagtcttcatcagacagaatggcgaggtgaggagccaccggcacgccggtagaggcgataaacgccttttccgcgttgcggtcctgggagatcgccaccgcttcagcgagcggagccgtacggcagcccttctctgcgagatacgcgagagaaggcgacggaacattttcaaattcggtgctgacagcggggcagatggaggcaatttcgtccagtgcttcccggtctttatagcttctctgaatacggcgcgcggaaacttctcccgcggggctgacttcacccggatccagaaccagaacgtgatacccgaggcgcgaggcggccgaactgaacatacggccgagctgaccgccgcccatcattccaagccaggagccgggcggaagcgctttcgtgtttttcatcagcaggcctcggagaaatcgtcggtcggaagcaccatgtcgcgggcggcctggttctgagaggcgcggaactgctcaagcttctcagcgagcgtgtcgtccgtcatcgagagcattcggaccgcgtaaatagcggcgttcgcggcgccggcctcaccgatagcgaaagtggcgaccggaacccccttcggcatctgaacgatggagtagagcgagtcctgcccccggaggtacttggagacacagggaacacccagaaccgggagtgtggtcttggcggccagcattccgggcaggtgggcagctccgccggcaccggcgatgattgccttcagccctctggagcgggctgtttctgcgtaggcgaacatttcgtccggcatgcggtgcgcggagacgaccttagcctcaaacggaatgccgaactgctcaaggatcttgcaggcgttgctcatgacatcccagtcggaggacgaacccataacgatgccgatcaacggctttttatcgattttgctggtcatttgtgattctgaagacatgcggtaaaaaaatttgacggaggaagggatagtgtcccgacctccgttgtgagcgagtcagctgcagactgctatctcagccgagcttgatgccggcgaggcggaacagagcttcgcgatatttctcgctcgtccgctgaataacctcttccggcggaaccggcggctcagacttcttatcccagccggtcgattcaagccagtcgcggatgtactgcttgtcataggagggcggcgaaatgcccacattgtactgatcggcaggccagaaccgggaggaatccggcgtcagcacttcgtccatcaggcggatattgcccgcttcatcaatgccgaactcaaacttggtgtcggaaatgatgatgcccttcgtggcagcgtattcagccgccttcttgtagagcgtcagggtggcgtcgcggatcgtcttcgcgacatcgccgccgtagcgcttcacgcattcttcatagctgatcggttcgtcatgcgtgccgatcggggacttggcggacggggtgaagatcggctcgtcgagcttctgggacatctgcagcccggccgggagcttgacaccggaaaccgacccatcagccaggtattccttccagccgccgccggtcagatagccgcgggccacgcattcgatcatgatcggcttcagtttcatcgccacgacggaacggccgcggacctggtcagcttcttccggagcgacaacggacagcggatcgatgccggtcagatgattcggcagcacgcccttcagctgttcaaaccagaagttcgtgagttgggtcagtacctgtcccttgtaaggaatcggaaccgacaggatgaaatcgaacgcggaaatgcggtcggttgcaacgatgagcagcttgtcgtcgccaaccgcatagctgtcccgaaccttgccactgtatacgaggggcagtgacttcaggctggttttcaatagaccctgcatgggtgatctccagaggaagtgacaaaataacctgcgattctttattttactgctgcagaaaacagtgattgttgcccgcagggttattttgcggcgtttcgcgcctaggataaaaagtagtcaagcagtacgccgatccagatacaggcatcagcaaaaatggtgagcagcacggcgaggcttcccagatctttcgccttcttggagagagggtgaagttcggggccgatccggtcgatggcggcttcaactgcggagttcagtgtttccacgatcagaaggagaaaaacagaaagcacgaggagcgctgactgggtccagctgacgggaaggagaatggcaacaggaatcagaatgacggcgagaatggcttcctgacggaaagcctgttcagttgcccagatggcacgaaacccgtcgcacgagtagtgaaatgcattgaaaagccgggtgaacccggtgcggcctttgaggtcggctgcgtcttgctgtggcatgaattacggtctcagagaaaaaggaagcggcacggattgcatccgcgccgcttgtctgcagaaaaactttagagagtcttttgcgtgatcgtgccgtctgagtagccgcgggcgaaagcatccagaggaatcgggtggatcttcgcgccctgaccttcgcagccgaaggcgaggtaacgggacttgcacatttccttctctgccttgcgggcggccttcatgaaggcgcggggatcgaattcgctcgggttctcgaagatgaaccggcggatggcagccgtcatggcgagacggatatccgtgtcaacgttcaccttgcggacaccgtgcttgatggcggtctggatttccttgaccggaacgccataggtttcgcgcatttcaccgccgaacttacggatctcggcgaggaactcctgaggaacggaggaggaaccgtgcatgacgaggtgcgtattcgggagacgggcgtgaatttccttcacgcggtcaatcgacagaatttcgcccgtgggttcgcgggtgaacttataagcaccgtggctcgtgccgatcgcgatagcgagggcatcaagctgggtctcgcggacgaagtcaactgcctgatccggatcggtgagcagctgctcacgggtcagcgtgccttcagcgccctgaccgtcttctttttcactggtcagtgtttcgagagagccgatgcagccgagctcgccttcgacggacacaccgatgcagtgagccgtttcaacgatgcagcgggtggtttcgacgttgtactcgtaagtggacaccgtcttgccgtcaggcatcagggagccgtccatcatcacggaggtaaagccgtggcgcatggcgctgacacaggacgccttgctgcggccgtgatcaagatgcatggcaaccgggatgtccgggtaggactcaaccgcggcgcggatgaggtgttcgaggaagagctcacccgcgtacttgcgggcgcctgcggaggcctgaaggataaccggggcaccggtttccttggctgcttccatgatggcctgaacctgttcgaggttattgacgttaaacgcaggaataccgtagccgttctcggccgcgtggtcgagaagctggcgcattgcaacaagagccatctattaagactccgaaaaatggttttttggggaagatatcgcctaaaaggtggggatattttaacaaaggagggtgcctttcatatccccaaccctaggagtatcaaccctgaataacggtcttatcttttctcacctggcgcttgatgccggcgagaattcccttggccatgctgagctggtaatcgtcgttccggagcttctgctcctccccggggttggagatgaaggcggtttcaaccagaatggacggaatcccctgtcctttcagaacagcaaatccggcctgctccacctgagacttatgcagatcattcagcttgccgatctcctgcagcactgagtggccgagagcaaggctgtagttgatcttccaggtattcgacatatcaaccagaacgttctgcacggagcgctcaaccccctgaaggttgatgccgccgatcttgtcggcatcattctgctgcttcgcgagccagcgggctgcggcggacgaggctcctttttcagagagtgcaaagaccgaggatcctttggcgttcggcgagatccagccgtcggcatggatgctgacgaaaagcttcgcaccggctttctgagcaaggtttacacgctctcccagcggtacgaagaagtcgctccgacgggtcatgcgggcatcaatttcatcatcctgggcaataaggtcattcagctttccagcgatggaaagcacgatgtccttctcgtgcgttcccatctgaccgctcgcgcccggatcctctccgccgtgccccggatcaatcatgacgagaagtttttccttgccggacttcgagcgcggcgaggaatttccctggccgtttctcgccgcattctgctgattgatggcaaccgcgagcggatcatctgaagccgcgatgctgcggttcggattcttcggataaaggtcaaccaccaggcgctctttataggatgcgacaggaggaagctcgaaaatctgaggcttgacgtcctccttcagctccaccaccatgcggacaacattcggctggtactgacccagacggatattgcggatgttggggtcgttcggggacacttcctgcacgagcttcttcagatgatccgaaagagcaagtccttcaatatcaatgaccatgcggatcggcggattctcccggacgacaaaggaacggaatttcagttttccgtcatgctcaatcgtgattcgggtgtattcgtccgcaggccagatccggacatcgacgatgccggccccgtaggcgatttcccagggaaaaagggagagcagcagcgtgccgccgctgcccagtaaaagattccgtcgctttattgccatgattcctcaacctcttttgcgacaatgcctccccactcattctcagggcagagtttcgcttcgcgcccatcacctttcagatcaatgaggatcagaagatcggctggcggcagaaagggttccgccttatccggccactcgcagagcgtcatgcgtccggcgccgaacagatctctgaagccggcttcctcaaattcttccggggattcaaaccggtagaagtcaaagtgattgatggcgagcccctgaacagaatacgtttccaccagcgtaaaggtcgggctccggacccggcccgtgaaaccgagcgcacgcagcagcgcccgggtcagcgtggttttcccagcacccagagtcccctgcagccggatattgagtccccggtctgtgatttccttgctgtgtttcagaacggcttccgccaggcgcttcccgagcagctccgttgaggcctcatcaggcagcacgaacgaaagaatttctttctgagtggattccggcatgttcagctctttccggcagtcacgtgccgggtatttctagtcgaacttttattttagggcatcgaaagaggcggatccggaattgaaacaatttttcttgcgtttttaaattttctccgctaaaatacaaactctgttcgcgaagccgagttgtcggcttggcctggttgccggtgtagctcagttggtagagcagcgcattcgtaatgcgaaggtcgggagttcgactctcttcaccggcaccattcaattgacccgtactgatgaaagcagtgcgggttttttattgtctgaacagaagactgttgagcagacctctcaattttcatctctgcactgttttatctcagattccttctcaggaaacagccaggaagttcccggtaaaaactgtctggcgggctgagattctcccaaaaagcgtgaaatcccgtgtgcctatagcatccgggatatttttttgcgtttaccctttttatgccattcacaatgtcggaaaatatatacaattgagaaatgacaattggcagacgacaggtttatgaccattaacgagccgactcttccgtgagccgacagcctgccaaaaaaagaaaaagtggagaaacatatgcgcagtgacaagatgaccaagggcccctccgccgctccgaggcttgcactcatgaaggccctcggcctgactgatgaagaaatcgatcgtccgctgatcggcatcgtcagctcgaagaacgacatcgtcccggggcacatgaacctggataaggttgtggatgccgtgaagcagggggttgcccttgccggcggtgtgccgctcgtcttcccggccatcgcggtgtgcgacggcctcgcgatggggcacgagggcatgaagtactcgctcgtttcccgtgagctgattgcggactctacggaatccatggccattgcccatccgtttgacggtctcgtgatggtggcggcctgcgataagaatgttccgggcctcatgatggcagcagcccgcatcaatattccgacgattatcgtttccggcggcccgatgcttggcggctacttcaaggggcataaggttacggtctcttccgtctttgaagcggtcggcacattccacgccggaaagatgtccgcggaggaactcggcggtctcgtgaatgaagcctgtccgacctgcggttcgtgtgccggcatgttcaccgcgaattcgatgaactgcatgacggaagtgctcggtattgcgcttccggggaacgggacgattccggccgtgatgtctgagcgtatccgtctcgcgaagaagaccggcatgcgcatcatggatctggtccgcgacaatgttcttccccgcgacatcatgacccgcaaggcatttgaaaatgccctgatgctggatatggcgcttggctgctccacgaattccatgctccatctcccggctattgcccacgagtgcggaatcgagattgatctcgcggaagccaacgagatttccaagcgcaccccgaatctctgccatctgtcaccggctggcgaagacaccatgatggatctggaccgcgcgggcggtatccctgctgtcatgcatgagctcgcaaaactcggccatctgaatcttgactgcatgacagtgaccggaaagacggtcggcgaaaacatcaagggccatgaagtcctgaataatgaagtgatccgtcctgtcacgaatccctttatgaaggaaggcggcattgctgttctgaagggcaatctggctccggacggctccgttgtgaagcgctccgcggttgaccccgcgatgatggttcatcagggtccggcccgtgtcttcgactgcgaggatgatgccattgcggctatttacggcggcaagatcaatccgggcgacgtcgtggtgatccgctacgaaggtccgaagggcggtcccggcatgcgtgagatgctgaacccgacttccgccattatcggcgcgggactcggcagcacggtggctctgatcactgatggccgcttctccggcgcgagccgcggcgcctcgatcggccacgtgtctcctgaagccgctgaaggcggcccgatcgctcttgtgcatgaaggtgatcagatcgcgatcgacatcaatggcaatacgctgaacgtactcgtctccgacgaagagcttgcccgccgcaaggctgagtggaagccgcgtaagccgaagatcacgacgggctatctggtccgctacgcgaagcttgtgagctccggcatgaagggcgcggttctcagctgatcctgaggcgcgtcacaaaaagtcacaaaacacgggacgcagagtcagaaatgactctgcgtctttttatttagaatgggcagttcctttttttttcgggataacttccatgtgggtgcatcctcagttcaatccgatcgctttttccgtagggccgctgtccgtgcattggtacggcctcatgtacctggtcggtttcgcgtttttctatcttcttggccgtattcgcgagaaggagaagtggcgcggtctgtcgggggaagacgcgcttgaggatctgcttttctatggcattctgggtgtcgtgctgggcggccgtatcggatactgtttcctttatcagccgtcttacttcattcagcacccgctcgagatcttcgcaatctggcagggcggcatgagcgttcacggcggcatgatcggctgcctgcttgcgatgctgtacttcaagcacaggcacggtgtcggccttctgaagaccgcggacttcgtgacgccgctggttccggtggggcttttctttggccgtatcggcaacttcatcaatggagaactctggggacgcgtgacgacgccggatttcccgttcgccatgatttttccggaatccgggacgatgcagccccgccatccttcccagctttacgaagccggtctcgaaggtatcgtgcttttctgcgtgatgtggttcttctcccggcgccagaagcctgaaggcgcagtgacggggcttttctgccttggttacggcatcattcgcttctgcgtggagtttgtccgtgagccggattccttcctggggctcagggcgcttggcctttcccagggacagtggctgtcgctgccgctgattcttctcggtatcttcctgattgtccgggcttaccgggtacgccgctgacgggctgcggcgcagcataaaaggaaagggccgaagcatctgatgcttcggcccttttgattggatccccgcagattccggtgggatacgtatcctgaaccgagggttcagggcggtcgcctccaaggcggaaatggttcgaacaaacgcgtgttcgttaacgcaatcggccaatgagatcagcggcctagcacagtgtgcattggttctggaacattggatcccatggttccggagcccgcggggaaaggcttgatgacttctattctatgcctcaactctcgggctgaggaggctgcttttcggcaggactatcgtcgctcccaatgcgagccacagcggcctcacactgttcccggagctccgagagacgggcggtagcttcactttccatggctttgctgcgctttgctgcatcctcgtagtcaaggcgcccccagatgagatccagggcaaccatgactgcgacctgatcgtaaccgaggacgcggccagattctctgatcgagcgcatctggcggtcaagctcctcgccgcatgcgcgcagccggtcttcatcttcgggtttgaccccgaagtgaaagacccgatccatgatattcagagaaagatctgacatagcggtttgccgtactcaggaaatatcagccaaaagtagcgggagaggcaacagaagagacaggctcttcttcgatcggttcgatattggtgtccttcgtcagctgttcgatcagaagaccgatgcggatgcccgtatcttccagcttctgacgggtctgattgagttcgtcacgcgttccgttaagctcgttctgagtgtcggaaagctgctgcttcagctgctcgttttccttgtgcaggttgtcagcacgctgaaccagctgggaaatgatggagtcaagtgcgtcaagttgttcttgcattttctgatgcctaagaaaagagaggtaatcctgtcgtctgcggttgcagttacggcagcggaaacgttattcggctcagcggctggctccgagcacgtcggacatggagtagtaccccttatccttcgtggacaggaaccgggctgccgtgagagcgccctgagcgtagccctcgcgggttgtgctgttatgggtgatttcaacctgctcgccagtgccggcgaagatcaccgtgtgcttgccgacgacatcgccgccgcgcaatgctgcaaaaccaattgtcccattctttcggggtcccgtgtgtccttcgcgggaaagaacggcaacttcgtcgaaattctggccccgggcctgcgcgacccggcgtcccatttcaagagccgtgccggagggagcgtccactttgttgcggtggtgcatctcaaaaatttcaacatcaacgtctgagaggagacgtgccgcttcttcaatcagtttgaagaccgcgttgacgccaagagacgtgttcggggcgagcagcaccggaaccgattccgaggcggcttccagcgttttcttttcttcagccgtaaagcccgtggtgccgatcacaacggcggtacctgacgcggcgcagaccggcagataggtgagggtggcttcaggacgcgagaaatcgatcagcacgtcgcagtcacggagtgattcgatatcatcggtgacggtaacgccggtcgtgatcccggaaggaacgccggcatccttgccgatcgcgctgcttccgctgtgaccgagagctgcggagagctccatatcaggcgctgcgagcacggctttcagaagcatctgacccatgcggccgttgattccagacagagcgactttaatcattggctattcctttttggtcttagctgcgggagcagaggccgcaggcgcggaagccgcaggcgcggaagccgcggtgcttgcggccggagcagccttcttggcggcttcggcttcttcagccttcttgtcaccgaggatcatcagatcggcttcggtttcatccggcatcttatctgcttcccagtgatcaacacggcccgccgcattgaagtagacaatgagcttacgggtttcggtttcaccgctgcggcgattcacgtagtagacgtaattccagcgatccgtatggaagcgatcctgaagaagcggcaggccgagcaggaactgaacctgctccttcgacatgcccttttccagctgccccaccatttcagaggttataagattgccctgatagacatcaggacggtaggggtgcaggaacgtcggcgtccatttggctgcgctgtcccatgcccgcgaaaccgtctggcatccgctgagagtcaggcaggctgctgccagcattgagcccgtcattagtttttgcaggaatctcattatctaatcaacttatcaaatggcaatgccttgtttcagatacactcgtatcataaaggcaaaagcttctttgtacctaggtttgagaatatgaaagacacatctcgtaatcagtctgccgagctgaagcacgcggggctgaaggcaaccggtccccggatgaagattctggaaattttccaggaagcttctcttcagggaaagcggcacatgtcagcggacgacgtttacaaggccctgctcgctgaagacatggatgttggccttgcaactgtctaccgcgtgctgacgcagtttgaaacggctggaattctgattcgtcaccattttgacacagactatgccacttttgagctggatgacggctatcaccacgatcatctggtctgcctgaagtgcggagctgtcgaggaattcgtcgatcgtgagatcgaagagcgtcagaatgaaatcgccaagcgcttcggattcaagcttgagagccactcgctgtcgctttacggtatctgctccgcctgccagaagaaggaagcggaaaggaataagaagcgcgaagaggggatggggaaaccggagtaaagccccgcgtattcgtctgaataccaaagagccggagagaatctcttctctccggctcttttcttacttgcttctgaatcggatcgcggggtcttccggcagttcgttgtactgcctgtcaccgaagacacggatctttgtgtcactgccttcgctccagaattcaggtgcatgacggatgttttcgttgctgacccggatacccatccagtcagccagcccctcaagcatccggaacccggttcggtaggccggattgacctggtgtccgtggctgtcagaggagattctgaagaagggcacctcgtaattctggcgatgatcgtagccgtgctcaagctcttttcctgaatccgtgccgggcttcttctccatggagaggccatggtcagcgaagtacacgagagaccaggagccgccggcattggccttcaggagatccaccgtacgctcgacgaaggaatccatcatgcggtatgtcgtgaggtagcagtccatcgcgctgtcaccgacatcaaatgcggccggccggccggaaagccgggtgcagaaagtcggatgggagcccatcagatgaacgaagagaacccggggcttgctgcttcccgcttcctgcttcagcgccgcgcggatcttcggcagcagcatatcgtcatccacgttggcgtcggcgtagttccccttaagccagaccgtgtgatggcttctgacaccgatctgagcgatcggattatcaaaggcgccgccgcgcccctggttcgagatccaccaggtgtcgaaccccgcggcattcgcgagcgtgacgatgttgttttccttgctgtagcggtcggtgccaggcgtgttgtaggagagcaggcgcgggagagaaatgccggtattgccgcccggggcaatgaagttgctgaagaaagtgccgttcgcgcggttcagataaggagtcgtatcgagcggatagccgtagaccgacgcgtagtcgcggcgctggctttctccgatgatcacaacataagtcttgtactgaggctcggctgacgtgactttccaggagggcggcagagcatttgcttcttcgcggagctcctcagccgagtaccacatagtggttccgaaactgtggaagaaggacgcggtctggatctgatcgtaggtctttccgcttccataagacacgaaccaggcaatcgcgcacgcggcaagccccgtgacgaaaccggttttcctcggaatcttcacctggccgaagaaatggatagcggcaagtccggcaaaaataaaaccgatcgcctcggcaaaaagctgccagggcgtattcatcagaaattcatgggtttccgccggcgtcgtctgcatgagggcgatagcgacgagaatgctgggcttcccgtaaagaatgccggccgggaggtagcagccaaagatgagaaccagagggatcgcgataaaccagcgggagatcttccactgactcagtgtgaagagcgtgagaatcacgaagaggatgtttttccagtcccagaactcgcgaagcgtgtggtctccataggtgaggcccatcgctgcgggcagcatcagagcaaaaataagcgctcccgcaatagcaatcggccaagcaaggggcgaccggtcgagagaccggaggaaatttctgatagttgaaagcatagttaaattaatgcgtttcccgggactgctgggattgaggcgaggaaagacggagcatttccttcgcgtgatcgagcgtggcctgagtcatatgaatgccgccgagcatgcgggcaatctcttcgatgcggcctttgctgtcgagctgcgtgagagagctgacagtcttaccgtcgaccgtctttttctcgacatgcaggtgatggatggcgcagctggcaacctgcggctgatgagtcacacagagcacctggcggtcatgcccgagctgctgcagaagacgtcccaccacttctgcgacagcgccgccgatgccggcgtcgatttcgtcgaaaatcatcgtctcgactggcgtcgcccgggcggtgatgacagaaatggcaagactgatacgggaaagttcaccgccggaggctacttttgttagtgcccggggcgatacgccttcgtgtccggcaaccaggaaatcacagtgctcaagaccgtgcggacctggttccgacggagagagactgacctcaaggcgtcctccctccatggagagcttctgcatggcctccgtgacaagcttagaaagactctgggccgcggttctgcggcttgcgctgagagcttcagcctcgcgcataaaggcggctttggcttgcgctgccgcgcgccgaaggctttctgtgtcaaatccggactgaatctccgagatctgggtgttcaccttgtcgtgaagatttttcagttcttccggacggacgtggaacttccgcgcggtgtcatagtaggcggaaagacggctgtcgagagcggcaagccgttcttcatcgaggtcgtttccgtcgagatactgtcggagcgtgctcgccgtgtcattcacgatgctggaggcgtcactcagctgctgcgcggcatcctcaagctttgagtcgaagcggctgagggagatgattttctgataggcgttcccgaggagcgtctgagccgatacatcgtcatccacaagctccgcggtggcggagctgatgccgctgatgatttccgaagcgttggagagctttgtgtgctcttcagacacccgctcccactcccccttttcaggggcaagcgcgtcgagatcctctttcatccaggcgagtttctcaagttcatcctggaggctggcggcgcgggcattcgctttctgcagtgcgtccgtggcgatctgatagtcctgatagagccggcggactttcttccgcgactcaaagagccctccatgggcgtccagaagccgcagctgttcagcaggcttcagaagggactggttggcatgctggccgtggatgtcgacgagtttctccccgagcgtcctcatctggcttaccgtggccggagagccattgatccaggctctggagcggccgctcgcatcaagcacgcggcgcatcagaatttcatcgtcatccggctcaaagccgttatccgtgagccagcgccgtgttgatcggttctgggaaaagatgccgctcacctcagttttcttggcgccttcacggatcacgaccgtatccgcccgggcgccgagcagcagctgcagggcgtcaatcaggatggattttcctgcgccggtctcacctgtaagggctgtaaacccgccctcaagattgatcgtaagctcaggaacgataacgaaatcagtgagtgaaaggctgagtagcacagcaggctccggtgtaggaggacggtggagtactaaaggttaccactagggtagcggatgatgcgcgagctggtcggcatcagattccacttcagtttccggcgaagaagatcaaagtggttatacccggccggatgcagcagcgtgaaatggttgcggccgacgtgaatgtgcagcacatccccggcctccatcggcatgaattcctgcatgtcgaaataggcctggccgtctttgacctcagtgagcttgatatcaatctgagcgtcagacggaagcacgatcggacggttggaaagcgtgtgcggcgcgacaggaacgagcaccactcccttcagagacgggtagaggatcggaccgcccgcggcaagcgcgtaggcggttgatccggtggtggtcgcgtagatgatgccatccgctctctgggaagacatctggagaccgttcacgtagatcgtgtactccaccatgccgccgattttgccgtgtgtgatgccgatatcgtttaccgcgttcgactggtagacgacccgcccttcgtggagcacggatccctcaatgatcggccggggatcccggacgtaatgcccctcaagcatgagaggaatcacgcggctcatttcctcaagcacaacgtctgtgatgaagccaaggcgtccggcattgatgccgattatcgggcagtcgtactgagccaggcgccggccgatcccgagcgtcgtcccgtctccgccgagcacgatggcgacatcggctttttcaccgatagtctgaacgctgttcggagggaaacggacggggtcagcaaggatctgagacgcggtctcgtccacaagcagtgacacaccgctctgcgtcaccagggctgccaacgcctccagaggccccttgaggtcaggagagcttttcgcaaagatggctgctgttttgaaaacggacatgtcagctcgagatagaaaaatctggcattactgcaagcgcatcatgccagataagaatggttaaaagagcagatcccggggctatcaggccgcgttggggttgcccatgatgttgtgaatgccgcagtcaacgtacatcacgttgccggaaacaccgctcgcgagatcagagaggaggaacgcggcagcgttgcccacttcttccgtcgtgttcgtacggccaagcggggacatctcttcggcttcatgaagcattttgccgaaatccttgatgccggacgcagccagggtcttcaccgggccggaggaaatcgcgttcgcacggatgccgcggcggccgaggctggcggacaggtagcgggtagacgcttcgagagcggccttcgcgagacccatcgtgttgtagttcgggatcacgcgctcgctgccgagataggtcagcgcgaggatggaagcctggcggccttccatcagcggaaggaaggccttggcgaggagcgggtaggaacctgcggagatatccatggcggtgaggaacgcttcacgggagaagccttccaggaagtcaccggtgatcgcttcgcggggagcgtagccgatcgaatgaacgaagccgtcaagaccaccccacttttcctggatagtcttcacagcaccttcgatatgttcattcttcgtgacatcgagcggcagaatgaagtcgctgccgaattcctcagcaaacttgccgatgcggtcccgagcgtgatcgccagcatacgagaaggcgagttcagcaccttcgcggtggcagacctgcgcaatgccgtacgcgatggaatggttggacagaactccggtgatgagaatttttttgccgttgagaaatcccatggtgtttttcttcgtttctaatgaaataggaaatccgccccaggctgcaccgcggcgcggccgggcaggagcagaaacacgattgcttattttagagagttgcttattctagcaatctaaatcagttagataaacttctagcgtttttttcttttgaccgttttccgggcggaagacttcgcgcgggatgatttcgcggaagatgctttgcgggaacgggccgtgcggctcgaggcctgcttggcgcccctgcgaggcatggcgttcaggcggtagcggcgggccgtccggtaaataatgcgttccgaattcacccgctccatatccggagcgcgctgaatcacaggcgctgtgacgataagcgtcatgccgcggcgaagcttggagtttctcaggcggtttgtgacaatgatcgagcgcggggtgacgttcagacggtccgcgatctcctcaagcgtatcgccctttctcacgcggtagcggatctggcggtaacggatcttcggaacggaaggcacgggttccaggcggaagaagtcgtttccgccctggatttcttcccgcggggactccgcgtcagcccggacgaggagaagagaattgtcagccacctgacggttgcccggaattcggttgacttcgcgaagttcctcttcagacataccggttccgagcgcgatatccgcgagggtttcacccttctggaagcggtgcgttttccaggccgaaacccgtttgccgttcgaacgccacagagcgagattctccatgaattcgtcgaggttatccgcggggatcagcatggcggtgttgtgggcgccgacaatgacgggcttattgaagctcggattgagaagcttgaagtcatccagcttcatattggccagacgggcggctgtcttcacgtcgatatccttgtcgcggaagacctgcacgaaatagggttcgctgccgatatcgggaagcgtcacgccgtaggccgaagggttctggatgatccgtttgaccgcctcgagcctgggcacatagttcgcggtttcgagcggcatgcggagatgcgagtagtcagtcggcagccctgcctgagcattgcggtcgatcgccctctgcacattgccttcgccccagttataggcagccagagcgagctgccagtcaccgaactgcgcgtacagcttctggaagtagtccagagccgcacgggtgctttccacgacatcacgccgctcatctttccagaggttctggttcagggagtaggtcgtgccggtgctgggaataaactgccagagaccggatgccttggccgatgacagggcattcgggcggaaggaactttccacgaatggcagaagcgcgagctccattggcatgccgcgggcctcaacctgacccacaatatggtagagatacatgccggcgcgggtcgcggtcttcgcgaagctttccggatgccgcgagatcgctgcaacctgggtttcaacccgggcgctttccagcgtcggaatcttgaagccgttccggatacgggtccagacgtcaatgttcggtgccggcagctccgcggtgataacttcggtgatcctgtcagcggcaggcgcgggcgcggcagctgcggcaggcgtgccgggaaccgatgccaaaacgggcagggccttatcgcttgctgcaggaacgcctgctgcgggagcggccatggagccggtcgcgtaaatgccgatgagaaaaagtgggatcagtcgcagtttcatttgttgcgtgaaaagagtgttggatgcctctgcgggcagctatgcgatggtactctatgttattaggttaagccgctacggccgaaaggctttttgtaaaaatgtcaatcgttgagggacagaaccagaatgagcaaagagctgagcattcctgattttatgggaacgccggccggaaggttcctgcgggaatgggagtcttctcaggtagccggtgtcgtgggagacgtgtttggctacagcgcggttcagattggtcttcctgagctggatctgctccggggcaaccggattgcgacgcacattcagattcttccccccgaatcgcggaacctgaaaaacttttccagtcaggatcctctgaacagaatactggctgattttacggaaattccgctggcctctgagagtcaggatcttgtggtcctcgcgcacgcgctcgatttctgggaaactgatgctccggctcagaaggtgctgcgtgaagcagcccgtattcttgtccctgaagggcgtattgtgctgacagcctttaaccgcgcggggctttggagtctgcgccagagactgtcgcggattggactcggaggggcttttctgcctgacgtagcccgaccgatcgctttgaagcggctgcaggactggctttcactgctggggtttgaagtggaccgggggcatttcggcgcctatcagatgccgagccgcaccgcggccgggctgcatcggtttgagtggatgaatctggcgggcgaccgctggtggcccgctcttggcagccttgtgatgctttccgccaccaaacatatcgctggcccccgcctgatcgggagcacggcgttcgccgcggcccgtgcgctccggaagccggggacacagcttgcggcggagtccgcatcgagagacgaatcccgtaagctctgatgactgaattaatggataacgtacgactatgcaatcccctgtaagcaaaaccctggaaatctggacggacggagcctgcaagcagaaccccggtcccggaggctggggggcgcatctcgtgtatggacgccatgtgatggatctctatggcggagaggccatgaccacgaataaccgcatggagcttacggcggtcattgtggcgctctcctgcctgaagaagccgtgcccgattgtgattcatacggacagccagtacgtgaagaatggtgtcgagcagtggatggcgaactggaagcgtcacgggtggaaaaccgcggcaaggaagcccgttaagaacagcgggctttggaagaagctcggcgatctggtcgatcagtttgaaatcgaatggcgctgggtgaagggccatgcgggagatcccggcaatgagcgggcggacgaactcgcgaactggggagtcgaagtggtgcggggcacgagaggtgcctgtgagatgattcctccgggtgtgctcgagagtctggcggctgacatcgaataagagaagaggcggaacagaaagtgcgacagatttgtctggatacggaaacgacaggacgtgatccggagaacggtgaccgtctggttgaaattggctgtgtggagctggatggacggcgtcttacgctggatgaccggtttctgtaccacacgctcatcaatccggagcgtgaggttcctgaggaggttgtggcaatccataacctgacgactgagcgtctggccggagagccgaagttcgctgaaatcgtggacaagttcctcgactttgtccggggggcagagctcatcatccataacgctgagttcgacgtgggcttcctcaatatggaactcgccaggattggccgtcctccgattgagagcatctgcagaatcacggatactctggcgattgcgagaaagaagcatccggggcagagaaacagcctcgacgcgctctgcgcccgctacgggattgataattcgtcccgtacgctgcacggcgcgctgcttgactcctggctgctggcggaagtctactttgcgctcacccgcgggcagggcaacctcctcatggaagcttccggccgcggatcggccgaaaaactgatgccgcttccccctccggaaagccttcgcgtgattcgggctgacagccgtgaactcgcggcgcatgaggagcagctggataagatcgacaaggcctgcaagggaacctgcctctggcggtttgatccgaacgcgccagctccggaagagacaccggcaaagcccgcgtaaatgcctgacagcgacaggatttgacaaaccgaaataaaaaagtaaaattatcaatctctgtattgcgcagttagctcagcggtagagcatcgccttcacacggcgggggtcacaggttcaatccctgtactgcgcaccaagattccaaaaaagcgatcctgtcgggtcgcttttttattgcctcaaaaaaatgccggcaggatctgccggcgtgattctctcagttcttttttccggggccgctcaggcggatttccaccagccgggcgtacttcatgaaggtgtagatacatccgcacgcggtgtggatgaaacccggaagcccatcgaggaagccgagcttcaggaagtaaaacttcaaaaagcggcagagcgggctggagaatatcttgaacccatggtgatcgtctccgatcttatgaagatagccagcccggagatacgcgaagcggatcttcttctgaagaaactcactcaggttattggacggatagtgaaggaggtcgcctttcaggcggaccgcttttttatccgtctctactttttcctcaaccggttcgttgttccagaccgcatggcgccggtcaaagagccggatctgccagtccgggtagccgtccccgtgcttcagaaaacggccgaggaaccaggtcttccgggcaaattcatacacgtgcggtgcggcgtcagagctgcggccggaaagcgccgcctgaatagaggcggagagttcaggagaaagccgttcgtccgcgtcaatgcagagcacccagtcgtgagcagcctgagagacggcgaaacgcctctgcggaccgaatcccatccatccctggtggatcacataagccccgaaggatctcgcaatctcgaccgtccgatcacggcttccggagtccacgacaagaatgtcttctgcccactggcagctttccagacagtcctggagatgatcctcttcgtttttcgtcaggatgacgatgctgagggggaaaagctcccggctggtcgattcttcaggcatgagaactctcttcgcaaaggtgtgacaggtaggcttaagaataaacgaaatgcgcgtcccggacgcctgacacgtggaggagctgatcaatcacttcctgctgcgggtcgacgaaagcagggcggcgggcgacgacctgcccgtgcattccgtgggtgtcaatgcagaacacaagctggcagccgtatttgctgttctcaaaaggcgccacagtcttcgcgatctccttgagatccggctcttcgctcacctcgatatgcagtgcggcgtgtctccttgtgcggaatcccggaaggctttccgcagagtcgatggagaaggaggtggtttccttcttttcgtcccagcggctgcggcctgtcacgatgacaatctcgtccttcacgaagatgtcccggtactgatcccaggcgtctgagtagcagaccgcctcgatcgaaccggttccgtcatccagtgtcacgatccccatgcggccgcgttttccgatcacctgccggagatccacaacaacgccggagaaccggatagtgtccttcgagcggtagctctctttggctcctggcgccggacggcggccggaagcgaggatctgatgaatggtttccggaatgaatttccggatctcgtcccgacattcgccgaagaggtgccccgtcaggcagaaaccgatcacttccttttcgagcagcagcttttcgtgctcgctccagggggtaacggggatccagttcacgatgcgctcgggttcgctcgcgtcgccgaagaggctcccctggtccgcgaagagcgcggcgtctgcggcggccttcatagcctgatccaggtttccgaactgttttgcgcggtccggatcgatggtgtctaaggtccccgccttgataagtccttcaagcacccggcgggaaagtcccgcactgtcccgcttcttcatccgggcgcagaggtcaaagagatccttaaagggaccgttttcctttcgctccgccatcagggagagaatcacgccttcgccgacacctttgatgccgccgagaccgtatcggatcgtcttgctgtcaggagcagtgaagaaccagtcgctctggttgatatccggcggcaggatgctgataccgcgaagcttgcagtcatcgataaacgtgcggatcttatctgaatccgtcaggatcagacacatattggccgccatgaattcggccggatagtgagccttcaggtaagcggtctgatatgcgacgtagctgtacgccacagcgtgggatttattgaagccgtagcccgcgaacttcgccatcaagtcgaagatctcgttagccactttttccgaaacgccgtttttcgcggcgccggcgacgaagatggcacggtgacgcaccatttcctgcttcagctttttacccatggcgcggcggagaaggtcagcgccgccgagcgtgtagccgccgatcacctgagcgacctgcatcacctgttcctgatacaccatgatgccgtacgtttccgcgagcactgagcccatgcggtcgtcgaggtaggtgacgggttccttgccggactttcgggcgaggtaggtcggaatcatttccatcgggcccggacggtaaagagcgttcaaagccacgagatcttcgatccggtccgggtgcgcctgacgcagcagctgccgcatgccgggcgattcaaactggaagactgccgtcgtatcgccgtcctggaacagtttcagcgtagccgggtcatcggtcggaatacgcctcagttcgaaagactgacccgggtgaagcttattgatgtactccacgcacttattcagaatcgtgagcgtcgtgaggccgaggaagtcgaacttcacgagaccgacgttctcaacgtcatgcttatcgaactggctgatcgtgttttccggctgaccgtcctggttatagagcggacagaaattggtgagaggacccggagcgatcagcacaccgccggcgtgcatgccaaggtttcgcgtgatgccttcaagcggttcggcgtaacgcatgagctcctgatactgctcatctccgtcgatctttttcttgaagtcaggctccatctccttcgcaagttcgagcgtaacgtcctgtcccggaggcgcagggatgagcttcgcaagttcatccaccttgccgtaaggcatgccgagtacacggccgacgtcacgcaccacagccttcgcgcccatggcgccgaaggtcgcgatctggctcacagcactcgcgccgtacttgtccttcacgtgctgaatcgttttgtcgcggttccactgacagaagtccacgtcgaagtcaggcatcgacacgcgttccgggttcaggaagcgttcgaaaaggaggttatagtgcaacggatccatatccgtgatccgcagcgaataggcgacgagtgaaccggcgccggagccgcggcccggtcccacaggaacgccgtgggtcttggaccagttaatgaactcctgcacgatgaggaagtagcccgggaacttcatcttcttgatgatgctgagctcgtactcaagccgctcaagatagcgcgggcgcacctcgttccgcttcgcttcatccgggtaaaggaattcgagcctttcctcaaggccgtcatgcgcgagatgatcgatgtaatcatcgagcgacatgcctttcggcgtttcgaaaagcgggagctgcggcttactcagaatgccgtcgacattgcagcgcttggcaatctcaaccgtgttctcaatcgcgctcggaatgtccgcaaagagcgacatcatttcttcaggcgacttgagatactgatcctcggtgtaacgcttcgggcgcttcggatcggcaagcgtgtagccttcggcaatgcagacacggacttcatgcgcgatgaaatcttcttttttctggaactgcaccgggtgcgtcgcgacaaccgggagctccagcttcgcggccgtattgcagagaaaccggacggcggcttcgtcgcccggacgcccggcccgctgcagatcgagatagaagcggtcagggaagaaatgagcaagcttttctgcggcagcctcagcctcggcagtttttccccggcggaaaagtgtctggatctcgccctcgggaccgccggaaataccgataagcccctttgtcccctctcccgcgagccacgattccttcacttcaccccggccctttacatgacactggttttcgagccaggccctcgtgagcagcacacagagcgaatggtagccgtcatgatccatgcagtagaccgtgagacggaagggatgagcgggatcctcttcgttcgtgatccagagatcacagccaaggatcggcttgatgccctccttgtggcaggactcatagaaacggacgcttccgaacatgttcatcaggtccgtctgcccgaatgcgccgacgccccactctttcatctgcttgatggcggggttaagccggacgataccgtccgtaatcgaatattcggaatgaaaacggagatgaacgaattttggctgcatggggatgtcgggataaagcgaagaagagactaagcctcggtggtgaggatccggtgaacggtgtttttcacttcctcttcggtcggccagtggccttccgagccgagtgtgactgcggcgggattccagggaccggtgcgggtcggatccgtaacgccgatcagggtgatctgacgggcgccgatgcccgcggccacatggctgatgccggagtcgtttgcgatgacgagagaggcccgttcgcagagcgcggcataggttccgagggtggtcggctcaagaattcttgcggaaggacagcttacccggacttcctccacttcgtgaggagaggggagcgcgagcggcaggtaaccgagttcctcaatatatttcgcaaggctgtcaaagtggtcccagctcttcttctgacccttatgaagtccgcgggcaacaggggcgagaagcacgaacttctgatcctcggtgatgtgattgtcgcggagaatattgcgggcgccggcgcgatgacgggcgagcagcttaagcccgagctgcggcgtgggcttatcgcgcgccggtgtgccgccccaggcgataatcgcttcgcgcgccaccgtgaagaaccggttgacttcatgtgtgacaccgggctcggcgagcctggcgtcaagaaggaatccgcgtccgtctgtcgggtagccggccgagcggataccgcccagcttgaagagcagcgcggaaccgaaggagttcgggaaaagcacgcctcggggagagtccccggtactccgggcaatttccttcacccgccccagatccttcagcacctgtccttcgatcgggtcataccgccaccccatacctgccatgaggtcttcagcaaaccttttcccgatgagcgagggggtaaagccgctgtcagcgagaagctgaagcgcgggaagggtcatcatgcagtcgccaacatgattgggaagccggcatagaacagtcttggacatgattatttacggttgagttggactgagggatgaggcatcttctgatgagacgcccctagcggatatgatagcggcagtgtgaaacctactgaaaaaagatgacagagatgaaatccgcctctcccggccgcgcgaagaagcgctggtctcttgctgaccccaatattgtccgtctgctgaagatgctccgcccttataagaagtggatcatctacgctgttatcgcactcgcggtgactgccggatcttcctcgctgatcgcgatgctgctcgggaaactgacggatatgggattctatgaacataatccctacgtgctcctctgggcgccggtcgcgctcctggggatcaccgtgctccacggcgggtcaacgttcctcagcagctactggctgcaggaggtctcgcagtctgtgatggtggatctcagaacccagatgatgaggaacgtcctttactggccggagtccgtctatcagaagtattcgaccggtgagatcgtgtcgaaatttctctatgaggcgtcgaatgcgctgtccggcgcgtccagccttctcacgctgatcatccgcgatgtgctgcagatcgtggcgctcctcgcggtgcttgtctggcaggactggcggctcacggccgtgacgctgcttctcgcgcccttcatcgcgatcatccttcgctgggtgagccgccgcatgcgtcagttcacgaagatgatgcaggagacgatgggatcgatgtcctccggtctcttccagatgattgatgcccaccgcatggtgaagatctacggcgcccaggaacgggaagccgacaactttgcccggatcagcgaggaattcaagcgcctcaatatggcgcagcagaaggtggcgggcgcgggaactccgctgacgcagcttgtcacgatgagcgcggtgtctgttgtgcttgttgtggctctggttcaggcccagaaggggctcctcacgatgggacagttcacgacgtatctctcggcgcttctgctcctgatgccttcaatccgccatctctcggggctcaatggctcgatcgcgaagatgggagcggcggctgacagtatctatgcgctcctgggcgaaccgcttgaggatgaaggcggaaagaaagagctgaagagcacgggccggattgagttttcacacgtctcgctccgctacgaaggcgcgaaggaaaatgcgcttacggatttctcgctttccgtgaagcccggggaaagaatcgcgctcgtcgggccctcgggtgccggcaagtcttctgtcattcacctgattccggcgttctggcatccgactgagggaaagattctctatgacgggctggagcagagtgagatttctctccggtcgcttcgagatcagatcgccctggtgagtcaggaggttgtgattttcaacgacacgattgccgcgaatatcgcatacggcgctccgggagcgactgaggaagagatccggcgcgcggcggacgcggccagcctcacctctctcattgagtctcttccggatggccttcagacgaaggtcggcgaatccggatccaagctgtccggcggacagcgtcagcggatttcgattgcccgcgcgatcctgaagaacgcgccgattctccttctggatgaagcgacgagcgcgctggatacggaaagcgaaaagtacatcgaggcgtcgctcgcccatctgatgaaggggcgcacggtcttcattgtggcgcaccgcctgtccactattcagaatgcggaccggatcgtggcgatggagtccgggcgtcttgtggagtccggcacgcattcggagcttcttgcgaagggtgggctgtatgcccacctctacaatattcagttcagtgaaaagagcgctccggcctctgctccggagcaggaaaaggaggaaacagcatgacgatcaagagcgaccgatggatccgcaggatggctgaagagcacggcatgattgagcccttcgagccggggcaggtcaggtacgttgacaataaaaaggtcatttcctacgggacctcctcctatggctatgacatccggtgtgcggatgaattcaaggtcttcaccaacatcaattcgacgattgtggatccgaaggatttcgatccggcatcctttgttgatgtgaagtccgatgtctgtatcattcctcccaattcgttcgctctcgcgcgcacggtggagtacttccggattccccggaatgtgcttacggtgtgcctcgggaagtcgacctatgcgcgatgcggcatcatcgtgaacgtgacgccgtttgagcccgagtgggagggctatgtgacgctggagttttccaataccactccgctgcccgcaaagatctatgcgggagaaggctgcgcgcaggtgcttttctttgagagcgacgagccctgtgaggtgagctatgcggaccgcggcggcaagtatcagaagcagcacggtgtgacgcttccccgggcataagcgtgtgaaaaatcagaatcaggagagtagtgagatggtgaaaagcgaagactttctgccggctgcgtccggccttgacggtatcgaatggacggaagataccccgaagctcattctgagctacggagacgcggcggctgaaaggcattcggctctgaccggcgccttcctgaaagatgtccgggctgcccgggtgatccgtaccgagggtgagaacggtgagaagctgcttcgccgtctgattacggctgatgtggcgaagcatgctacgggcgactgccttctcgcctcgatgctgaatgcgtcaggcggtgtcatgcaggaagtggccgtgattgcccacacggggtactgggatgtcgtgctgttcccggaaacggcggatacggggcttgcctggtcgagacaggttgcggtgtcttttgaggccgaagtggagcagccggaagaccgtcacgtattctggcttggcggtccccttgcttctgacacgctgaaaaaggtggattgcgccgttccgaaggcgggcagcttcacggagccggaagcgggtgttcaggtctgcgcctttgaggatatcttcctcattcagggagagactgcgaagctggatgcgttctggaagaaactggccgcggccggtgccgctccgatcggtgaagaagcctgggaagccgcccgcacggcgatctgccttcccgcttttggctgtgattacgacgaatcctcctctccgcttgaagtgggtcttggctcgtcagtcgacttctctgatccggcccgtatgttcatcggacgcgccctaaccgaggcccggtaccgagccggaatccgctgccgccttggcgtgcttgaaattcagtcggaggatgatgcctcgaagctcgactccgctcctgaagtagtgctccgcgggaactcctctgaaggcgggatcatcaccacatggactgtctcagactcgggtactattcttgccctcgcgctgctcccggccgaaagccatatcggggatgaggccgaagtgtcctaccgcgcgggcggtgaggatcgggtctgcgcaggcaaagtcatccggctcaggtaagtcagccggttcaggaatcaataaataaatcatggcaatcagcgtttttgacattttccgcgtcggcattggtccgtcctcatcgcatacggtgggaccgatgagagccgccgcgcttttcatccgcatgctctcccaccgggagatgctgccgcgggtcgcacggatcactgtggatctgatgggaagtcttggggcaaccggcaaggggcactcgaccgatacggcctttgtgcttggcctcatggggctggagcctgaaacgctcgacgtggacgcggaacccgcgattctcgcggatatccgtgataaccgtcgcctgaagctgggtggagagtctgaaattgggttcgagtgggaccgcgacatcactttcagcccggaaaagattgcccgattccacacaaacgcgatcgatgtggcggcgctcgacgccgaggggcatacgcttctcgcccgtcgcttctactcggtaggcggcggctttgtcgttgccggaagcgaagagaatccggatattccggaagtgccggctgcttttaatcaggtggtgctcccgtatcgctacaagcacatggtggaactcattgcgttctgcggccgggatggaaaaacgatcccggaaatcgtccgcgagaatgaacgcgtctggcgcactgatgaggaaatcgaccgtgagctggatcacatctggagcgtgatgaaggaggcaatggaccgcggcctgagaaccgaggggatgctccccggtgcttataaggtcgcgcgccgcgcagccggcatgaagcggcgccttgaaaagatttcactcaccgatgatccgctcgctgtgcttgactgggtctgttccttcgccttcgcggtaggggaagaaaacgcgacgggcggccgcattgtgaccgctccgacgaacggcgccgcgggtgtgatccccgcggtgatcgagttctaccgtcagtttgtttccggggcggatcaaaagggtattcgggacttcctgctcacggccggcgcgattggcattctctttaagaccaacgcttcaatttcaggcgctgaggtcgggtgtcagggtgaagtgggtgtcgcctgctccatggcggcaggcggcctcgctgcggtgatgggcggcaatgcctaccagatcgagaacgcggcggaaatcggtattgagcatcatctggggctcacatgcgacccggtggcgggtcaggtccagattccgtgtattgaacgcaacgcgatggcggctacgcaggcgattgccgcggcccggctttccatggcgggcaacggccgtcactatatttcgctcgatgaggcgattcagacgatgctcgaaacgggccgtgatatgtgcaataaatataaggaaaccagtacgggaggccttgcggtctgcatcgttgagtgctgatcgcggaaaactcccgccagaaaaatctccggatgccattcagaaaagcatccggagatttttgtttattgggtttcagtctgatcagacagcgatcggcgccttgatggcgggccacgggttgtagccctcgatcacaaagtcctcataccggtaggagaagatatcggcgggcttccttgcgagtgtgagcgtcgggtaggcgcgcggcgtgcgggagagctgctcacgcacctgattcagatgattgagatagatgtggcagtcaccgcccgtccagatgaagtctcccggttcaagatcgcactgcgcggccatcatgtgggtgaggagcgagtaactcgcgatattaaagggcacgccgaggaacagatcgcaggatcgctggtagagctggcaggaaagcttgccgtccgccacatagaactggaaaagacagtggcaggggggcagtgccatgtgaggaatgtcgcccacgttccaagcgcagacgatcatccgccggctgtcaggatgatgccggatctggtcaatcacttcgctgatctgatcgatcttgtcgccgtttgccgttctccaggcacgccactgagcgccgtaaacaggaccgagattgccgtccttatccgcccactcatcccagatcgtcactttgttgtcgtgaagatattggatatttgtgtcgccgttcaggaaccagagcagttcatgaatgatcgagcgcgtatgcagcttcttcgtggtgacgagaggaaagccttccgagagcgggaaccgcatctggtagccgaaaaccgagatcgttccggtgcctgtgcggtcagtcttcttcactccgtgttcataaacgtgctttaagagtgtttcgtattgatcgtacatggaagagatggcctaaataagagaagttggacagaaacggaagccgccggggcgggtttcgactttacaatgaatcaaccaattttaaagcaggccggatttcttcgagggggcggggttcagcccctgggctcatgggagctacgccgaaagccgtccggcagcaacaaaggaaatcatcgtggaagaggtcttgatcaactattcgccccgggaaacccgcgtggcgattctggtggacggcatcctgcaggaaatccatctggagcggcaggtgtcccgcgggtttgtgggaaacgtgtatctgggacgcgtggcccgggtgctgcctggcatgcagtccgcctttatcaacatcggactcgagcggacagcgttccttcatgtcgccgacatcacagaagcgcatcagggagataagactctcccgatcgagcgcgtgctgcatgaggggcaggccgtgatggtgcaggtggcaaaggatcctatcggaacgaagggagcgcggctcacgaccacagtgtcgcttgccggccggaagctcgtttatcttccccgcgaaccccatatcggcgtttcccagcgtattgaggattcggaccttcgggaaaaacttcgtgacgaagtgagccgcctgaagcctgaggaagaaaagggcgggtacattgtccggacgtccgctgaagagggggcgacagaggaagagttccgctccgatatgcgttacctcaaagtgctctgggaacagattcagtacaaagcatctcacctgcccgctccctcgcttctctatcaggagctgtcacttgagcagagggtgctgcgcgatatggtgcattcggagaccgcggcgattctggtggactcccaggacacctttaaggaactgaaggaatttgcgaagaccttcgtcccgatcgccgaggagaagctccagctgtaccgcggcgaaatcccgctctttgagaagtatctcgtcgaggatgaaatcgagaaggcgcttcgccgccgtgtggatctgaaatccggcggttatctggtgtttgatcagacagaagcgatgtcaacgattgacgtgaataccggaggttttgtcggaaagaaggatttcggcgacacggttttcaaaacgaacctggaagcggcgcagacgatcgcccggcagctgaggcttcggaatctgggcggcatcatcatcatcgactttatcgatatgacgagtgacgaacaccgggcggctgttcttgctgaacttcgccgcggcatcgctcaggaccgcacccggatgacggtgagtaactttactgagcttggcctcgtcgaaatgacccggaagcgtacccgtgagtcgctcgctcatatggtctgtgaaccgtgcccggtgtgcggcggccggggggaaatcaaaaccgcccgtacggtctgctacgaaatcctccgtgaggtggtccgtgagtggcgccagtacaccgacgcgaaggagttcaagattctcgcttctcagactgtcatcgatatgtttctggagagtgagtctccggcactcgaactgattcacgagtttattggcaagccggtttcactcctggtggaaccgggttacacccaggagcagtttgatgtaattctggcctgaaacggggcagcgggagagaaggatgagcaacacgttttactggcatgactatgaaactttcggcctccggggtgacgagagacgtccctctcagttcgcgggggtaagaacggatgaaaatctgaacttcataggtgagggagaagtcctctactgcaggccaaaccgcgattttctcccctctccggagagctgtcttctgacaggcattattccccagtactgtgaggaaaacgggctcccggaaaacgaatttgcccgggcggttttcgcccggctttctgaaccggacaccattggtatcggctacaacaatctgtcgtttgatgacgaggtttcccgcttccttttctggcggaatttccttcctccgtacacgagggagtattccgcgggctgcagccgctgggatctgtatccgatcacgctggcggtctgggcgctgcggcctgaggggattgagtggccgctcagaaaggactggattccgaagcttgaagcgaagcgcattctgaaggatgagaatcccgatctcgatggtcacaccttcaagcttgagtgtctcacggccgcaaacggcatttcacatgaaaaggcacatgacgcgctttccgatgtgtacggtacggtggctcttgccggtctgatccggaaaacaaaaccgaaactctggcagtgggcatttaagcatcgcggcaagcaggccgtgattgaggagctgaaccggggaccggtcgtctgggtggacagccatatcggtcagacgcacggttatctgaagtgcgcgctgaaaatcgccgcgatgccgcacgacccgaaccgggtcctcctctgggatctggaacgggatccggaggagcttttcacgctgaggtctgaggatgtggagagacggatcttcacctcaggtgatgaaaatgatccgaggctgcctgtttatacgctccgcgtgaataagtgtcccttcgtctgcagtcatctcggtgttctgagcgggggacaggcggagaagttcggcatcgatctcgaggcggtgaaacggaatgcggaaaaattcacgcctgagagaatgagtgaagtgacggctatgctgatcgccgggctcgaagaggctcacgagaaagagatcccggagcccgagcaggatcctgatgaggcgctttactcctccgggttcccgtcacgctcggattcccgcatggttgagaaagtgtcgggactgaccggggaagcgcttgcggaaagttaccacgagggcaggattcactttgacaatccggtctatgaccagctgcttctccggtatcgggcgagaaatttccccgaaacgctgacggatgatgaacgtacgctctggctgcacgacgcaaagcaaagaatcgaaggcaggaaggacagctacgtggagactcttgatcagttagcagtccggactggagaacaaggacgccccatcctcagcgctctatatgattggtctcggggtgttttcagggatttaggtatttagccttagtaagatgggctaatatcattattggactctgcagaaaactatttttgaacggggtgtatggatatgtctttgaataagctgaaagttggtattgtcgccggcattctgccgcaggccgctgtcgaactgaagacccggctgatcgcggaagctcagaagctcggacgtccggtcgaagtggtcatggactgggaaccgccgagaaaagacgcaccggatcccctgttccatctgcgtgatcagaagatgctgtcgctcgacgcgtcgatccgacttcagaaagagggtgttgatctgattcttctgccctgcgtcgcggtccagaaatacctggatgaactgcaggttgaaatcacgacgccggtgcttgactggctctctgcgatcggagaggaactgaaagtttcgggcgcgaaaaaggtgggcgtgctgaagtgcgcctatgcgcagtgctcggcttcctctcacgcgagaatctttgccggcgacgctgagccggtgccggcggacgaagaggctcagaagctgactggggaggcgattgctgaaatcaaggcatccggtgtaaccgacaaagcggtcgagctgctcgccgcggctgccgggaggctgggaaccgtggacgcggtcctgccaatgaatgaggctgtggcgctcgcagcgccgaaactcgctgaaaaaggcattccggttctcgatacgatcgggatcctcgcgaaagccgcggccgcttcggaaccgaagccgctaccgaagcccttcaaactgggtctgatcggcggacttggaccggcggcgacagtggatctctttaataagatcgtgaaggcaacccctgcgaagacggatcaggagcatttcaagcttgtgattgaggagaatcctcagaccccggaccgtaccgcatgccttcttgaaggcaagactgacccgacgatctgcctctatcactcagccaagcgtctcgaagaggatggctgtgacgcgatcatcattccctgcaataccgctcacgcgttccttccttatatgaagcgctacctcaaggtgccttttgtcgatatgcagcagacggctcttgaagatatcgcgacccgcttcaaggaaccccgcatcggtctgctggcaacctccggcacgatcaagaccggtatctattcgaagaaggctgaggccatggggctgccgctctttaccccggatgaagagcatcagaaactcgtgatgtccgcgatttacggtccccagggcgcgaaggcaggattcacggaaggggtctgccgggatgaacttctgagcgccgcggaatatctggtgcgtgaatacgcctgcaatgtgctgattctgggctgcacggaactgcctctgattctggatgagacggacgaattcccgattgctgattcgcgggtcgcgattgtcgatccgacagcggtgcttgcccgcaaggtggcaaagcttgctatgagcgagaataagaagcgcggtacccggtaacagcaggcatcaggttttgtgctttctgaaggcgggctgcggtgtcactgcagtccgcctttttctcagagaattctgaatgaaaggagtgcgcggatggtaaagacaaagattgaaaaagcggcctttatcggtctcggtgtcatgggctacccgatggcgggacatctggcgaagagcggcttcagcgtgatggtttataaccgcacgaagagcaaagcggaccgctgggtgtcagagttcgggggcagggcagcgacgactccccgagaggcagcctcaggcgctgatattgtttttctctgtgtcgggaacgataacgatgtccgctcagttgtctatggcgaggatggggcgctggccggcatgacgcccggcgccattctctgggacgacacaaccgattccgcgcagctcgcacgcgaactctacaaagccgcgaaagagaaaggggtgtccttcattgacgccccggtctcaggaggccagtccggagcagaaaaaggcgtgctgaccgtcatgtgcggcggtgatgaggaggcgtttgaagccggaaaaaccgcggctgccgccttctcctgcgcggtgacccggattggggaagccggggccggacagctcgcgaagatggtgaatcagatctgcattgccggaatagttcaggggctttccgaagcggcagcctttggcatgaacgccggtctcgatatggataaggtgttcggcgttctggaaaagggtgctgcgggttcctggcagatggcaaaccgcggaaagaccatggttcgcgatcagtttgattttgggtttgccgtcgactggatgagaaaggatctcgggatcgcgctcgcggaggcgtccagaaatggctcctctcttcctctcacagcgcttgttgatcagttttacggcgaagtccagcatctcgggggccgccgctgggatacatcgagtctgatcgcgcgtcttccgagaaaaaagcccgggtgctgaatcctgaaacttaaaaagctaaaataacggactttagcgtttaagaaacgctgcaactctgttgtttactcataaagaaaatctgccatggccgttgaaaacgaaaacactgcgccggttaattcaaacttcatccgcacgctgatcgaggaagatatcgagaagggagcgactgtgccccgtaaatggtgcggtcatccggctccttattccgagcaggtgaagggagtggatgatccggcgagaatccgtacccgcttccctccggagcctaacggatatctgcatatcggccacgcgaagagcatctgcattaacttcggcatggcccgcgatttcggcggctatgcgcatatgcgtttcgatgatacgaatccgggaaaggaaagccctgagtacgtggagtccattaaggaaaccgtgaagtggcttggtttcagctgggagcataacggagaaaatgatcttttcttcgccagctcgtacttcaagtggatgtaccagtttgctgagtatctgatccgcaccggctatgcctatgtggatgagcagacccaggatgagatgcgcgcgaaccgcggtacgctcactgagccgggcaaggattctcctttccgcaaccgcagcgtggaggaaaacctccgcgtcttccgcgagatgcgtgacggaaagcacccggagggttccatggtgctccgcgcgaagatcgacatggcaagcccgaatgtgaatctccgcgatccggcgatctaccgtatccgtttcgctgagcatcaggaaacgggcaacgaatggtgcatctatccgatgtacacctttgcccatccgattgaggattcgcttgagaacatcacgcattccctctgcacgctggagtttgaggatcagcgtccgttctacgactgggcgcttgaacgcatcgttccggaactgcgcacgccgcagtacgaggaagcgaagcagatcctgaaggatatggcggaaggccgggatgaccgcgcggacgcgttccttgcccgcgttgaagagtcgaaggcgaagcttggcattacctccgatcctgaagtcgcgatggcggagatcctcgcccgccatggggccgagtcgccgcttgcggctgatgccgctgaccggaaggccgctttcgcgctccttaacgaccacaccgaaaacttcactccggtgctccaggcagcgctcgatgttgtgcgtacgaatttcttcatgctgtcccatcagcatgagttcaaccgactcaatatcacgaatgtggttctttcgaagagaaaactgatcacgctcgtgaaggaaggtctggtggacggctgggatgatccccgtatgccgactctcgttggtctgcgccgccgcggctacaccccggaatcgatccgcaacttcgttgagaagagcggtgtctcgaagacttcgaacagctggatcgactactcggtgctcgagaacagccttcgtgaggacctggatcagaaagccgcccgccgcatggcggttcttcatccgctgaagcttgtgatcgacaactatcctgagaaccagacggaactcatggaggcgagcaatcatccgaagaaccccgatatgggcgtgcgcagcattcccttctcgcgggaactctggattgaagagagtgacttcagcctggacccgccgaagggctacaagcgtctgacgcttccgaaggatggctcccccgcgaagccggttcgtcttcgcgccgcttatatcattcagccggtttcctgcgaaactgatgaaaacggccgtgtgacggtggttcatgcccagtacttcccggagacgaagagtgggtcgaccggtgccgatacggtgaaggcgaaggccacgatccactgggtcgacgcgaagacggctctccctgctgaaatccgggtgtatggacggctttttgagatggaacatcccgaatcgtctgaagcagattaccggacgctcctgaatccgaactccaaggagatccttaaggggtatgttgaaccggctctcgcagaagcgaagaaggatgaaaagttccagtttgagcgcaacggttactttgttgctgatcgggtggatttcaccggagagcatcctgttttcaatctttctgtgacgcttcgtgattccaagggcaagttctgataactaagactctttgctgaggatcccgttttgccgatagaacccggatggaaaaaaccatccgggttctataactttatgggtatttattcagtttttttaaactttcggatataatctgccgctgatttcttacctattctgggtagcagggggactactgactgcccggaaccaaaattcactggagagaatatgaaaaaagctttgttagctctggctctgactgccgcctttggtgtcgccaacgcggctcagaatgtcaacacggatgtcgtgatcgtcggtgccggcggtgctggtctggctgctgctgttgaagcccacgatcttggcgccaaggtgatcgtcgtcgaaaagatggctttcccgggcggcaacaccacccgcgctgccggcggcctgaacgctgctgccacgcctctgcagcaggctaaggggatttatgacacccccgaaatcatgttcttcgacacgatgaagggcggccactggaagaacaatccggaactcgtccgcgtgctcgctaaccacgccaaggattccgttgactggctgctcgccctcggcggtgacttccatgacgtcggtctgatggccggtgccaccaagccccgtacgcatcgcccgaccggcggcaacctcgttggcccggaagtggttcgcacgctttacacggctgctgaaaaccgcaaggttgacatccgtgtgaacacgaaggccgaagagatcctgaagaacgccaagggtgccgctaccggtatcaaggtgaagggtccggaaggtgaatacgtgatcaacgccaaggctgttgtgatcgcggccggcggtttcggcgcgaacaacgagatggttgctcactacgttccgcgtctgaagggcttctccacgacgaaccagccgggcgctaccggcgacggcatgatcatggctgaaaaggccggtgccaagctgatcgatatgaccgagatccagacccacccgacggtggttccgggcaacggcgaaatgatcactgaagctgtccgcggcaacggcgccattctcgtgaatcacgaaggcaagcgcttctacaacgagctcgagacccgcgacaacgtttctgccgccattctgaagcagaccgacaagaacgcgttcctcttcttcgactctgatatgcagaagtccctgaaggccacgaacaactacatcaagcagagctacaccgtcacgggcaactcccttgatgaaatcgctgccaagatgaaggttccggctgctgccctcaagcagaccatgacggaatacgctgctgctgtggccgccaagaacgacaagcagttcggccgcgctgacctgccccgtccgctcaacaaggctccgttctacgccatcatcgtgaccccggccgtgcaccactgcatgggcggtatcaagatcgacacgaagacccaggtttatggccagaatggtcagattatcccgggcctcttcgcggctggtgaagtgaccggcggcgtgcacggcggcaaccgtctcggcggcaacgctcaggctgatatcgtgaccttcggtcacatcgctggccagcaggcctacatctacacccgtctcaacaagtaatcagacggctgtatccctgaaaaagggctgaaaacagacgcttctccctgaaagggggaagcgtttgttattaattggaattaggggataatgctagagggtaaatctgaccctccataaaggctgacttcgtattattattacgcagtctcggaaaaggaattcagaaaccgattaaaggctgagtttccggaccgaagttttcagaggctaccaacgcctcgacatatcccccattaataggaagaaaacaccatgaagaaactgatcgttctcgccgctgccgctctcctcgccgctggtgccaacgctgcttacaaggacggctcctacacgggtgaaggccagggcaagtctggtcccgttaaggttcaggtgaccgttaaggccggcaagatcgcctccgttaaggttctcgaacagaaagaaaccccgatgatcttcaagggcgctgaagccggcgttatccccgcgatcgtcaaggccaatggcacgaagggtgttgccaccgtttccggcgccacgctgtcctccaagggcatcatcgccgctacgaacgctgctctcgccaaggccaagtaatctgttcttcctttaggaagatagattctctgtcttagagacggtagggcgccctctgggcgcccttattttttgcagattctgctggagttgtccgatttatgatttcccgccgtcattttcttcaggcgacgctgcccctgattgcctcggctgccgcgccggctgcctttgccgctgtgagccaggagagcgagttttccgctcagaaaaccactttctcaatgggcaccatgatttttcttcaggtctacgcgcctacgcaggaaaaggctgatctgtggttagggaaggcggacgatgagatgaaccgcctcgcctcgctgatgaccgttcatgaggctgatagtccgctgctggaggtgatccgtcactccggaaccgatgttgaggttcccccggaagtggctgaggtggttgaggattccattgttgttgcccgggagtccgatggagcgtttgaacccacgattggaaagctggttgatgtctggaagatcggtttcggcggaaagactgtcccgagtgaggcggctatccgtgaagccctgaagtacgttgactggagaaagatccgcgtgacccgccgggatggcaagtgctacatctatattgctcctggtcaggatatcgatatgggcggcatcgcgaagggctatatcggtaccaaaatggctgattttctgtcgggactcggcatgaagcgcggtcttcttaaccttggcggcaatgtggtgctgataggctcagccccggggaaccgcccctggaagatcggtcttcagcatccgctcgaagagcgtaatgggttctttgcggtggtctccgctgagaatgaatccgtgatcacgtcgggtgcctatgagaggaaactgcagacgcatgggaagacgtacgggcacattctgtcccctgtaacgggttaccctgtgacaaccgacctctcgtctgtcacgatcgtcgataaggatggcgcgaaggcggatgcctggtgcacggcgctttttgccatgggcaaaaagaagtctcttgaactcctgtcccgccgtccggatctggaagccattctgatgagcgccgactgtaaggcggtctatatgacgccggggatcgcgaagcgctgcacgattacagagccctccgtgattgagcgtacggttctggttcgcggctgatttatacgggctgcgtgaaaacaaacgcctgagggatggaaaatccttcaggcgttttgtttgtgaagttgcggcgcgggtaatcagggctcgagactgatatcgtcgtcgtaatttccggcatcagccgcagcgggctgtcctgagacaatggcgcgcagccctgaggcattcagaatctggacgtgcttctggttcacctgaatcagtccgtcgtgcgagaagcgggaaagcacgcggctcacggtttccagcttcagaccgaggtaggagccgatctcggcgcgcgtcatgcggagcacgaattcactgcggctgtatccacgggcctcgaatcgctgcgagagattgaggagaaaagccgccagacgttcctcagcgtgcatggagccaagaagcagcatgatgccgtgctgccggacgatctcacgcgacagaatcttgtggaaatgggcccccatcgagcggagagacgttgtgacgtccagcacccggtcatagggcagaacgcacacttcggtgtcctccagggcgatgacatcgcaggagtggacatcgctcgcgatgccgtcgagaccgatcatctcgccagccatatggaaagcgatgacctgttcccgcccgtcgctcgacattaccgtgctcttcaggaagccgaggcggattgcgtaaaggcagtcgaaatggtccgccgcgcggtaaagcgcttctccccgcttgattctcttgcgggtcgtgaccatgtcctcaatgcgttcaatttccttgagcgacagccggagcggtaggcagagttcccgcagattgcagttggaacaagcaactcgaagagtcgacaaagaaatgtttggagttgtcatcagagatgaataccagattaaaaacaaggggcttcagcactgctcagagcctggtcatactcatataagctcggatcagtacaatgcacatattcctgaagaagacctgcgataaatacctacaaaaaagcctggacggtgtcgtttttgtttttgacgctagtcaagcaactggaacatagtggcaataatatcaggatcttctaacctaggtcatgcatttttttggagatacctgcatgagtgatctttctgctagcggcgttgaactgccggaccttgatttactgaaaaaatttgacatcccggctccccgctatacctcatatccgacagctgaccgctttacttcggcgcttaccgccgaggattacgaagaagctctccggaaccgcgagaacgaaaagaataagcgggcgctctccgtctatgttcacattcctttctgtaatgacgtctgctactactgcggctgcaacaagatcgtgacgcgtgatcacgaccgcgccacgggctatctcgatgtcatcgctaaggaagccgatctcgtaaagcagcacctcacgggtgacaccgagattgagcagctgcatttcggcggcggcacgccgaccttcctcacgaatgaagagctggaacgcgtgatgtctatcatccgcacccgcttcccgctgcagaaaggcggggagttctctatcgaagtggatccccgctgctgcccgaaggataaggttgagaagctggctgagcttggcctcaaccgcatgagccttggtgtccaggatctgaatcccgacgtgcagaaggccgtgaaccgtattcagccctacgaactcgttcgtgacaccgtgaacaatgcccgggccgcaggtttccattcggtcaatatggatctcatttacggccttccgaagcagacccgcgagagctttgctgagacgatcgataaggtgatcgaaatgtcgcctgaccgtatcgcgctctaccactacgcgcatctcccgaatcacttcaagccccagcgcatgatccttaacgccgatctgccgtcgactctcaccaaggtcgagatcatgtttgacgcgatccgccgtctcaccgcgaatggctaccgctatatcggcatggaccacttcgcgaaggaaaacgatccgctttcgatcgctcagaagaacggcacgctgcagcggaacttccagggctattcaacccgcgctgactgcgacatggtggcgctcggcgcctcttccatttcgaaggtcggcaggatttatgcctgcaacccgcgcgatatcgaaccgtactatgacgcgatcaacaaaggccgcctcgcgacggtccgcggcttccgcctctctgatgaggatgagctccgttactgggtcatcatgcggatcatgtgccagttcgagctcgtgaagtccgaagtggagcagaagttcggcattgatttcgacaagaccttcgcctgggagctgaagcatctcgcccactatgagaagcatgagctcgtggagcttcatccggaccgcatcgtcgtgtccccgaaggggaagatctttgtgcgggcggtggccatgcagtttgaccgttatctgcgcgagtctgaccgcgcgggcggctactcgacgattgcctgaggaagctcttcttaggagtttctctcaccgctcccacttcaggtaactgcgcatacgggttagaatcagcgaattcattgctgcgcagttttacctgcaaagaaattactctgcgaaggcggaagctgattccgccttttcaatacggaccgttttaatgaaatacatgactgcctcggagataagaaacgcttatctccagttctttcagagcaagggacatacgattgttccctccagccccgtagtgcctgaggatgacccgacgctgctgttcacgaatgctggcatgaaccagttcaagaactgctacctcggtatcgagaagcgcgagtacacccgcgcgacgaccagccagaagtgcatccgcgccggcggcaagcataacgacctcgataacgtcggctataccgcccgtcatcacacgttctttgagatgctgggcaacttcagcttcggcgactatttcaagcaggacgctattccgtgggcctgggaattcctgacgaaggttctcgagctgccggaagaccgcctgtgggtgacggtttacgttgatgacgacgaggcctacgacatctggaacaaggaaatcggcattcccgctgaaagaatcgtccgtatcggcgataacaagggcggcaagtacatgtccgataacttctggatgatgggcgacacgggcccctgcggtccctgctccgagatcttctttgaccgcggtccgtcggttcagggcggacctccggggagcaaggatgaggacggcgaccgttacctggaaatctggaacctcgtgttcacccagttcaaccgtgatgcctccggcaagatgaatcgtctgccgcatccgaacattgatacgggcatgggtctggagcgtatcgcttccgtgatccagaacgttccgacgaattacgacatcgatctgttccgcaatctgatggctgccgctaaggccgctgttgaaaaggccggagctacggacgtggaacccggtacgccttctctcaaggtgattgctgaccacatccgcgcctgctcgttcgctatcgctgacggcgtgctgccgggcaacgaaggccgcgcctatgtgctgcgccgtatctgccgccgcgccatccgccacggctacaagctcggtgcccgcgctccgttcttctacacgctcgttgaaccgctcgcccgcgaaatgggtgatgtgtaccctgagctcaacaagccgaatatcgctcaggtgatcaaggctgaagaagagcgcttcttcctcacgctcgcgaacggcatggagattctcgaagacgccatcgccaagacgacgaacggcgtgctcgacggcaacgtggtgttcaagctccacgacacgttcggcttcccggctgaccttaccgctgacgtctgccgtgaaaagggcatcaaggtggatacggacgctttcgaccgctcgatggaagagcagcgtgcgaaggcccgtgccgctggcaagttcaagattgccgccggcctggtctacaacggcccgacgaacgaattccgcggctatcaggagctccgcactgaaggctgccgcgtcctcgcgatttataaggacggcaccgatgtgacgtcggctgaagccggcgatgatgcggttctcgtgtttgacaagactccctgctacgccgaaatgggcggccaggtgggtgatcagggcgtggctgaaaacgcctccacgatcgctcagattctcgacacgatgacgatcaaggcctccgtgttcggccacagctgccacattcacgagggctcggtgcatatcggcgatatcttctccgtgagcgtgaacgctgaacgccgcgccgccatcgcccgcaatcactccgtgactcacctgatgcataaggcgctgcgcacggtctgcggcgcccacgttgcccagaagggcagcctggtaacgcctgagatcacgcgtttcgacttcacgcacgatcacccggttaccgctgagcagattgcggaagtggaacagctcgttaacgaggaaatcctcgccaacgtcccgacgaagactgaggaaatgtctgtcgaagacgcgaagaagacgggtgccaccatgctgttcggcgagaagtacggcaaggaagtccgcgttgtgtcgatcggctcctcgaaggagctctgcggcggcacgcacgttgcccgtacgggtgacattggttccttcaagatcatttccgaagcgggtatttcggccggcgtccgccgtatcgaagccgtgaccggtatgaacgtgctccacgtcctgcagcagaagaccgctcttgtgagcgaactccagcagaacttccgcggcgtgaaggaatccgagctgcctgagaaggtgagcgcctgcattgagcagatccactcgctcgagaaagaagtcgcctcgctccaggcgaagatcgccgcgagcgcgagctctgacatcgctgaaaacgcccgcgaagtgaatggcgtcaaggtggtggcggtctctgtggacggtgccgatgccaacgcgctccgcgaaatggctgataagctccgcgataagctccacagcgctgttgtggttctcgccacgaaggatggtgccaagctccagctctgcgccggtgtcacgcctgatctcgtgaagaagggactgaaggccggtgaactcgtgaagttcgtcgcggctcaggtcggcggcaagggaggcggaaagcctgacttcgccatggccggcggttccgatgctgaagctctgccgaaggctcttgagtctgtctacggctgggtcggcgaacgcgcctgatcggagaggcaaggaatgagtgaaacggaatcccgtcttcatcccgatcaggagatctcggtcgatggcaagtgccctgagcccgtgctgaaaagcgcccgggctctgagaggcatgcagtcaggagaaattctgaaagtcatctgcctcgacccggtttccgttcatgacctgaaggcgttttctgatcagacagggaacgtgcttctcgctcaggaaacggaagaagaggccggagccgttcactacattcactggctgagaaaacgctgatcagaaggccttttcagctgagatacccggatgctgtttttttgcagcttccgggtgtttttttatccgcgcccggaattctccctgccgcgcctcagatttcgatccgcggattgcgaaggagactgataaataaaaatggggacaggttaaaaaatccgagaattgcgtttcagcctcttctggagccgttttctttgggatttcagccggttctggccggaatgatgagccccatctgttaaaattaaccccaactttttttgcttggcggctgctttcccggtccgccaattttcacaggctggtttatggcgacagacgaaaacgaaggcaaggcgaatccgtcttccggaaacaattccggttccgaaatggtttctcagctccaggaagatattcatcaggtcaatatttctgatgagatggaggaggcctacctcaattactcgatgagcgtgctggtcggacgcgcgctcccggatgcccgggacggtttcaagccggttcaccgccgcgtgctttatgccatgtggcgactcggcaaccgccacgatgttccctataaaaagtcggcccgtgtggtcggcgacgtgatcggtaagtaccacccgcacggtgataccgctgtctatgacacgatcgtccgtatggcgcagcctttctcgctccgctatccgctcgttgacggccatggcaactttggtacgatcgaccgcgatcctgcggctgccatgcgttatacggaagtccgtctgagccgcatcgccgaagagatgctgactgatatcgaccgtgatacggtcgatatgacgccgaacttcgacggtacggaaaaagagccgacggtgctgcctgcccgtttcccgcagctgcttgtgaatggcagccagggtatcgcggtcggtatggcgacgaacatcccgacgcataacctcggtgaaaccattgacgcgtgcctctacgccctgcatcaccctgaggcgagcgtggatgatctgatccgcttcctcccggctcctgatttcccgaccggcggcatcattttcggtctcagcggtgtccgtcaggcgtaccgcaccggccgcggctccatgctgatccgcgccaaagtgcacgacgaaaccgacgacaagggacacacgtctatcgttgtggacgagcttccctacatggtgaacaaggccgagctgatcaagaagatcgcggccctccggagcgaaaagaagatcgacggcattgtggatctccgggacgagtcctcaaaggaaatccgtatcgtgatcgagctccggcgcgacgcgcatacggaagcggtccgcaataacctcttcaagctgaccgagctccagacgacctttggtatcaatatggtggcgctgcttgacggccgcccgcagctgctgaatctgaagcagctcgtgaatgcctttatcggcctgcgccgcgaagtggttgtgcgccggacccgtttcctgcttcgtaaggcccgtgcggacggccatctgcaggaaggtcttgccatcgcgctggcgaacattgatgagttcatcgaaatcatcaagtcgtcctctgaccgcgccgaggcctgtgaccgcctgatgggcaagggctggaacgcgaagatcgtgaacgagatgatcggttccgtggcgggcaactaccgcgactaccggcctcaggatgtggaaccgaacagcggcttccgcgcggatggcctctactggctctcccgcgtgcagactgaacgcattctcgatatgcgtctccagactctcaccgcgacgcagcaggaaagcatcattgccgcctataaggaactctgcgcccagattgccgactacctcgacattctcgcgaaggatgagcgtgtggtgaagatcatcgctgatgaccttctctacatcaaggaaaagtatggcgatgcccgccgctcgcagatcgatccttccggcgatccggattttgatgaactcgatctgattccgagaaaggatgtcgtcgttacgcttagccgcgacggttacatcaagagtcaggacctttctgactaccaggcgcagcatcgcggcggaatgggacgtaattccggcaagctccgggatgaagatgccggcgatcagctgattgtcgcgagcacgcatgatcagatcatgtgcttcacgaatctcggcagactctacctgatcaaccacgcctatatggtgccggccggcagcgcgggctccaaaggacgcccgatccagaatctgatttcgctccagcagtacgagcaggatgatggcaacggcggtaaggaaatggcgctcgaacgtgtgacgaacatcctgtcgattccgaccccggatgacagtcactgcgtcttcttcgccacggcccgtctgccggtgaggaatcagctcctgagactgaaccgcgatgaagtgaagctcgaggaactgcctgaggatgtgcgtgaatcgatccgcacggatgtctgctctgaccgggatgaaatgccgggacttccggatgaaaagtggcgtcagctttcgctcacggatcttccgatctgtgtgcagaccgagctgaaagaactgaccgggtgggacacgcctgagaaggaagaagagcgccgcgcgaagaagaacagcaagacctggagcatgatgaatgttcaggatctttcggaagatattcagagccaggcccgcacgatctgcgacaaggcgctgaatgatctcgcggcaaaacacggcgctgaatgggatgccgtgacgcttggcgatctccctgcaaaggccagaaacgctgcccgcgaggccttccgtctcacgctgctcagtgacttcgcccgcgagcattttgtcttcttcgccaccgcccgcggtgttgtgaagaaggtgccgctcagtgaattctcgaaggtccagaacggcggcacgtcagcgatcactctggatgaaggtgacgtgctgatcggagcggatctgacagatggcgcccacagcgtgatgctcttctcggacgctggcaaggcgcttcgcttcgatgaaaacgaagtgcgtccgatgggccgcacggcccgcggtgtcggcggcatgaagatccgtcctgaagacaggatcatcgcgatgatcgtcgccaatgacgaaggccagatggtgctcaccgcgacagaaaacggttacggcaagcgcactccgatcgccgagtacacgatgcatggccgcaacacgatgggcatgatcgccatcgcgaccacggagcgcaatggcaaggtcgtggcagcctgcctggttgatgagaatgatgaagtcattcttctcacgaagaagggcaagcttgtccgtattccggtctgcgatatccgcatctgctcccgcgcgacgcagggtgtgaagctcgtcaatctgaaggatgatgatctggtgagcgtgaccccggtgaaggatcagggcggggacgatgctgagcctgctcctgagggagatgatggcgaggggtcggaagacggtccggaggatccgtccccggaagagactccgtcgcttgacgatctctgatccggttcaggtataaaagagaaggaagggaatgctcctgcggcattcccttccggcacttcaagcaggaaaaattcagttttaggagtcagagaatgagccgttgctttaatttttcggcaggtccctcggaattgcctctcgaagttctggaacaggtccgggacgaactgctggatttcagaggcactggctgctccatcatggagatcagccaccgcagcaaggcctttactgaggtgcataacgagacccagcagatgcttcgctctctgctcgacattcctgaggagtacgacattctcttcatgcagggcggcggccatatgcagttctccatggtgccgctcaacctgatggctccggtgtcggccgacccgtcccgcagaggcggcggctgctatatcgtgaatgggacctggtcccgcaaggcggcgcatgaggccggacggctcggcggtatttcgatcgcggctgaaggggatgaaaccaacgtgcctcagcagcaggatctccggattccggaggacgcctcctatgtttactactgcgataacgagactgtccacgggattgagttcaactatgttcccgatacgggacgggtgccgcttgttgctgatatgtcgagcaacatcctgacccggccgtttgatatccggaaattcggagccatctggttcggcgctcagaagaatttcggcatcgcgggtctgaccattgcggctgtccgccatgacctgatcggccgggctcccgaaaactgtccggtgatgcttgactggaagagctattcgagcaagaactccatgctgaatacgcctccgactttcgcgatctatatcgcaaacctcgtctgccactggcttgaaaagcagggcggcgtgcctgaaatggcaaaacgggccgctgaaaaatcgggtgcgctctacagtgtgattgatgcttcagacggcttctattcggggaaagtgaagcccgctttccgcagccgcatgaatgtgactttctggcttaaggacgagtcgctgaatgacctctttgttgaggaagccgcggctctcggtcttaagaatatccgcggccaccgcagtatcggcggcatgcgggcctcggtctacaacgccgttccgacagaaggtgcgacgcagcttgcggactttatgaaggattttgagcgtcgccatggataaagaaacccagcttgcagaactccgccgtgagatcgacggaatcgatgcgaagatcgttgaacttgtcgatcagcgcgcggatgtcgtgcgccgggtaggcgagctgaagggagcaaccgggactgctgtattccgtcccgagcgcgagaacctgattcttgagcgcgcggcgtctctcagccggaatttcgacggtcccgcggtcaaggcgattttccgggagataatttcttcctgcagagccttggagcgaacgaccacggtggcgtatctcggccctgcgggaaccttcagtgaaatggcggtgctccggcagttcggctccagcgttgaggccaggccctgctcaaccatcgcggatgtcttccggatgacggagaacagccgtacagacttcggtgtggtgcctgtggagaacagcacgcagggaactgtggcggtgacgctggatctgcttctcgatacatctctcaccattgtgggcgaggtgtcgattccgatcatccataacctcctcacccgaagcggcgatctgtcaaaagtgaagaccgtgatggctcacccccaggctcttgctcagtgccgggagtggctctcgactcatcttcccggcgcgagacaggtgagctgctccagcaacgcggagggggcaaggattgcttccgaggatgactcggtcggtgctatcgcttcgcatcgggctgcggaactttatcagctcggtatcgctggcgaaggaattcaggattgggcggggaaccgcacgcgtttccttgttctcgggcaccatccgacacatcgcagtccggaacccggaaaggataaaacgacctttgaattctccatggtgaataaagccggtgcgcttttcgaagggcttgagcctctggcgcgtcacggtgtgtccatgacgcacctggagagccggcctgcccggaatggcgcctgggaatacaatttttttgttgatgtcgaaggtcacatcgaagatgaagcggtgaagaaagctcttaccgaaatcaaagcggaaacggccgtcttcaaatttctcggctcctaccccaaggcgctcgattaagcccgcggcagcttctcagtcaaaataaaaaatattgggagtaacagcatgtcagataacctttcagctccgtcctatatccgcggaattgagccgtacaaggctggaaagccgatcagtgaactcgcccgtgaaaagggactgcagcctgagaatattctcaagctcgccagcaatgagaatcccctcggggcgccggaatccgcgctgcaggcagtccgggaagccgcgaccgcacataacgtggctctctaccccgatggaaacgcctataacctgaagcacgctattgccaagcggctgggtgttccggctgaatggatcattgtgggcaacggcagtgatgagctgatggggctcacctgtgaggcgcttctcgaaccgggcgccaagtcggtttattcccagttctatttctcggtttaccgcattgatacgctcgcctgcggcggcacgccggttgaagttcccgcgaagggttttgcgatcgatctggacgccattgcgaaggctgtgacacccgaagtccgcgtggtgtttctcacgactccgaataatcccaccggcctcacgatttcccaggctgattttgaggcgttcctcggaaagattcccccgagcgtgacggtggtgcttgatgaggcctatcgcgagtttgtgccggaggaagaccggattgattccatcgcgctcgtgaagaagtatccgaatctctttgtgacgcgcactttctccaaggcctatggtctggcgggtctccgcgtcgggttcggtgtgaattccagcgaacttcctgaactcgtgaaccgtatccgtccgccttttaactgcaacaccctcgctcaggcggcggctgccggctgtgtgaacgatcaggcattccttgaccgtgtttatgagatgaaccgcagcggcgtgaagcagctggaagacggattctcgtctcttaacctcgaatttgtgccgacgaagagcaactttgttctcgttcacatcggaccgaaggcggctgaactcaatcaggcgcttcttgaccgcggcattatcatccgcccctgcgcgagcttcgggctcccggagtggatccgtgtctccgtcggtacggccgatcagaatgaacggttccttgccgccctgaaggagcttctcgcgaagctctccgccgcataaggagccggggttgaagcttgccgtaatcggaatggggttgatggggggatcggccgcgctcgccatgaagcgggccggcacgatccactcggtgtacgcctgcgacatgagcccggaggctgtttcggactcgatcagcatgggtatcgcggatgaagggggatcggatcccgccgaggccgcgcgctctgctgatgtcattatggtcgcgacaccggtgatgacgatggagtcgattttccggcagatcgctccggtgatgaaaccggacgctgttgtgacggatatcggttcagtccggggtatggtccaggaaggcgcccgccgggcgcttggggcaaagttttcgcagtatgccccctgtcatccaatcgccgggggcgaaaagcccggtgtccggtatgcctttgccgacatgtttgtcgggaaaaaagtcatcagtaccgcggaagagggcatgagcgcccgcgcggtcgagatcatcgagtcgctctggaagtcctgcggtgcgcagattatccgcatgtcgcccgagcgtcatgatgaagtgtttgccctgatgagccatctgcctcacgtgctcgcctacgcgctcgtcgcgatgatcacggagagccgggatcccgatacgctgctctccatgggcggcacaggattcctcgacttcagccgtatcgcggcttcgagccccgttatgtggcgtgatatctgcctcgcgaaccggaaagcgatttccgaaggactgcggcggtaccgtgccgagctcgaactcttccagaaagcgattgatgatggaaacgccgatcagctggtggccggttttgcccgcgccgcgcaggcaagacggaaacttggccagggtgacagccttaagactcaggtgaagaagccatgaagacttttccagaagtgctgaccgtgcgcccgattctcagcgccgcgggtgaagtcccgatgccgggttcaaaatcgatttcgaaccgcgcgctgctgctcgcggcgctttcctctggacggactgaacttaagggaattctgagagctgacgatacggagcgcatgatggaatcgctccggaaactcggtgtttcagtggaaattgatgaaggtaatcccgagtcggtgacggtagagggctgcggcggcaggtttccggtccgcagcgcggagcttttcctcggaaacgccggaacagcggcacggccgcttactgcggcgctggcgcttgccggcggcagttaccttctggatggcgttgagcggatgcgggagcgtccgatcggagaccttctcgtggcgctccggtcgctaggggctgagattgagtgtctgaaccgggaaggatactttccgctccggatcggtgaacgccgttccgtttccggaaaagcctcctgccacatcagcggcgaagtgtcgagtcagttcatcaccgcacttctcctttcctcgccggtttactccggtcctgagggacttgagatcattgtggatggacatctgatttctcgcccttacgtgctcatgacgctgaagctgatggagcagtttggggttcacgcggaagatcagggtgaccggttctttgttccgcacgcagagtatcgccgcggcaatccttacctggttgagggagacgcgtccggggcgtcgtactttctcgcgctcggagcgctttccggtccggctgacggtcccggagtccgtgtcaccggagtggggcgcgattccattcagggagatgtgcagttcgcggcattcctcgagcgcatgggagcgagaattgcctggggggaaaactggatcgaagcgagaccgcccgtatccggaaaacttcacggcattcacgcggattgcacggagattccggatgccgcgatgacgcttgccgcgatcgggctgatggctgaaggggaaacggtgcttaccggtatcggctcctggcgcgtcaaagaaacagaccggattgcggccatgcaggctgagctttccaaattcggcgccgatgtgaaaaccggcgatgattggttaagcgtaacatctcctcaaaagcttcttccagcagaggtcagtacctataaggaccaccgtatggcgatgagcctttcgctcgctgcctgcggcggggtttctgtacgcattcttgatcccgggtgcgtttccaagactttcccggactattttgagcggctggcaggactggtgaaaacagcccctctgacggataaagactaggcgcattcattctttaattgacgaggttttctgatgacagaaatgaagggacaggttcctgtaattacgattgacggcccgaccgcgagcggcaagggcacggtcgcgtcgaaagtagcggaggctctcgggttccactacctcgattccggcgcgctttatcgcatcgtgggacttgtctgtctgagggccaacgttgatctgaaggacatcgcggccgtcacggcacacgcgatgggtatctctcccgtgtttgcgggagggaggatttctcttggcagcgaagacatcaccaatgtcatccgcacggaagatgtcggccaggcagcttcctgcatcgctgttatcccctcggtccgcaacgctctttttgagctgcagcgcgaagcgcgccgcgagccgggcctcgtggcagacggccgcgacatgggctcgatcatcttcccggatgccgaactgaagattttccttacggcctccgcggaagcgcgtgcacatcgccgctataaacagttgatcgaaaaagggattgacgttacactagatgacctcgtcaaagaaatgaaggaacgggatcttcgcgatatgcgccgtgcccatgctccgcttgcgcccgctgaaggcgcgaagatactggattcttcattcctcacgattcaggaaacagttgataagatactgtactggtgggtttcacgttctcactgatcccatccgcagatctttgattccatttgcagtaccggtcgcagaggccgtcaggtgacggtcccctgcttttatttgtttaactccaccctgtgcactttgcatctgggtgtgctgattttttttcatgtccaacactgaagaaaccaaaaacaccgaatcttttgccgacctgtttaaccagagccttgctgctcaggaaatgcgtcctggcgaagttatttccgccgaagtcgttcgcatggacggaaactttgtcgtcgtgaacgccggccttaagtctgaagcttacattccgattgaagagttcaaggatgatcagggtgaagtcacggtcaagcccggtgatttcgtctctgtggccatcgagtccgttgaaaacggctatggcgatacgattctgtcccgcgacaaggccaagcgcctcgctgcctggatgaatcttgagaaggctcaggaatccggtgaactggttaccggtacgatcacgggcaaggtcaagggcggtctcaccgttatgaccaacggcattcgcgcgttcctcccgggctccctcgtggatacccgtccggttcgcgatacgaccccgtacgaaggcaagaccctcgaattcaaggttatcaagctcgatcgcaagcgtaacaacgtggtggtttcccgccgcgctgtgctcgaagccaacatgggcgaagagcgcaacaagctgctcgccacgctgaaggaaggcgccattgttaagggcgtcgtcaagaacatcaccgactacggtgcgttcgttgacctcggcggcatcgacggcctgctccacatcaccgacctcgcctggcgccgcgtgcaccacccgagcgaagtcgttcaggttggtcaggaaatcgagaccaaggttctcaagttcgaccgcgaacgcgcccgcgtttctctcggcctgaagcagcttggtgaggatccgtggatcggcatcagccgccgctatccgtccggcacccgcctcttcggcaaggtttccaacatcaccgactacggtgcgtttgttgaaatcgaagacggcatcgaaggcctcgttcacgtgtccgaaatggactggacgaacaagaacgttgatccgcgcaaggttgtgacgctcggcgaagaagtcgaagtcatggtcctcgagatcgacgaagaccgtcgccgtatcagcctcggcatgaagcagtgcaaggccaatccgtgggaagagttcgctcagacccacaagaagggcgatcacgtcaagggtcagatcaagtcgatcaccgacttcggcgtgttcatcggtcttgacggcggcattgatggcctcgttcacctctccgacctctcctggaaggaacccggcgaacaggctgttcacaactacaagaagggtgatgaagtcgaggctgtcgttctcgcgatcgataccgaacgcgaacgcatctctctcggcatcaagcagctttccggtgacccgttctccgacttcgccggtgcccacgagaagggctccatcgttgaaggtacggtcaagtctgtcgacgcccgcggcgccgtccttgatctcggcaacgacactgaggcttatctccgcgcttccgaaatctctccggatcgcgttgaagatgccacgacccagctgaaggttggcgacaaggtttctgccgtcatcaccagcgtggatcgcaagacccgcaacatccaggtttccgtgaagcagaaggaagccgctgaggcccgccgcgctatggatcgcatgaacaatgacgctccgtccgccggtacgaccaatctcggcgccctgctgaaggcgaagctcgagagccgctaatcaatagcggagggatccgcggtttccgctgcggattccattcagggctttatccctgataaacgcttcacccgctgccctcgtttcctctgaggcacggagaagcaaaaaatggagagagaaggtttcgctgccttctctttccgacttaaggatcaccggcggaatttctgcccgtggtccttttcttttctgtgtggtacagaagcgctgaaccgctacaattctgaccactcaatactcgcggagagcacttcatggaatttgaactttggtatctgatcgcggtcccgctgctgtttgcggccggatggtatctgcgaggctatgacgcgagacagcggaatgaggaaaacaaggacctgccggacaattatttccggggcctgtcgctgctcctctctaatgaacccgataaggcaattgacgcctttatcgaagtggtgaagatcgatccggagacgatcgaactgcatcacgcgctcggcaaccttttctgcaaaagaggcgaatttgaccgggcgatccgaattcatacgcatctcatcaaccgcgcggatctgccggatcaggatcggctgcgggcgctttcagagcttgcgaacgactatctgaaggccggtatctatgacaaggcgattgattgccttgagcggctttcaaagaatgatgagtatcggctggacgcgctgcggtcgcttctcagaatccgctgcaccgagcatgactgggaggccgctattgaatccgcgcggcggcttgaaaaggaagcctcagaagaccacagcgccgatatcgctcacttccactgcgagcttgccgagctggcagtgaaacagaagaatccggaagccgcggaacgcgaggtgtcgctcgcactgctggagaaaccttactctccgcgcgctctgatgctggctggtgactttgcgttccagaagaatcaggtgaaggaagccgtggaagactgggagaagctgcgccagcattccgaggatcacttcccgctcgttttcagccggctggtgaaggggtacgacgcgctgggtgacgcggcaggcgctcaggccgtgatcgactacgcacttaaccgattccccacctctgaagtcgtggagcaggcgatgaagcgggctttcaaggataagggacagcaggctgccgctgaaattgtgagcaaggggctttccggccatccgactctcggcactctttccgtcgcgatggaattccgcaaaatgatcgccccggatgacgaacagctgcagggactctctgaaatgctgaagaaggaatccgatcgccagggccgctatcagtgccgtcactgcggattcctctcgcacagctacctctggcagtgtccgggctgcggcggatgggatacgtatccgacacttcgggtgcaggatcaatcactcaggcgggataagtaaagtcgtactatttcttacactttatttacccgggatacgatcagttctgacagttcccataaaattaattcattcagacctgacagtctgagcccattcttaggtcttaaagtaaaaaggtaagtaatgttaaagcgtatcggtcttctgattttgaccaacattgcaatcgtggtcatgctcaacgtgatcctgagcattgttggcgtcgtgtttggaatcaactggggcggtatggcgggcaagtccattaacctgacatccctcagcatctacgctctgatcattggctttacgggatccatcttctcgctgctgacctcgaagatgatcgcaaagtcgacgatggggctgcagatgattgatatcgacaatccgtcgaccaatctcgaagcctggctcgtcagcacggtccgcaaactcgctaaccgcgcgaagctcccgatgcctgaagtggcgatctacgagggtgacccgaacgcgtttgccacgggtccgtcccgcagcagctcgctggtcgctgtttccaccggtcttcttcagctgatgaacaagaaggaagtggaagccgttctggggcacgaaatgactcacgtcgccaatggcgatatggtcacgatgaccctggtgcagggtgtgatgaataccttcgttgtgttcctctcccgagtgattggctgggccgttgaccgccaggtgatgcgtaacgacagcgacgctccgggtgccgcctactatgtgacgagcctgattcttgatatcgtgctcgggttccttgccggtatggtggtggctgctttctcgcgctggcgcgagtatcacgctgacgcgggttccgcgatgctgaccggttctcccgagaacatgattgccgcgctccagagactgggctccatcacgccggaagaacttcccggtccggtgaagggcttcggcgtgagcggcggtattggttcgctcttcgccacccatccttctattgaagaccgcattgcggcgctccgggctctgcagaagtaatcggctccgacgtgcggtaggaatcatgaggcgtccctgaggggcgcttccctgatggaataaaaaaacctcgtcctgacaggacgaggttttttgctggccggaagaattttccggaatcaggccttctgagccgcgagcttcacagaccgcgcgtgatagagcgcgaaggagacaagcgtgatgcctgaaaggatcaggccgcaggcgcaggcaatccagaatccgaggggaccgagcggcgcgccgaggaaggattcccggaaagcgaggttgtagcctccgaaaagccccacgccccagagtgcgacgccggaaacgatcatcggaacccaggcaatcttgtagccccggaggatgaagctgctcactgactgcgcggcgtcaaacgtgtgataaatcacgccgcagagaatcagtgtgccggcgatctgcatcacagcgatatcagtcgtatagatgctgatgatgaagtggctgaagataaagagcaggcagcaggctgtggccgagatggcaacagtcacagcgagagaccggcgcgtaatccgctcagcggcatccgggaaaccggcgccgaggcactgagagacaagaacgctcgctgcgataccgatggagagcggcaccatgtagagggtcgacgtaatgttgctcacgatttgatgagcggacaccgcgacagcccccatgcgggaaataaagatcgccatcagcgtgaaggaactcacttcgaagaacacagagagcccgatcgggagaccgatccgaagctgttccttcagcgcgtcgaagctcggtccgaaccagcgctttgcgtgcatcggcttatagtgagcgcccttgaagaagtatccggcatagaaaataaggccgaaccaggcgagaactgcattgccgacaccggcaccggcgcctccgagctccggcagaccgaagagcccgtacatgaagagagcgttcacaggagctttcagcgcaagcatcagaagcgaaatccacatcgtgatccgcggctgattgatggcagcgttgactgagatgaagacccggttgagaagcgccgcaggaacggctaccgctgacgcgatcaggtagagcgaggcaagcgacgcgatacgccccgtgacaccgccaagctccgtccagaaggacgtccagctgaggatcccaataccgaaaatcgagagcagcagcacaaggtagagcgactgattgatttcaaaaccgatctgctcaaacttccgggcgccgaagtgatgcccgcagatcggggagagcccctgcacgatgccgacgagcagcatgaaaatgcagcccgtggaagcgctggctagcgctacagccgcgaggtcctcagcgccgagccggcctgccatgatggtgtcgatcgttgcgttgcccatgacggcaaggttcgccacgaaaataggactggcgagcttcgcaaggcctccgaccgaaatatctgggggggtgaggcgatgcgccgcattgatgtttcctgccatgttacttctcagatttcctgttgttattgctgttgagttcagtgccgctgttgatgggagaggcgtcgcccgggcggatcacatagaactcagaaccgcggtggtatgacgtcgggatgccgatcttgtcagccggaatcggttcaccgggaccgatgcgggagacggtgtagcggcagtccgtgctgtcggagaaccgaatgccggagtacgcgacaagccctttgagactgagcggcagtccgtcactgcggacgcagtcgccgggaaggtagccaaagattcggagctttccggcgacctcacgggctgccgtggtatgagaccggtcttcatccagcatctggctgaagagcgcggtgccgactgtccagatcagcgtgatgccgagagcggcaagccagggaccgcgccagagagccttcggacggcggcggaggcgccagatcacgatggcgaaccagatcgcggtgacgagcgccgtgcagacgagaagcgacggctcaacccagggcaccgtgttgggagcgagcctgtgaaggctggcggccatcttcggcgggaacccggttgtccaggcgatgaagtagctccagagaccgatcgtcgcaagagagaagatcgtggcggagaaccagtcaaggatattcttcagggaatgtgtcttgagacttgcaatgccgaaggaggcgagaatcgcggtcggcaccaccatagcagtgagcgtgtactcaggcgcggttccggaaataaagaggaagagcagcgggaagacgagcgcgatgatggaaagaagaatatgcgtgcggtgaatcacgcggtgccaggcataaatcgcgtaaagcgcgaaaggccagatcgggcagaggtaccagacgatattgcgggccatccagagccaggatccggcgcgcgggagcgcgaagccggcagcctgaatccgggcgaatgactgataccatgcgtcaaacgaagcgcccgacagaatcgccccgacaggccacacgaggaacgtggcagcggcagtggcggcaatgatcagcagacggcgggttctgaacggcgcaaatgcgtgaacgcagcagaggatcgtgagaatcgtgcaggactcaacaatgaaccaatagaggttcgtgcagagggcaagagcgccgagagaaaggccggtcacgaaagaaccggccttaaggtggacgagtgaccagataacgccgagcagcgtcgcgccggtcagcgcaagcagcacgatcggaagaccgatttcgtgaagccgggaaacaatgccaaaggtagcgatgaagaggagtgttgcggaatcagcgaccgtacggccgtaatcccggggactcgcttcctgaccgaataccatcgagatcgggagagcctcttcccgccgggcgagatgccatgtagcgtaccagacggaccccgtcgcgagagcgaaccagagcaggctcgggactcgcgcgagaatcatcggtttggcaaaaagcgagaggaacttgataagcgccgcgccgagccaggcaatgcccggaccggtggccgtgtaaggagtgccggcaatggtgggaaggaaccaggcgcttgcgcttcctgtcgccatgttccacatcaggccgaaaatctgttcgtcccggctgttccagaacgcgtgtcctgagaagcatgccagagcgaaggtagcaagaactatcagcaatgcccagcgggggagcttggccgcagcggctgcagaaacaataagaggcgactgtcggttgctaatcatttggcattttctaaacaaattaaaaggggcagttgaaaactgccccttggaataccaggctaactgcgcggcaccaattacttggcggcctttgccttggcggcggcttcgttcacagccttggtcttggcggcgaacttcgcgcggaacttctcgacacggcccgcttcaacgatgcgcgtctgagcgccggtgtagaaggggtggctggcagaagaggtatcgaccttgaaaaggggataggtcttgccgtcgatatcaatggtttccttggtctgaacggccgaggagatgataaaggtctgattgacggaaatgtcgaggaacgcgacctcgcggtactccgggtgaatgccctgcttcattttttatgaattcctagttaaacgtcggtcgccctgacttgccttgcaaacccgcccgtgcgaaacgggtcttacggcaggcatgcagtccacgtgccagactgggaaagtctaacattatgaacgccttccccagaaaaagcaaccgtcagagcgaaccgatgagaatagatcagttggcccgcttcatcatgtcgaagaattcggcattgttcttcgttgcgcggatcttgtcgaggaggaactccatcgcttccacttcatccatgctgtaaagaaccttgcgcagaatccacacgcgctgcagcacatcgggcgggagcagaagttcttcgcggcgggtgccggagcggttgacgttgatggccgggtagacacgcttctcggcaagacggcgttccaggtgaatttccatgttgccggtgcccttgaactcttcatagatcacgtcatccatgcgggagccggtgtcaacgagggtagtcgcgagaatcgtgagcgagccgccctcttcaatatttcgggctgcgccgaagaaacgcttcggacgctgcagggcgttcgcgtcaacgccgcctgtgagcaccttgccggaggtcggcacaacggtgttataggcgcgggcgagtcgggtgatggagtcaagcagaatcaccacatccttcttcgattcggcgaggcgcttggccttttcaatcaccatctcggccacctggacgtggcgggcagcgggttcatcaaacgtggaggcgaccacttcgcccttcacggagcgctgcatttccgtcacttcttccggacgttcgtcaatcagcagaacgatcagaatgcattcggggtggttcgccgtgatggcgtgcgcgatgtgctgcatcagcactgtctttccggacttcggcggggcgacgatcagaccgcgctggcccttgccgatcggagcaatgatgtcgatcagacggcccgtcaggttctcgttgcccttcatgtcgcgttcgagcttcaggggctcgttcgggaagagcggcgtcaggttctcgaacagcatccggtgcttcaggttttccggcggctggccgttcaccgtttccaccttgacgagcgcgaaatagcgttcgctgtccttcggaatgcggacttcaccttccatggagtcgccggtatggagattgaatcggcggatctgggagggagagatatagatgtcatccgtgctggcgagataggacgattcaggagaacgaaggaatccgaatccatcggggagcacctcaagcgtgccgtcgccaaaaatttgctcaccgctctttgcttttctcttcagaatcgcaaacatgagttcctgcttgcgcattctctgggcgttttcgatgcccagttcctgtgctttttcaaaaagctcagtgatacgcagtgatttcagttcagaaagatgcataggagtaaagggaaatggcggacagacgagaagggcccgaacgggcaccggtcgtgcggaaagcagttccggttcgccgcgctttccctgaaacgaagttagaagttaaagaagggactggatccagtcggtcagctcattcttattcatcgcgccgacctgagtcgcggcgggttttccgtccttatagaccacaacggtcgggatcgaacggatccccaggccggcagccacggacgtggattcatcacagttgtacttgcagaccttcagcttgccgctgaattcttccgcggcggcttcgatgagcggagaaagcagacggcagggaccgcaccagggagcccagaaatcaacgagaacgggaagcgtggaggaagcctgcacgacttcggcgtcgaagttttgatcagtaacgttggtaaaagccatagtcgcacccataggaaaataaaccgagcgtgctcagtttccaggaggatctgtgaatttggaatgtgctgctggaggatcggcctggaaacggccgatagttggaaatcaaaaatgcttattccgattttctggctcatcgtatcactttggagaaaaaaaaggaaagctcagagccagtctggattctccggggaattcgtgtacaatgcgtcctcggcgggtcccctcgcatgaggaagccatgaatctggtcaggtcgggaacgaagcagccacagtggattttcttcagtgccgaggataaggctcgccacttttgtatctgtactatccgtctcgggcagaacattcgtttccgccgccggatatccgtttcagtacagttccccagcctgtccccccaagcgatcgccccggcggtcaaattctgctagagtcaacgatcattcagatatggttcggctgagacgccggaagactgtccggagatccgactgaaactcccggggcagaaatgtctgcgctcccggccgcactcctgcgaacatccggctgccggatccgcgtctcttcccaataggaaatgactaatgtcctatcaggttcttgctcgaaaatggcgacctcacgactttgacagcgtggtgggccaggagcacgtcgtcaaagccctgagacatgcgctgcgtgaaaagaggattcatcacgcttaccttttcaccggaacccgcggtgttggcaagaccacgctctcccgcatccttgcgaaatgcctcaactgcacaggccctgacggcaagggtgatatcaccgataagccatgcggcgtctgtgaagcctgccgcgcaatagatgaaggccatttcgtcgattacatcgaaatggacgcggcgagcaaccgaggcgtggatgagatgacggcactgcttgagcaggccatgtacccgccgacgaacgcccgcttcaaggtctacatgatcgacgaagtgcatcagctttccagcacggccttcaatgccatgctgaagacgctggaggagccgcccgagtacgtcaaattcattcttgcgacgacagatccgcagaaggtgccgatcacggtgctgtcgcgctgcctgcagttcaatctccgcaatatgacgccgcaggaagtggctgatcacatggcgcatatcctgcaggtggagaagatcgaagccgaacccgctgcgctgcggctcctcgccgccggcgcccggggatccatgcgcgacggtctgtcgcttcttgatcaggcgatcgcgttctcggatggcgcggtgacactggctggtgttcagtcaatgctcggcgttgtcgattcctcaatcctcgtgaaactgctgcgctgcctgcgtgataacgacgcggccggcatgctttccatcgcggatgagatggcgatgcgcagcttctccttccgtcaggcgctccgcgatatcgcgagcctccttcacaggacggctattgcccagcgggtgccggcaagcatttccggcgacgctgaggcggattccatccgggagcttgccggggcttttacgcctgacgaagtgcagctctactaccagattgcgatcaacggacggaatgaccttcatctggcgcctgatgaatatgcgggtttcacgatgacgcttctccggatgctcgccttcaagccggccggaagcccggtggcggcccgcatcgcgaagctgcctcatggcgggaagccgcttgagcctccggcgccggtctccaaggcggagtccgcggccgctgcgcccgcgaaggcggaatccccggctccggcgcccgcacctgctccggcacccaaaccaaaattgaagcctaaggcgcctccaccgcctccggaagaagcaaaagcctcacccgatgaagaggaggatcttccgccctgggtgcagcttgagccagccgaggaaaccatccctcctgaagagcgttccgccgattcagaggagctcgactggcagagtctgatccgcagcgcggaactttcagggctggagtggcagtctgcttcccggtccgaatgcgttgaattgaagagtaccggggtggtgctgaagaacagttcatccacgctgacgtccgataacgtgagaaagagccttgaacgggcgctttcgaagcgtcttggacatcccttctcggtgaccttccagaccggtgaggtgaagggggataccgtctgggctcaggtgaaccgggaagaggccgcggcaaggcagaaattgattcaggatttccgcagctccggcgtcgtgagcaatatcattaaccagtttaagggcgaggtgcgcgaggattccgtggactggaatacgaagccgaagcccctgcactaagtaagaggaaaacatgagaggaaacattaattcgctgatggcccaggccgccaagatgcagcagaaccttcagcgccttcagtctgagctcgccaatgtcgaagtgacgggagaagcgggcagcggtgccgtcaaggtcacgatgacctgcaagtacgtctgcaagcagattcagatcgatccgtcgctttatgacgaagaccgcgacatgatcgaggatctcgtgacggccgctgtgaacgccgcactgaaggaagttgagcgtacgacccaggaacgcatgaaggtcgccacggccggcatgcctcttcctcccgggatgcgcttctgatgatcgcgccacggaatccggagaacggctatggcgcttagtcccaagctgagaagactcgcggaggcgctcgccgaactgccgggcatcggcccgctttcggctcagcggatcgcgtttcatctcctttcggatgacgagcacgctgaagcgcaccgtctggcgaaggagcttgaggatgccgcggcgtccgtcaggcactgcgcccgatgcaatacgctctgcgagtccgagatctgcgacacctgttcggacgaaacccgcgagaaagataagctctgcatcgtggaaacgccggcagatcagctcgtgattgagggatcgcactcctaccggggactctattacgtactcggcggacggctttcaccggtggagaaccggggccctgagcagctgggcttcagccgtctgatcgaaagaatcaaggagccggaggtaaaggaagtgattctggcgacttctttcaccgccgagggcgacgctacagcccactacattgcgctcgcagtgtcccgccatcgcccggatatacggctgacaagactcgcccggggcatcccgaccgggattgagctcgagtacaccgatgtggcaaccgtggctcacgcaatcctgggacggcgtgacgcggagtcgcggtaaaagagcgattttcttgctttttcccctattcgggaataatgtagttcttacgacttttattcagaggcacctcaagtgcatttcacggctgacaatccgaacgcctgccagggactttccaagaaagcccccgttcgtgctgcccgtgaattccttcttgccctaggcggactactgctacccgttatccgccatgggaggattgtttagggctgaatagagccgttttttaaacatatttgtcgccataggcggatacacggattcatctgagtctgttgtgtatccgctttttttattgcctgaatcgtctggagagtactgaaaatgactatcacccgtcgtgcattcatcactgctgctgccggcatggccgccgcttccgccttcccgtttggcgaagctttcgccgcggctcctgagaagaagaacatcaagatcgcggtcggcggtcagcagctcgtttactacctcccgctcacgatcgctgaccgtctcggttacttccgcgatgagggtctgaatgtcagcgtgattgacttccagggcggctccaagtcgcttcaggcggttgtcggtggatcagccgatatctgctcgggtgcgttcgagcacacagtcatcatgcagacccgcggccagcgcatgcaggctttcgtgctccagggccgggctccgcagtgtgtcttcgcggcgaatctccacacgatgaagaatttccgaagcgccaaggaactgaagggaaaacgtatcggtgtgacggccccggggtcttcctcccagatcatggcgaactattgcctgaaggctgccggcatcaagccgaacgaggtgtcaatcattggtattggctcttcctctggcgccattgccgcgatccgttcgggtcaggtcgatgccttcgtgcagctggatccggtgatttcgatgctgatggagaagaaggaaatcgcgatcattgttgatacccgaaaagtggcggagagcgaccggctttacggcggacctatggtggccggctgcctctacgctccggaatcctttatccgcaagaatccgaacacgatccaggcgatcacgaacgccatggtgcgcgccgacaagtggatcgccaaggcgacaccggaacaggtcgtgaaggtcgtgccttccagctacttcatgggagataaaaaactctatatccagtccttcctcagcaaccgtccggcgctttcccgcgacgggctgatccccgcgaaggctcctgaagtcgcgaagcacgccctgagcacggtgaatcctcagatcgagcgcgcgaggcttgatctggaggcgacctatacaaaccggttcgcagcggaagcgaataagcgctatcgctgatccccgcatagggattccgggcagtctctctcggcagcccggaatccttccaccgaattcacgcacagaaacccaggctataagaaatgaatacacctgaaaccaatacgcccgcgatagaaatctcggatctcgcctgcacctttatttccggcgacggaaagaaggagtcgcactacaccgcggtccgggatgtcaatctctccatccgagccggtgaatttgtgagcatcgtgggtcccacgggatgcggaaaatccacgattctcaacatgacggcgggacttcttaagccgtctcacggcacgatccgcattttcggcgagccgctttccgggctgaaccgcagggccgggtatatgttccaggcggagaatctgatgccgtggcgaagcgcgctcggcaacgtcatcgccgggcttgaattcaaaggcgtgaagaagagcgaggcaattgagaagggccgtcactggcttcgccgtgtggggctcgccggatttgaggacagctacccgcatcatctttcaggcggcatgagaaagcgtgtctcgatggctcagacactcatcatggatcccgacatcattctgatggatgaaagcttttccgcgctggatatccagacacggcagctgatggaaaatctgctgctcgacctctggtcgggcgaaaagaaagcggtgctctttattacgcatgaccttgacgaggccatctccatgagtgaccgggtgatcgtgatgtcagccggtcccgcttcacacccgatcggcgaattcctgattgaccttccccgtccccgggacgtcaccgaggtgagaggagatccgagatttgtctcgctccaccggtcgatctggaatgtgcttcgcgaagaagtgctgaagggctacgaaaatcagatgcagaggaagtaagtcatgtttaagagcaaatggatccttcacttctggcaggcggtgcttctcgccgttattttcgttgcctggtgggcactcactaagcctgggctcattcctccctttatttttgagaatgacacccaggcggccttcttcttcggtgagccggtggaaatcttccaccgcatctgggactggttctttgtgaaccatgaaatctatgagcacctcgccgtgacgctctgggaaacggtgctcgcgttcgcgatcggtacggtttccggtcttatcgtgggtctttggcttggcctcagccctcgggcggcggcaatcgcggacccgttcatcaaggggcttaactcctgcccgcgcgtgattctcgccccgatctttgccgtgtggttcggacttggaccggcatccaaagtggccctcggtgtcacgattgtgtttttcatcgtgttcttcaatgtgttccagggcatccgtgaggtgaatccgaatgtcctgaattctgtccggatgctgggcgcgaaccgccgtcagcttctcaccgcggtgtacctgccatccgccatgagctgggtgttctcgtcactgcactcttcggttggcatggcgttcgtcggcgcagtgatcggcgaatatctcggttcggcgaaaggtgttggctacctgattctccaggcagaaggcgtcttcgatatcaatacggtgatggccggcattctggtgcttacgcttttcgcggtgattcttgactggttcgtgagccttgcggaagcgcgtctcatgcgctggcagccgaagactgcgagtgtcagaaccgagcagagcctctgatagaaaaatctttccgaagcggcagctctcccaaggggccccttccggtgtagccgggcggggccccgctataattgggcgaactgtataggaaggagttttagatgccgatgaatgcgcttgacgtgattcgttttgaccttcaggaagctgcggaaggtcttaaccggctgatcgggtctccggaagtcctggaaaatatcagccgcgcggctgatctgattgtggaggcccagaaagcgggcggcaaggtgctcagctgcggaaacggcggcagcctctgcgatgccatgcattttgccgaagagatgacggggcggttcagaaatgaccgcccgccgtatgcggcaatcgccatttcggatccttcccacatggcctgtgtcggaaatgattatgggtatgaggcggtgttctcccgctatgtcgaaggtgtggcaaagaagggggatgtgcttctcgcaatcagcacgagcggcacgagccggaatattctggcagcggtccgcgcggcgaaggcgcagggcgtgaaagtgatcggtctcaccgggcgccatgactctccgctcgaggaacttgcggacgtcgcggttgtgacccctgccgggcgctatgcggaccgcgttcaggaacttcacatcaaggtgattcatattctgattgaactcaccgagcggcagctcaatccggaaaattatccggatccggagtaacgccgggttctcttgtaaaaaagcttgtaagcttttgcaattgcagttcaaaccgtgcagaattactaatacacatactctctccgggagaggcttcagccgttgcggctcgaatcatcccggaaggccagcagaaaaaaggcggagcggcacagccagccccgctctcctggtctgaatgcgccgggcacagttccggcgcttaacttttcacttgaccgctatttctctgcaggatggaaatcctgcggaggggcggctttttatgttttcaggattgatatcatggaccgtatccctattaccgccgccggcgcccagaagctgaagcaggaactggatcatctgcgcaaggtcgaccgcccggaagtggtggcggctattgaggaagcccgttccaagggagacctttcagagaatgctgagtacgatgctgcccgcgagaagcagagcttcatcgaaggccgtatcgccgtgctcgaaagccgcattcccgcgcttcaggtgatcgacccgaagacgctgaacgctggttccaagattgttttcggcgccactgtgacgcttgctgacgaagactccgacaaggaagtcacctatcagatcgtgggcgttgacgaagccgacatcgaacacaataaggtttccgtttccagcccgatcgcgcgtgcgctgatcggcaaatccgaaggggacgaagtgaccgtgcacgccccgaagggcgacctcacctacgaggtcgtcgcggtggaatacatctaagccacggctgaatttaggaaaatatgactgaactgaaaattgaccgtcagcagctgctgaagctgcgctctgagagccacgcgctgaatccgatggttctgctggggcagaacggccttacggacgcggtgctgaaggaaatcggcaaggcgctcgattcccatggcctcgtgaagatccgtatcccgggtgatgaccgcgaagagcgggacgccgatattgaacggatcctgaacgaaatgggagctgcccgtatccagacgattggcaagaccgtcacgatctggcgcccgatgcctgagaaggaaaactcccgcgcggtgtcctccaaggattcggaggaagaccgtccgagaagccgcggcggcaagattctccgtaccgacaagaagcggatcgcgaagcgcaagacaccgatccgccgcgctcatccgaagcgcaagcgtacggtgaagaaggcccagggcgctgcttcctgaccgcggaatacttgagaaggtgaaatgcctgtatcaacgaagaaactgagatccaaccgggcctggcttgagagacatctctctgaccgctgggtgaagctctcccagaaggaagggtatcgggcgagatcagcctacaagctcattcagatcaatgagaaagagcatatcttccaccccggcatgtccgtggtcgatcttggatcggctcctggcagctggtctcaggtggcgaggaagctcctttcgaggaaagacggtacgctcgacgggcggatcgttgccatggatattctgccgatggatcctgttgaaggggtcgattttctgcagggtgacttccgcgaacagtctgtctgcgatcagctggcagagatcgtgggcgatgaccgggtggatctggtcatgtctgatatggcaccgaacctctccggcattgcggcgagcgatgcctcgcgttccatgctgctctgtgagctggcgctggaattcgcgctcgatcatctgaagccgaggggcgtcttcatcgcgaaggcgttccagggcagcggctactctcagtttgtcgaaaccgtcaagcgctcgttcgtcaaggttcaggctctgaagcctgaggcgagccgcgacacctctcccgaacagtacatcgttgcgcgggatcttaaaaagagccgctgattcataaagaggaatgtgcatcccatgcatattcctcacgccgtctcttttttccattagtcttataaactatgtttatccggcacaaaaccgaaagcggaaccgccgttttcgtgcctgcgatacagtttctctagcattggagctcagcattggacaataagatgcttggacgcgtggccatatgggtactggtggctgtcgtcctctttacggtctttaagcagttcgacaaccgcaccgatgttgccgttgataccaccagctacacccagtttatggatgacgccaaggctgggaagatcaagcgtgtcgatattcagggccggaagattttcgtgaagccgaattccggctccgagtaccagatcacgtcgccgggcgacctctggatggtggatgacctgcggaaggatggcgttgccgtgtacggcaaggctgaggaagagccttctgtctggacgaccatctttgtctcctggttcccgatgcttctcctgattggtgtgtggattttcttcatgcgccagatgcagggcggcggcaagggcggtgccttctcgtttgggaagagcaaggcccgtatgctggacggtgtgagcaatccggtccgcttctctgatgtcgcaggctgcgatgaggcgaagcaggaagtgcaggaagtggtggatttcctccgcgatccttccaagtatcagaggcttggcggtcatattccgcgcggcattctgctggtgggctctcctggtaccggtaagacgctgctggcgaaggccattgctggtgaggctggtgttccgttcttcacgatttccggttctgacttcgttgaaatgttcgtcggtgtgggcgcggcccgtgtccgcgacatgttcgaaaccgctaagaagaatgccccgtgcatcatcttcattgacgaaatcgacgcggtcggccgtcagcgcggcgccggtctcggcggcggcaatgacgaacgtgaacagaccctgaaccagatgctcgttgagatggatggcttcgataccggtacgaatgtgatcgttatcgccgcgacgaaccgtcctgacgtgcttgacccggctctgctccgtccgggccgcttcgaccgtcaggttgtggtgccgctgcccgatatccgcggccgtgaacagattctgcgcgtccatatgcgcaaggtgccaatcggacaggatgtccgcgaggaccttatcgcccgcggcacgccgggattctccggtgctgatctggccaacctcgtgaacgaggcggctctttacgcggcacgccgcaacgcgcgcctcgtcgagatgatcgacttcgagaacgcgaaggacaagatcatgatgggcgctgagcgccgcggcatggtgatgaccgaggaagagcggaagaataccgcttaccacgagtccggccacgctgttgttgcccgcatgcttccgggtaccgatccggtgcataaggtcacgatcattccgcgcggccgcgcgctgggtctcacgatgcagctgccgaccgaggatcgctactcctacgatgacaagtacatcctgaaccagatcgctattcttttcggcggccgtatcgctgaagaggtcttcatgcaccacgcgactaccggtgcctcaaatgacttcgaacgcgccacgagccttgcccgcgacatggtgacccggtacggcatgagcgagaacctcggaccgatggtctacgctgagaaggaaggcgaagtcttccttggcaagagtgtcacgaagagccagcagatttctgaggccacgatgcagaaggttgatcaggaaatccgccggatcatcgaccagcagtatgctctcgcccagaagatcatcacggataaccgtgacaagatggaagcgatggctcacgccctgcttgagtgggaaacgatcgacagcgaccagattgatgacatcatggccggccgtcctccccgtcccccgcatcaggtgattaccggcgatcagccgcaggtggatccggagcgcgcccgtcagaatgaggtgaaggaagcgaaggatgagccgcagcagaacgcggtttctgaaacgcagcctcctcagccttctgccgtggctcctgaggccaaagctcccgaggcggttcagcctccgcagccttctgaaaagaaggatccggctgacagtccggacaatcagaaataattgaatttcaatccggcgtctggtaaaacaggcgccggttcttttttggagaaagctcaatgactcaagcacagtactggccgtgcagaacgcggcgcttcgatctcagcaagcctctcatcatggggattctgaatgtgacaccggattcgttttcggacggaggtcagcataatgaaccgaagcaggccattgcctgggctatgaggatggcgcaggacggcgcggacattatcgatgtgggcggtgagtcaacccgtcctggagcagccgcggtgtctgaagaggaagagctgcgtcgggtgatccctgtcgttcaggcgctcgcgtcccggggacttgcggtatcagtggatacgagccgcgcccgggtgatgcgggaagcagtagccgccggagccgaaatcctgaatgacgtccgggcatttacgcttccgggggctgttgaggctgctgttgaaacgggagccggactcattgtgatgcacgggtgggatgcggcgaaggaagacgcggaccggggagaggctgacgaagtgtcggctgtcatccgatatctgcgggaacgtcagaacgtgctggtggctgccggagcccaatcagataaaatctgctgggatccggggtttggtttcggaaagactgtggaacagaatttcgagctggtggcggaaacgcgccggtttgttgaggaagggcagccattcctgatggcgctctcccggaagagggcgataggtgccgcgtcaggcgaagctgatgcggcgcggcgcgtctcaggatcagtagccggagcgctgcttgcagttgagcgcagtgctcagcttgtccgggtgcacgatgtgccggagacgttccaggcgctgtcggtgctgaaggccgtcctcgctcagactcattaagaggttttatgtctcgtaaatactttggtacggatggcgtgcgcggtacggtaggcaccttcccgattgttcctgattttgttgtgcgcgtcggctatgcggccggtaaggtcctcgcgaagcattccgcggatgagcaccccacggtgctgatcggaaaggacacccggatttcgggttacatgctggaagcctgtctgcaggccggcttttcgagtgcaggtgttgatatcgtgctctgcggcccgattcccacgccggctgtcgcctatctcacgcaggccctgcgtctgactgcgggtgtcgtgatcagcgcgtcgcataacccctacagcgacaacggcatcaagtttttctcgaacgaaggcatgaagctgcctgacgacattgagtctgaaatcgagcaggagcttgaaagcggagtcgcgaagtgtgtcgacagcagccgtctcggcaaagcggtgcgtctcgatgacgcggccggccgttatatcgagttctgcaagtcgacgatttccggcaaggtcgacttcaaggggatgaagatttatatcgataccgctaacggcgctgcctacaaggttgcccctgcggtgttccacgaactcggtgccgaggtcacgtgcgaattcaatcatccggatggtctcaacattaaccagggctgcggcgcgacgcatacggagacactctctgagcgcgtagcgaaggcgggctgcgatgtcggtctcgctctggacggtgacgcggaccgcctgatcatggcggatgccgaaggccgcgtttataacggagatgagctgctttacatcatcgtctgcgatcgtctgagaaagcacccggtggccggtgttgccggtacgctgatgacgaattacggtctcgaaaagcgtctcggcgaaatgcagattccttttgaccgcacgaaggtgggtgaccgctatgtgctcgagcggctgcttgagaagggctggctctacggcggcgaaagttccggacacatcctctgcctcgatcgtcagacgacgggtgacggcatcgtgagtgcgacgcaggtgctttccgcgatgcgcagaaccgggagctcgcttgctgaactgacgcaggaccttcatatgctgcctcaggtcctcgtgaactgccgactggccccgggctttgactggacgcgccagaagcctctgatcgaagcgcgggaagaagtggaaaagattcttgaaggccgcggccgggttctgatccgtccgtcgggcactgagcctcttctccgcatcatggtggagtcagaagaccgcgaggaagcccagacgcttgccgaacggatcgcttcgaccatcaaataaccaatactgaaggagctggacgaccgaaatgaatacagtgctcatcgttgaggatgaacgtgccattcttgaacttgtcgctttcgccagtgaggcaagcggctttcacgcgctgaaggccggaagcgtcgcagaggcaaaggaaaagctttcggtcgaaaagccggacattattgttctcgactggatgctgccggactgctcgggactcgagtggcttgtgcagctccgggcgtcagaggactatgccgaaattccggtggtactcctcactgcgcgcggaacggaagaggatcgggtaagcggcctcgaagccggggcggatgactatgtcgtgaagcctttctcgccccgtgagctcgtggcgcggcttcgcgcggtgcttcgccgcagaacgggaagcgtcgggactgacacgaaggagagtgtccttcagtgtggccctctcaccatggatgagctgaagttcgaggcgacggtaagcgggcagcctgtgaagcttggcgtgattgaattcaagctcctgcagcagatggcaaagacaccgggccgggtttacagccgtgagcagctgctcagccgcgtgtgggatgacgatgcggcaaccattgacgagcgaacggtagatgtgcatattctcagacttaggaaacagctttccgcgactgacgcgaaagacatggttgaaacggtcagaggtcttggttatcgggtagttgatccgaaaaagagcctctgatccgaggagattcgatttggctgagatgaagcgctcccggctggcagtgccgctggtgtttgtgctcgtcattattgctgtcgtggccatagtgacggggtttacgtttggcccggtagaggcgctctgcgtagcgcttgccggtgtgatctggctgtttattcagaatctgttctttctgttccggctgatcggctggcttgagaatccggtggcagatgaaatcccgtcagccgggcgtgagactccgtggcgcattgtttttgagatgctgcgggatgagcgtcaccagtttgaaaagaacgcgaagcatctgcagacgcgtgaaacccggtaccgcaagacgctgtcgtcactccctgacggcatcacgctggtgaagagcgactggcggattgactggtgcaatgagtcggctgaggatcagctggggctcgactcgatgaaggaccgcgggcagccggtctacaaagcctacgattcgaaggatttcatcgattacctcacggctggcaatttcgataagccgcttgtaatccataacagcgaaaacgcgcagacgattgagctgcatgtcgtggtgctgggacgcaagaatgccgtgattgtgactcacgatgtcacggatcgcgagaagctggattcgatccgccgtgactttgtggcgaacgtaagtcatgagctgagaacgccgctcacggtgatcaatggctttatcgatctcgccatcagttcaaaggatccgggcccggtcaggatcgggcgcgagcatctggcgctgatgaaagagcaggctgaccggatgagccgcctcgtgaatgatcttctcacgctctcgaaacttgaggaaagcagccctgaccgcgcgcctgaaaccgtgaatgtcccggtgatgatccgcgagaccgccaaggaaggccgtgcgatttcgggcggccgccacgagatcacggagagcgctgagccgttctgcctgaaggggtacaaggatgaaatcttgagcgccatcgggaaccttgtcgcgaacgctgtccgctatacgccgcccggcggccatatcagcatcacctggaagcggtcccccgagtggctcgaactcgctgtgaaggatgacggtatcggaatcgcgcccgaatttttgccgagactgactgagcgcttctaccgcgtggataagagccggtcgagagattcgggcggcactggtctcggactcgctatcgtgaagcatgtcctgatacggcatggcggtcacctgaagattgagtcggagcctggcaagggttcgacctttacgatgcagttcccgacggaacttgaaatgccgatgcctgaagtgattcaggacagtgacaccggaattgcgtcataagtcataaagatggagacgggcagttggaaaaactgcccgttttattttgctagaatcttgaaaatttttttcttgcggctcgcgcttctctccatagcttgatcaagttatttccagacagcggtttcgcccattgacaggattaaaccgatggataattcgaaagcgaaaggacttcttttcctcgtttcagcgccttccggcgcagggaaatcctctcttgtgcatgatctgatcacgaaagatccgaaagtgcatctctcaatttcctacacaacccgcgaggttcgccccggagaacagaatggagtggactatcacttcatctcgcaggaggattttgaagagcgaaagaagaaccacgagttcctcgaatgggctttcgtccatggaaattactatggcaccagccgtctttggattgagcaggaactcgccgccggatacgacgtcatgctggaaattgactggcagggcgcgctccaggtgaaaaagattttccccgaggtgatttccacctttatcctgccgccttcgatcgaggcactgaagcagcgtctcgtcggccgcggcacggatgcgccggaagtcatcgcgcgtcgtctgaagggggcaggagctgagatagtccatgccccgcaattcgactacgttataattaacaatgatttcaatcaggcttcctgcgagcttcagtccatcatccgcgccgcgcgtctgcgctatgagtgccaggcgaggcgtgagcaggctttgtttgcatctttgggtgttcccgcctgatcgttgaaagttcaaaatttctgaaagagaaaatataaatggctcgtgttactgttgaagactgcctgaagaagattccgaatcgcttcgagctcgtgctgtgcgccgcttaccgcgcccgtcagatctcccagggctatgccccgaaggtcgacgcgaaggataagccgacggtggtcgccctgcgcgaaatcgccgaaggcaagaccggaaaagagatgctggagaaagttccccgctaagacgcctctcagtccgtttacgggtcctgttccaagaaagggacaggacctttttaatttctaacccgccgaaccggaagcgaggaacatcctatgcctgcaatcaatgcggactcgcaagtggtcataccccacatggaaagtctgacggacgataactcgtcagatgatctgccactctacatgcagccggctgacgtcaagatcgtttctgcgaacgagctgctgacccggtgcaggctttatctgtcggaaagcgactgccagacgattctcaaggcctatcgctacgctgacgaacatcatctggggcagttccgcaaatcgggcgagccttacatcacgcatcctctcgcggtggcgtctattctcgcgagctggcatatggactgcgtgaccattcaggctgggctcatgcatgacgtgctggaagataccggcgtgtcgaagatcgagatggcggagcgcttcggtatcgaagtggcaaacgttgtcgacggcgtctccaaactcgataagctcaaattcaagagcactcaggtcgccgcggcagaatccttcagaaagctgcttctcgccatggcgaaggatgtccgcgtcattctcgtgaagctcgctgaccgtgtgcataacatgcgcactctcggcatcatgcgctacgagaagcgctgccgcatttcccgcgaaacgctggatatctacgtgccgattgcccatcgcctcggcatgaatcacgtattccgcgaactgcaggaactcgcgtttctcaacatgcacccgatccgctaccgggtgctgcatgacgccgtggtgagaacgcgcgaaaagagaaaggatattctcgaacggattctgcatgaaacccgccgcatgcttccgaaggccggcatcaaggcccgcgtgatcggccgtgacaagacgatgtacggcatctataacacgatgcgggataagcacatccggttccgcgaagcgctggacgtctatggtttccgggtaattgtgcgcacccctgaggagtgctacctcactctcggcgccctgcatgcgatgtataagccggtgccgaagcgcttcaaggactttatcgcggtgccgaagacgaacggatatcagagtcttcacacgacggtgatcggtccgaacggcacgccgatcgagtatcagatccggacagaggaaatgaaccggatcgccgagtacggcattctcacgcactggcttttcaatgatgacggggcgagtgccacggaaattcagcagagaacgaccgcctggcttcagtcgctgcttgaaattcagcagcacagcgcggattcctctgaatttattgaaaacatcaagatcgatctcttcccggaccgcatctacgttttcaccccgaagtcgaaaattatttctcttccgaaacgctccactccgatcgacttcgcttatcagattcataccgacgtcggcaatcacgcgctttcctgccgcttgaacggcgaacccagctctctcacccaggaactgaataacggcgacatggttgaaatccgcacttcgcctgacgcgacgccgaaccccgaatgggtgcgctatgtcggcagcggcaaggcgcgcgccgaaatccgtcagttcctccgtacgatgaagtttgatgactcagtgaagctgggccacaagcttctcaagcgcgccggggaggaggtgaatctcgatatcgacacagttcctgaagcggtctggaaggcggtgctgagagactccggtgtcgactcaaaggagtcgttcttcgcggatctgggacttggaaaatatctcgcaggtgccattgtgaaccgctttaccgcgctgacggccccgatcacgggacttgccggccggaccgagagccccatgatgaaggcggtgaaggtgacgggcaatgagggcgtcgcggtcagtctcgcgacctgttgccacccgatcccgggcgacgatatctggggcttcatgcgccccggaaagggcctctccattcactgcacgtcctgcgagcatacggtgaaggggcgttccgcggatccgggccgctggatggcggccgagtggctcccgcagccgctctctgcccggtaccctgtgccggttgaagtgaccgcggatgaggaacaggagaaagcggtgatcgcggccagcgtcgcggctatcgctgaagagcagtcggcgattgtcggcttctccgtggattcagaaaacagcaatacaacccgcctccacatggtggtgcaggtgagggataagacccacctctcccacgtgatgcgtcatctcgcgagaatcccgggtgtccagcaggtctggcgccggacttctgagcaggacgatattccgaaggccgcgcctgaggaaccccggatgaagaaactcaattccgaggatctttacgcggagagcccggcaggcggcggagcctgattccacagcgggaaataaaaaacggagcggaaaattccgctccgttttctcttattcgtctttcggtgtttcgtgagggatcggcggttcgccggtatagcggacttcaaggatctcgagcgtctgcacacctttaggtgtcggaagcttcacttcatcgccttcgtgcgccttgataagaacgcgggcaaccgggctgatccaggaaacatcgccatgctccggatccatctcgtcgatgccgacgatgcggactgtgtgctcttcgccaaggttattggcataggtcacggtcgcgccgaagaaaatctgatccgtatcccgcccccggacatccaccacctgggcggactcaatacgcttattgaggaagcggatccggcggtcaatagctctcagacgctgcttgccgtactggtaatcgccgttctcggaccggtcgccgttcgacgccgcccaggagacaatgctcacgactttcggacgttctgtccgcacgaggttttcccgttcgtcgagcattctccgatagcattccggcgtcatgtagttcggggcgttggctggcagtcctggcagctttacgccttcttcgtcgtcatcttcatcctgagccgtattcatgccttgctccttttctgggagagatatgaaaaaagtccgtgaaggcatcaaccttcacggactctgaatctggggtggggggtcggactcgaaccgacgacaaccggaatcacaatccgggactctaccaactgagctacacccaccattacaactgatttactactggtccacccggcaggattcgaaccagcgaccctctgcttagaaggcagatgctctatccaactgagctacgggcggatcgattctgctttgcagactctgtctggtcggggtgaagagattcgaactcccgacatcctgctcccaaagcaggcgcgctaccagactgcgccacaccccgagagaagtcaattatacataaggaaagccaaaaagcaaaatttaaatttcagacgcccggaaatgaccggagaacgatgaaattgcagcgtgtctcttaccggaaggtatccttcggcgacgcctttttcatggagtccacattgcacaggacctgcgtcagatggtgaccggtctgtgcgacgaacatggaacaggtcaggcgggcccggtgtccctgattgtttttataaaacttccactggctgtcgtttcccatgacaagctgcatgatgagaacgccgttgaccggaccttcctcatcctgtctgtcggccgggatcgtgttgatggggtgatccaggataatggcggggaattcgaccacctcttctttccccatgttgcagcagtcaacaccctgacggctgccgagcgtacccgtcacagaaaccggggtgccgtagcggtacgtggcagctgatgcggaaagcgtgaaagtgagaccgagaaggcctgcaagaagccagcggtacataaatagactcctgaagaaaaattgagagaattataggctcaaactttataaagtaataatgtagataacgattaaggcttgcagagaaaccctgacggaaaatgttgtgaaataaaaaaagccccgcggaggcgggactttcaaaagaatccagagcggcgtaacccgctctttcttctgttactccagattctggatctgctcgcgcatcttctcgatattaagtttcagatcgagagaagcattggtcatctcgattgccacagccttggagcccagagtatttgcttcgcggttcagttcctgcatgaggaagtcgaggcggcggccgacaggaccgccagcggtcagcacacggcggacttcattgacgtgggtgatgaggcggttgatttcctcagccacatccatgcggagagcgtagagcgtaagttctgcgcggatccgttcgttcacgtcttccggcgtcagggaagacttatcggaaagcgcttgggtgagtgcctcagagagccgttcctcgagcttcgacttcatggcggcaagaatgtcagggagtcgggacgcgatatcgcgggcgattccctcgatgttgtcgcagtaccccagaagcactttggcaagagccgcgccttcgcgttcgcgggaggcgaggaaggcatccagcgcgcggttcagcgcgtcgagaacgtcttttgacacctgctccgcgtcgacggaatcagacgtaagaacgccggggtaagagagaatttcgctgacagagagcgcgcgggcttccgggaaggctttgagcgcttccccctgcagggacgcgagcgtcgtgagagcagacgggctcagacgtgacgtggcaccgagcgtctcagacttaagggagagccggcactccatcttgccgcgctttacgcgggaaccgatcgtttcacggatggctgattccagagagtggagatcatcaggaattctgagcgtgagatcgagaaaacgggaattgacggagcgcagttcgacagtgagctggccggacgcgatcgctgactggatcgtcgcgtaacctgtcatgctgaaaacggatgccataagatatatccttgtccgagtttgctggatgcctctgcctgcgatgcgaaagtccaggcggaaggcgcatgcagattgtaacggttttgggatcatcaacagggaagcgcgggctcaggtcagccctgcggctctgtttcatcagatacacgcagcgacgggctgcagggagaaagcgaagtggaacgtacgaacggccggaaagcagatgaaaaacggagcgtaaaaattacgcgccacttcacgaagtacgccgagggctctgtcctgattgaagacggcaaaacgcaggttctctgcacggcctcggtgatcacgggcgttccttcctggcttaagggccggggtgaaggctgggtgaccgcggaatacggactgctgccgcgcgcgaccggaacccgtacggaccgtgaagccgcgaagggaaagcagaccggccggactcaggagattcagcgtctgatcggccgcagcctccgcgcggtgatcgaccgcaaggcgcttggcgaaaacacgatcaagatcgactgcgatgtgctgcaggctgacggcggtacccgctgcgcctcgattacgggtgcctatgtggcactcgcagacgcggttaactggatgatttccaagggactcattgaaaagagtccgctcaaggactcggtgtccgcgatttctgtcggcatgagcgaaggtcagccggtgctcgacctcgactacgtggaagattcttcgagcgacaccgatatgaatgtcgtcatgacggggagcggcgcttttgtggaaatccagggcacggctgaaggcgatcccttcacgcgcgatgatctgaaccgcctgcttgaccttgcggaaaagggcaataaggaacttgccgaggcgcagaacgaagcgctgaaggcctgaaagaaaccatttggagatcgacggatgaagcgtctggttctggcctcggataatccggggaaaattcgtgaattcaataagctcttcgctcctctcgggattgaagtggtggctcaggggtcgcttggcgtcacgcccgccgaggagccctttgagacattccttgaaaactgcctcgcaaaggcccgcaatgcctcccgtcagacgggactcccggcaatcgcggatgattccgggatctgcgtggacgccctggggggagcccccggcgttcattccgcccgctttgccggtctgccgaaaagcgatgcccgcaataacgagcttctcatcagccggcttcagggcgaagcaaaccgcaaggctcactatgtctgcgttctgatcggagttaagtcggcagacgatcctgatccgctggtggcgaccggttactggcacggcgaaattgtggatacgccccggggtgagaacggttttggctatgacccgtacttcttccttccgcaggaaggaaagaccgcggccgagctttccgaggaagaaaagaacagcgtgagccatcgcggccaggcggttcagggccttctctcgcttctcaggaatcactgggggtggtgagccgcatgaagacgcttccgggcacgggcggagtgccggttccggagagcagccgcatcccgctctccctctatattcattggccctggtgcgtccgcaagtgtccttactgcgacttcaattcgcgtccggtgatgggagctctgccgacagagacctatgtatcgctgctgcttcgcgatctggagtctcagctcgagtatctcaggcccggaagacgtcttgagacgatctatatcggcggcggtactccctctctcatggcagggaaggagattggaactctgctgcagggagtccggaatctgattgaggtatcgcccgagtgtgagatctcaatggaagcgaatccggggacggtggaatccgattccctgatccgctaccgcgaggccggggttaaccggctgtcacttggagttcagagttttaatgaccgggagctccggattctcggccgcattcattccgcggacgatgcgagagcagcaatccgtcaggccgcagcagcctttgataatttcaatatcgacattatgttcggccttccgggggagacccgggagtcgcttgccgaggatctgcgggaagcaatcggatccggcagcacgcatctctctttttatcagctcacgattgaggagggaacagcctttgcccgacgggtgccggaaggaattccggatccggatacgctcgctgaaatgggagacctggtgctgagtgaacttgcccgtgcggggttcaggcgttacgaagtgtcgggatacgcgcaggaagggcgccgctgccgccataacctgaactactggggctacggcgactatctggcgatcggggccggagctcatggaaagatcagtgatgagcggggcgtcttccgctacgcccagacaggggatccgaggcgctatatggataacgtccggacgctggagacgccattccaggaatcccgttgggtgggacgtgatgagctgccgtttgagttcatgctggatgggctgaggcttacggacggggtcacagtccagtcgtttgaggaaagaaccgggctcggttacagcgtgatcgagccggcagtgaacgaggcagtgggcgaaggacttctcaccgcggaaagcggccgtcttgtgccaaccgccagggggctcgacttcctttccgatcttcaggagcttttcctgccctgatccggtgccctgtaaagtgttgccgattgaaaaaatctcatttttggggagcagatgcactatcatggtgcatggttctgcctcattttgattcgcgcagacggtgaaattctgaccgtctgccggagaagggctatttgctgaggttttgctgaaaagtaaaaactggcacggtagttgcttatatatgggcgaatgccagggagaaatgctctcccggcccaagattgatttaggagaaaaagatgacgacggctaatgacgtcctccagatggtcaaagacaacgacgtgaagttcgttggcttccgctttactgatacgctcggcaaagagcagagcgtcacgatccccgcagatcagctgactgaagaccagttcgaagtgggccacgtctttgacggttcctcgatcaagggctggagaggcatcgaggcctccgacatgctgctgcttccggatccggaaacggcccgcatggaccccttccgtgagcagaacacgctgctgctcacctgcgacgttgtggaaccggacacgggcaagggttacgaacgtgatccccgctccctcgcgaagcgcgctgaagcctatttgaagtccaccggcatcggcgacaccgcttactttggtccggaactcgagttcttcattttcgacagcgtccgctatcgcaatgattcccaggactgcttctacaagattgaaagcgaagaggctccctggtccaccggcctcaagtatgaaggcggcaacctggcccaccgcgccctgacgaagggcggctatttcccggttccgccggttgataagctgatggacatccgtgctgaaatgtgcacgctgctcgctcagcagggcatcccggttgaagtgcatcaccacgaagtgggcgctgccggccagtgcgaaatcggcacccgtttctcctccctcgtgcagcgtgctgactggtcccagatccagaagtacacgatctggaacgtggcggccgcttacggcaagaccgcgaccttcatgccgaagccctatccgggtgacaacggctctggcatgcactgcaaccagtcgatctggaaggacggcaagaacgtcttcgcgggcaacggctacgccggtctgtctgaaacggcgctttactacatcggcggcatcatcaagcacgcccgtgccctgaatgctttcacgaacccgtcgaccaactcctacaagcgtctggtcccgggctttgaagctccggtgaagctcgcctactcggcctgcaaccgttccgccgctatccgtattccgaaggtgttcagcgaaaagggccgccgcgttgaagtccgcttcccggatcccacggctaactcctacctcgccttctcggctctgctgatggccggtctcgacggcatccagaacaagatcaacccgggcgatccggctgataagaacctgtacgatctgccgcccgaagagaacgccaagatcccgacggtctgcagcgatctctctgaagccctggcttacctcgatcaggaccgcgagttcctgacccgtggcggtgtcttcacgaatgacctgatcgacgcctacatcgcggtgaagcaggaagaagtgacgacgtaccgcgctgcggtgcacccgctcgagtacgcgctctacttcgcgagctaacgcgcttgcgtaagcagtaagcagcagaggagggggatttttccccctctttttttcaataaacggcggagggctgaatgacgaagaacgcggcgtggcctgagggctcttttctcgattccctcgcaacgggtgtcctcgcgacggacccgaagggaaagatcgtctatgccaatgcggcgagtgagatcctttcaggagcctcaaagaaccgcctgcttggtatttctgccgaagccgtttttccatcagcccgccgctggaccgagcgttttctgtcggataccgtccggggggagccaaccctcaccgagcggactgaaatgttctgcccgagcaatccgacagaaagccggaaggtccgtgtgacggtcagccgtttcccgggaaccggcggcattctgatggaagtgtcggatcttggagccgtgctgatcgcggagaatgaggcgcagaaggtagggctctcggaaaccagccgtcaggtgctccggaacctcgctcacgaaatcaagaacccgctcggcggaatccggggcgcggcgcagctcctcgaaggggagctcacgaatccggagctccgtgagtacaccggagtcatcatcagcgaggcggaccggctgcagaatctcgttgaccggctgctcgccccttaccgcacggggcggtcgctttctgacatcaacatccacgaagtgctggagcgggtccggcagatcattctggctgagtttccgaagggactctcttttatccgggactatgacgtttcggttccaacactccggggtgaccgtgagcagctgctgcaggtgtttctcaatatcgaaaaaaatgcagccgaggcgcttgacggaaagattgccgaaggcacggctgagatccgggtgataacgcgcgtggcccagcaggtgcagatcgggctcaggcgttaccggctcgcgctttccattcatatccaggataacggtccgggggttccgccagaaatccgggatcggatcttctatccgctcgtgaccgggaaagcgaatgggagcggtcttggactctcactcgcgcagaatttcatacgccagcatgacggatcgatcgatgtggagagcgaacccgggaaaaccgatttccggattcttctgccgctctctccgcctgagaccggcgatatcagcccagcgtgattaaggagaaaagctcatgaatgaagtctggattgtggatgatgaccgctcgatccgctgggttctggaaaaggtgctgacaaaggcggggttcacctgccggtctttttctgacggaaatgcggcctggaccgccctgcagaatgactgccccggcgtgctgatctccgatatccggatgccgggtcccaatggcatcgatcttctcacgcgcatcaaggaaaagtatccgaagcttcccgtgatcattaccacggcgttttccgatctggaaagcgcggtgtccgctttccagaagggggcgtttgaatatctgccgaagccctttgacatcaataaagcggtccagcttgtgcagcgcgcgatggcggatcaggagccctctgccgcggctgacgaagctgaggaaaatgaggaagagggacatgggacgctggagctgatcgggaaggccccggtgatgcaggatgtcttccgggcgattggcagactgtctcactccagcatgactgtcctgattacgggtgaatccggcgccggcaaagaggtcgtggcccgggctctgcaccgcagcagcccgagaagcaaagcccctttcatcgcgctcaacatggcggcaattccccgtgagctgatggagtctgaactctttggccacgagcggggcgctttcaccggagccctcgcgacacgaagcggccggtttgagcaggctgacggcggtacgctgtttctcgacgaaatcggcgatatgccgatggagcttcagacgagacttctccgggtgctttcagacggaaatttctatcgggtgggcggccatcagccgctgcacgccgatgtgcggatcatcgcagcgacgaaccagaatctcgagcgccgtgtggcggaggggaagttccgtgaggatctgttccaccggcttaatgtgatccggatccggctcccatcgcttaaagagcgatccgaggatatcccgcttcttgctcaccactttctgatccggaccgcgaaggagcttggggttgaagtaaagcggcttgagccggacgcgatggaagcgctgacccgctaccccttcccgggaaacgtgcgtcagctggaaaacgtctgccgctggattacggtcatggccccctctcagaatgtgagagcggaggatctgcctgaggaagtgaggaactgggaggccgggaaggacgccgcgcttcccgaaggacacatgggggcgctttcagactggaaggacgcgctttcgcagaccgtttccgatatgctcgaccgcggcgcacccgatatcatggagtcgctccggaatcagtttgagaggacggtgattgaggccgctcttgaaaagacatccggccgcagaatcgacgcggcggcccggcttggcatgggccggaacaccatcacgcggaagatcaaggaactgcggatggaggagtagacatccggcagagcctgagagattttctcaggcttcttttttattcgccgcggtgcgctgaagctcgtgcaacttcagatacttcatcatcgtgtaggaaaagttgaggaaacagaggtaggttccaagagcaccgtcgaggaacccgagcttcaggatcagcattttgaagaagctgcctgcgctgtgcccgaagatcccgccaagcgatgttctgcgtccctggcggaaagcgttctcggcccagagcgttgagtagagactcatcttccgctcccaggatctccagtcagcatacgtgtagtgctccatgtagccgggcagtgttttttcctggaggctgcactccggatgctcgtgaacctggttcacccaggtcacctccgttctcgggaagagcctcgttacccagttggggccgatcacgccgtggcggaatgtttttccgaaggcgcagcagagtctgagcatgcggtatgcggcgggttccgctcccggctccgtggcgcggcggatcgcggaggcgagttccggtgtcagatgttcgtccgcgtcgaggtagagcacccacgtcgcgtcggttgccgagaggccgaagttccgctgagccgaaaagtcatttgtccaggcccggtagaccacccgggcaccggctttttccgcgatttccactgtccggtccgtactgccgctgtcgatcagaatcacttcgtccgtacattgcctggcgctctgtatggtttccgcaatattcttttcttcattctttgtgaggatcagtacagcaagattattcatggagatacggccggaccaaatgttggataagtagatgcattttaatcgccggaggatacctgtccatgagggaggatgagaaaacggaaagccgggaggctttaaaatgacgcctttgcccaatcaggaaaactgctcgatggagttcatagtgaatgacggcgcgccgcgcctgagtgatgtaacggagaagctgcggtcgctcagagcgaaggagcagcatctgagaggcattgcgcgggcctggcttgggagggccgcgtggccgggagaggatgatctccggtttccggaacccgtgagggaagcgctgcccgaactcaggcggtatcttgactcgctcgtggtgcccgcgctgcgaagcgggggcggggacggcagatcagaaaaacttctgatgaagcttcgggacggagagaccgtggaaacggtcgtgctcccgaaggatggcgtctgcgtgtcgactcaggtggggtgcgctgtgggctgcgcgttctgcatgacgggccgctcgggactcatccggcagcttggaagcgccgagatcgcggcccaggtggctgcggcccgccggatcaatcccggtatccggaaagtcgactttatggggatgggggagccgtcccacaatctccgggccgttctcgaagcggtccagtttctcggtacttatggggatttcgggcataagagcctggtcatttcgacggttggggatccgaggatatttgatgcgctgctcagcctgaagccaacagatgtccggccgggactcgcggtatcgcttcactcggctattgatgagaagcgccggcatctgatcgcgaaacccggagcgctttccgtcgcagaaatcatcagccgcgcccaggcgtattcggacgcggtgaagtatccggttcagtatgagtgggtgctgatccgcggcgtgaatgacgggaaggatgagattgagaaactcgcctgccttcttgaagggaaaaacgcgatgctgaacttcatcccggtgaaccgggtggagggatcggactttgtgcggcccgacaaagaaaagtgtctggagcttgcggaaatcctccgctcccgagggattgttgccaaaatccgcgtctccgcggctcaggatgtggagggcgggtgcgggcagctccgagcccgcactctgaagaattttcagctctgagagactcagagactgagttccagcaccaccggagtgtggtcggaaggctgcggcagctcccggtaggcgcgccggattttcacggattcaatctttccgacgagcggatcgctgacgagcgtatggtcaatccgcgcgccctgatcacgaaggagagcgttattgcggtaatcccaccagctccagtcaccttccgtgaccggtgcttttctgaacgcgtccgtgagtcccagggcaataagggagttgaaggcgtcgcgctccgcgtcagagacgaggatgtgtcccttccagccttccggatcccagatatcctcgtcagtaggcgccacattcatgtcgcccaccagaataaggttggggtccgtacggaggcgcgcttcaatcgcggacctgagcgcgcagaaccactcaagcttatagagatacttcgccgcgcccggggcctgaccgtttgggaaataaccgcagacgaaccggaacgacgctcctgactgagccgtaatggtcgccgcggcaagacgcttctgaggatccggatagcccgggattccgaacgatgcgtccgacacggccactgattcgtcacgggtcaggatagcgactccgttataagccttatgccctgagaagagacagctgtatccgagtttccggatttcatcttccgggaacttgtcgtcatcgactttggtttcctgaagcccgatcacgtcgcactgctcatcctgcagaaactgcagaacgtgcggtagccggacgcgcagggagttgacgttccaggtcgcgattttcatttgtcttcactcatgccggagtggcgaagcagggcgtccaccgtgggcttgcgtccgcggaaggcaacgaagctttccatcgcggggcgggagccgccgcgggaaatcacttcgtcaagccacttcttgccgatttcaggactgacaacaccgttttcctcgaagagcgagaaagcgtccgcggaaagcacttcagcccacttgtagctgtagtagccagccgcgtagccgcccgcgaagatgtgcgagaagctcatcgggaagcggttctcggggatcaccgggattacgcagacttccttgcggacctgattcagcagatgtagcacgctgtcatgctccggatcgaagtccatgtgaaggagcatgtcgaaaagcgcgaattcaagctgacgcaccatcgccatgccggactcgaaattcttcgctgccaccatcttgtcgaagagcgcgcgcgggagcggttcacccgtcacgtcatgcttcgaaatggattcaacgacagaccagtcccagcagaagttttccatgaactgcgagggcatttccaccgcgtcccattcaacgccggaaatgccggagacctcagcctcatcaacccgggtaaggagatggtgaaggccgtggccgaactcatggaagagcgtctgcacttcgtcatgcgtcatcgtggcggtcttgccgggcgcgggtttcgtgaagttgcagacctgataggaaaccggtgtatcgagcttgcccttgtagaggcggcgggttctgtcgccatccatccaggcgccgccccgtttcgtgggacgggcatagaggtcaaagtagaactgggcgatcagtttgccgttcttatcttcaaaccggaagaacttcacatccggatcccagacgcttgcgtgatcctcgcggatatgaatgccgtagagcgtttcgacaagatggaagagtcccttgaagaccgcgtcctgcgtgaagtagtgcttcacttcctcgtcagagaaggcgtagcgcgcctgacggagtttttccgcagcgaagctgagatcccagggctgaagcgattcgatgccgagttccttcgcggcaaattcccgcagctcctccatatccttcagcgcgtaggggcggctcttcttattcagatcacgcaggaatccgaccacctgttcgggggtctcagccatcttcgtcgcgagagaatattcagcgtagttacggaaaccgaggagagacgcgagcttctttctgagctcaagcgtttcacggatcaccggcgtgttatcgaacttatcggggccgagttcggaagcgcgggtcgagaacgcccggtaggcttcctcacgcagcgcgcggtcttccgcgtactggagcacggggatgtaagaggggaactggagcgtgatccgatagccttccttgccggcctgttttgcggtttcgctgaaaagcagacgggcgtcctcggggatgcccttcaggcgggaatcatccgcgagatcgagcgtccaggcgttcgtcgcgtcgaggaggttttcggagaacttctgagagagggcggaaagccgctcgctgatcgccttcacttcctggcgctcagactcagggagctccgcgccggaaaggcggaagtcccgcagctcatcattgatgattttctggcggacaggtgtcagggactcaaacccggcggcgtcatgcatcgccttgtactttccgtacaggctctcattctgagagagtccgatccagaactgcgtgacctcagggagcatctcgttaaagacgctgcggagcgcctcgctgtcattcacggacatcaggtggctcacggcaccccaggcgcgggatagacggagtgtcgccgtggtgagagtctcggcgaccgagtcaaaatccgcgggcacttcaggcttcgtcacggcgtccagcgtcttctgtgcttcagcaatcagttcccggatagccggcgcgacatgctcagggcggatcgccgcgaaatcgataagaccgtcaagattaagaaggggattctgcgacatagacaaatactttttcctaaatgaatagctgtaaaaagaaaaaagcttccggcaacagacgcgggaagcttttttcctcgtgaatgcttgatgattagtttagcgacttcccgaatttgcccaaggcggcgctcacggtgttcgtgaggagcatcgcgatcgtcatcgggccgacaccgcccggaacgggggtgacgtaggaggccttttcgaggacggattcggtattcacgtcgccgcagagcttgccgttttcgtcgcggtccataccgacgtcgatcacgactgcgccttccttcacgtagtcagcggtcaccagtttcgcgcggccgacggcgacgacgaggagatcggcttcacggcagacagccggaagatccttcgtgcggctgtgagcgatcgtcacggtagcgttccgttcaaggagcatcagcgccatgggtttgccgacaatattgctgcggccgaccacaacggcgcgtttgcccgagcagtcgaaaccgattgagtcgagcatctcggcgatgccggcaggcgtgcagggacggaaacccgggcgtccgacgagaaggcgtccggcgctgttcacatggaaaccgtcaacatccttatcggggctgatcgtgtcgatgactttcagatccgagatgtgcttcggaagcggcagctgcacgagaatgccgtcaactgacgggtcttcattcaggctgcgcacgaggttaaggaggtcttcctcggaggtgctttccggaagacgcttttcaatcgagcggatgccggcttcttcacaggccttgatcttgttgcggacatagacctggctcgccggattttcgcccacgaggacgactgcgagccccggacggtagccgtgctcagcttcaagctgagcaaccttcaccttcatatcggcgcggatttttgcggcgagcgccttgccgtcaatcagttttgctgtcattcgttctctgtctgttcggtaatgtgcggtttacttggcggcctgggatccatcgaggaatttggccggctgtgacgtgtccatcacgacacgcataagatccgcaacggtaccagaatttgtcttatccatgatgctcgcgcggtgagcctcaaccgtcttgattgaaatgccaaggtcatcggcgatctgcttattgagacggccggcaacaatgcgttccagcacctgctgttcgcgcggcgtgagcttcgcgagcagcgcctcgttcagactctgacgctcattcttcatacggcgttcgcgcgcttcgttcagcatgtgctccacctgagccttcagagcggcctgctggaagggcttctcaataaagtcgaccgcgcctttcttcagagcgcggaccgccatcggcacatcgccgtgaccggtaatgaagatgatcggcagatcggcttttctcgcgaggagatgctcctggacctccaggccgctcatgcccggcatgcggacgtcaagcaccagaacagcaatcgcgttcggatcgtacttcgcgatgaaggattcgccgctgtcataaagctcgaccttatagtcgtttgcttcgagcagccagcgaagagagtcgcggatggcgtcgtcgtcatccacgacgtaaacggtacccttggtatcctgagtcgatgtattagaaaaaaccgtcatctgatgtcctcactccttgcggtgtcccgggcctgaatactcaataatcgtgcccattaaataactataaccctagttctgcggaaaagctcctgacttacgcctggaaggcagcgccttccgtataggccggcagtgtcaggatgaagattgtgccgccccccggattgtcctcgacgcggagccgtccctgatgcatttctgcgatggagcgacagatattgaggccaatgcccattccttccgccttcgtggagaagaacggttcgaagagcttcgccttcacgtcagccggaatgcccggaccgtggtcagaaatctcgaatgctacctgatgctcagcctcaaggggctttacggtaagcgtgatctcgtggttctcgcagggttccgcggcttccatggcattcttcagcagattgagaagcagctgctcgatcatcacggcgtcgcacacgacgctgctcacttcaggagaaatatcaagcttcaccgtggcgtcccgctttttcgcctgaatcagcgcaagctccatcgtttcatcaatcagcttctgaaccggcgtgggtgtcatttcaggcgcggtacgcttcgcgaatgaccggatccgtttgataatcgccgctgcccgctcggcctggtttgacactttattaaaggcctgggcgcagtcgctttcggaaagtttccccatctgcatcagcgtgagagcggcagacgcgtagttcgtaatggcgccgagcggctgattcagctcgtgggcgagcgaactcgccatctcacccatcgtgatcaggcgggaggagagctcagccttcttttcctgctgcgcgacgagctcctcattcttccggcgctcggtgatatcggtggcaatctgcagttctgccgtgagaccgtcagtccagacgagctcacgctcgcggacatcaaaccacttgtcttcaggcagatagtgaatgatgccggtcagagtgccggatgaggcatccttattgggaatctcggacaccagtttctgatgcggcgacggatcgtctccccagaggttgtgatacgttggattcgtgtagagcagaatcgtttcgccgttccgtttcccaaggacactcaccgcggagtcaatcgaatcgagcaccttcgtgatgcgttcgcggccgcgcgcgagttcgtccgcgattttcttcgcctccgtgatatcggagaccatttcgagccagccaatctggtttccgctgtcatcggtgagcgggttgagttcgattgacgcgatgaaggtcgtgccgtcagggcgggtgaccgtggtctcaaactgacgccggagattttcaccgtcagtcacatcgcgcgcgagcttcagatactcgtcccgttcgtgctcggaccagtagctgtaagggggcatttctccagcgatctgtttgttcccgaggcggaagagatcccggaaagcgcggttcacataaacgatcattccccgcatgtcggttacccggaggccggaagcgatgctttcggacatcgcgcgtcggatcacggactccgcaagaagatgccgggatgtccgacgctgacggatctggaaacccgcgagaccgagaaacgccacaagaagcgcggtgccaagcccgagaatggagagcgtcgacagatccttcgtgaaaaggaacggacgattgaagggggacaccgagagcgtcaccgcgggcggaagcggcggcagaagaatatcaaacgactcctctgtcgtctgagcgactgaggatgttgaaataaactttttcccgttcactttgagtgacagagacgcgcggtcaagaagcgagctcggtgtcacctgatgcatgaagcccgcaagcgaaatgcgggcgatgattgcctcattattagtcgacggaacaatgagattgatatagggggttgagttccccttgtagaaatagggattcgagaagagagcggtctcactgtcatgagcgcgcttcagggtttccagcgtgtcctgcatcgcgagcttctggcccgcggggaggctgagagcctcgaacgcgaatcctgaggcgtacgaggtgagcacggtttcatccttcacaagactgatttcgacaatctcggggcgggactccatcaggcgtctggcaagcccctgggcacgggtggataggcgccagttcgggtggtgaaaaatgctgaaggagtatcgggaaaccgcttcgctcgtcgtcgacagacgggcgtcaacagtttccgcgagcagctccgcggactgagcaatatcattccgctcatttgtgcggtagatatgcgagatatagagagcggaaataacgaaaaccgaaagaatcacggcgagcgcgatccatgtcgcgtagaagccgaaattgcccggcgagatttcttccgtgcgtgaaagcccctgaaataggctctcatcttttcgcgttgcgaggactttcatctgttcatccgggatttcaggtccgcccgatttccctgtctccttatgcctgcgtcggcactcagcgccgccgcgccttccgtgctggatatcgctttaatgcgggttcgcctaaaagtttaaggccttgactattaaaatgagaaccagcaatacatcccccaacaaaaaagcgatatttcctatgaatcagaatgagctgaagaaggcagccgcggagcgcgcggtgtcttttgttcaggaaggccgggttctcggcgttggtacaggttctaccgttgatttctttatcgacgcgctggccgcctccggcaagaaggttccggcctgtgtttcgagctcggtccgttcgaccgaacatctggaacgcctcggtttcaaggtgctcgatccgaatgaagtggatgagatcgaggtctatgtggacggtgccgatgagatcgattccggcttccacatggtgaagggcggcggcggagcgctgacgcgggaaaagattcttgcttctctcgctcgcacttacgtctgcattgccgatgaaagcaagctcgtgccggtgttcggcagattcccgctgccggttgaagtgatcccgatggcagtgggtgttgtgagccgtcagctgaaggcgctcggcggtgaaccaaagctccgtgacttcacgacggataacggctgcaagattctggatgtttccggtctgcagatcacggatcccgtggcgcttgaggaaaagatcaatcagatccccggtgttgtgacggtcggtcttttcgcgcggcggggcgctgatgtgctgctgctcgccacggcggacggcgtgaaggaaagcgccgcgctctgattaatgccggattccgcggaccggtaacagaaaaggcggaggcatattgcttccgccttttctctgcgggatcaatccgtcttactttgcctcggtcggaggcacgtagttcggcacagcttcagtgccgacgccatcgccgaagaagtacttgtcgcactggttcagcaggtgcttgcggacgttgggatccgacagattgagctggtactcatttaccatcatggtctggagctgctgccagctctgccaggcttctttggaaacattcagccagatcttctttccgagttcgccgggaatcggggggaagtcaagtccttcgagttccttgccgagtttgatgcatttcaccatgcgtgccatgagttgggatccttttcgttaggtgcggcagaaccgtgaggccttcctcaacgctgccggcagacactttactctttttgttctgttcttcccggccgggtaccggggctgagccggcagaggcagagaagtgactcctataattttgacatactccgaattaacgcttaaggctttctgagccacctatttatgaaactggaaaacacgggaaaaagtctgtcggatctcgcctctctccttacggaaagaagtagcagcggcaaggaaaaggagaatgaagcaggaaaggcagatttcgatccgctgcatccattcaaagcaaagaaaaagcgttcggccgctgtccctgccggcgctaagcctttcttcccgaaggaaggcgcgtcaggctttggcgccctggccggactcagagcggaacctgagaccgccgcaccttcggtctcccgtaagactgagaagaaagcttcttccctctataagacaccggcgtcccgtcccgcggtgaaaaccgcccgtacggagccggtgaaaccggtatctcccgcagctcgcgaagtgaaaccgaatcgcccggaaggcccccggcttcagacggcgccggccgcacggaagccgtccgttccgcgtccggatcagaccgttcggacagaacagtctccggcaccgattcagaaagaagagccgagagaaggcatccggttcccgaaattaaagaacgctcagggaaagtctcagacggcgtcccagaagaaagaagccgggaagccgtcccatccggagccgaagcaggactcgcatcccaaaaaaccgaagcagcatcaccgccatgccgatcggaggacggatgccgccaggcccgttcagatgccggtccggaatccggtgccgccttttgagctgatggaggggctcccggtttccgcgagggctgacgaaatcatcaaagcaatccgggagaatcaggtggtgatcgtggccggcgaaaccggttcaggaaaaaccacgcagctcccgaaactctgcatgatggcgggccgcggcacagcggggcttatcggacacacgcagccgcgtcgtatcgcggcaagctctgttgcgaagcgcattgcggaagaactgcacacggagctcggtacggttgtgggctacaaggtccgattctctgaccatacgacatccggcatcacggtgaaactgatgacggacggtattctcctcgctgagacacagaccgatccgcagctccgggcttacgacacgctgatcattgacgaagcccacgagcgttcaatcaatattgacttcctgctcggctatctgaagcggcttctcgcgaagcgccgcgatctgaaggtgatcatcacttcagccacgattgatacggagcggttcgcgaagcatttcgggcgcgacgaggatcatcccgcgccgatcatccaggtctccggccgtacgtacccggttgaagtccggtaccgcgcgattgaggatgatgattcaaacgacgacaagacgctcatgggggcgatttctgacgctgtggatgagctcgaaatggcaggccgcggcgacattctcgtcttcctgccgggtgagcgggaaatccgtgaggctgcggagacgctgaggaaaaatgatccccagaaccgcgtcgacatcctcccgctttacgcgaggcttccggcagagcagcaggagcgggtgtttaagagcggcgggaaacgccgtatcgttctcgcgaccaatgtggcggaaacctcgatcacggtgcccggaatccgctatgtggttgacaccgggcttgcccgcgtgaagcgttactcctaccgcaataaggtggagcagcttctgattgaaccgatttcccaggcggcggccaatcagcgaagcggccgatgcggccgtgtggcggacggtatctgcatccggctttacagcgaaacggattttgcccgccggccagcctataccgatccggaaatcatgcgaagcaacctcgcagcggtcattctgcgcatgaagtccctcggtctcggcgatgtgaaggattttccctttgtgcaggcgccgcctgcccgcgcgatttcggatggctacgcgattctctccgaactgaactgcgtggatgaccggggaggtctcacgaagatcgggcgcacgctgtcccagcttccggtggatccgaagctctcccggatgctgctcgcggcaagcgaaaatgacgccctcgctgaggtgctcattatcgcggccgggctttctgttcaggatccgcgtgagcgtccgccggaacaggctgccgcggctgacgaagcccacaggaaactctcagacgcgaagagtgacttcctctcctacgtgaagctctggaactatgttgagaaagcgtatcgggataaggagtcgaaccgcaggttccaggatcagatgaagcgtcagttcctgtcgccccgacggcttcacgagtggcatgatgtcgtgaatcagctgctcgatatggtgaaggggctggggtggcgcatcaacaccgcgcccgcaacctttgagcaggtgcactgctcgctcctcaccgggcttctcggctctgtcggtatgagacgggttgacgctgacttccgtgcgccgccttatatgggcgcccgcgggatccggttctggatatggcctgggtctccccgtgcgaagaagtgcggtccctggattgtggccgcggaaatcgtggagacatcccggctttttgcccgctgtgtcgcggatgtgacgcctgagtggattgagcggatcggcgctcaccttatcaagaagagctggactgaaccgcattgggaaaagaagcgcggtgaagtggtagcgcttgaaaagggcaccttatacggacttcccgtttacggaagccgcaccgtgtcctatgcgaagcatgacccgaaactgtcccgcgagatctttatccgcgaagctctggtagagggagagtttgaatctcaggcgccgttcttccagcataatcagacgctgattcatgaaatccgcgatctcgagcagaagagccgccggcctgacgtgctggtggatgatgaggacatcttcgctttctatgacgagaagctcggggatgaagtgtgtgacgcggcgtcgcttgaagcgtggagaaaggaagcggaggctgacaacccgaagcttctctggctcagccgcgatgatctgatgcgccacagtgctcagggcatcacgcttgatatgtatccgaagaccattacgatggccggcatatcaatggcgctgaattactacttcgatcccggcagcccgagagacggtgtcacgctcgttgtgccgcttttcgcgctgaatcaggtggatgagaggcgctgcgagtggctcgttcccggcatgctgaaggagaagatccgggcactcgtgaagagccttccgccgagacttcgccgcaactgcattccgattccggagtacgccgagggattcttcgaacgttacgggatcggtgaggtgccggaggaacatctgcttgacgttctgatccgggatctccgggaggaaaagagcacgatctgcgagcagcgcgactttaagcttgagcagctcgcgcctcatctcttcatgaattacaaagtgatcgatgagcacggcagacagcttgatatggaccgcagcctcgcaaagctccgctccaatctcggcgccaaggcgcgcgaaaccttccagggcctcgcggaccatgatgccaaggtggtggatgagcttgaggactccattacgacctggtcctttgatgaactgcctgaactgatggaaattcaccgaaaaggacagaccctgatcggtatccccgctctggtggatcatggtgacacggtttcgctcgaggtatttgatgatcctcagaaagcggcttccgttcatcgggtcggtctcaggcgtctcttcaggattcagctgcgggagcaggtccggtttattgataagaatctccgcagtctgcagagcgctctgatgcagagcgccgcggtgcctcagatttcaagaagcttcgataactttgaggatctgaagacgcaggtgattgatggtgccctcgagcgcaccgctctcgcggatcctctgccgaagaaccgccaggatttctacagccggctcgaggatacgaagggacgtctctcactcgtcgcgcaggatctggcacggacttttgaggatctgatgcgggaagcggtgaggattccgaagcttctgaatggctataagggacaaaaggaactgcgggaagatgtcgaggagcagctcggacagcttttcccgaaacacttcctggtgacggtacccgcgaaggcgttttcaaactacccgcgctatgtcgcggccattgtgatgcggctggagaaattcagggattcgcccgcccgggatgcggagaaaacttctgagattcatcagcttgaggttccttatttccggcgggtggctgaactccgcggacagaaggagccccggcttgaagagttcttctggcagctgcaggagcttcgtgtttcgcttttcgcacagcagctgcgaacaccgatcccggtttcggttaaacggttacaaaaaatttggaattcaattaaatattgagtttcctccgcaaatgcttgattcggaataactttaaaatttaatttagttacattttcatctatgtgattttatttgcatgcgttcgcactaattgcaaggggtgtcaatcccatgtaccatcaaaaggcgaggtatgcgtcctacgctaggctggataagcctttggcggcatatcgttattctgatcaagtagtttgtatcctgaaacagaggctcctatgtcctttgccctgaaaaaaatcgtttttagcgtgacgatggcctgttttgtcctggcaggacaaggcgtggcttccgcaaaaacagccgccaaagatcctgtggcgcatgcaatagcgaaggcgaagggtaaaaaggtacagaaaccggctgccaagaagaaagtggcatccaaggccaaagcaacgggacgccgcgtcgccagtgcggggcgtgttcaccggcagcttgcgccatccggggttgtgaaagcctcgatcccgcatcaggccgccccggtagtcattcccgaagatcagaaactcgctcagcagcttcgtcaggccccttctcctgccaacctgaatctcacggcggccagcgccttcatgttcaatcaggataacggccgggttcttttcgaaaagaacgccgatgcgcagcttcctgtcgcgtcgctcacgaagctgatgtccgctctggtcatcatgcgtgcgaatctgccgatgaatgaggccttcacggttcagagcgaggattatcatctgccgtcctcctctttctcgcgtctccgtatcggaatgactttcacgcgggacgacctgcttcacatcggtctcaccggttctgacaaccgcgctattcatctgctggcccgctcgtatccgggcgggattccggctttcgttcagaagatgaatgaaaccgcgcgtgaactgggactgaagcacacgcactttgaagagccgacagggctgtccgccaataaccgcacgacggcacgtgaaattacgcgtatcgcggctgaggcctatcgttatccgaagatccgcgagtattccacctctcagcagctgcagtactccacccgcggcggtctgattcaggttcgttcgacgaaccgtctgatccgtgagggtgcctgggatatcggtatgcagaagaccggatacaccggtgccgcgggccactgcatgatgctgcagactgaggtcggcggcaaccgtgtcctgatggtggttctgaattcgaccagcaacaataaccgcatcatcgatatgaagcgtatgcgtgactggtatgagcgccagctgggtgtcaaggaaggatcggccaagcttccctataacctcatgtaacgctttttctgaagtcataaaaaaaccgcctgaaggcggttttttatgggtggagggaagatcaggcgaggtgttctgccacaacttcggcgatgtccttcacctgaatcgtctcatccttctcttttgccttggcagactccatcatcgagaggcagaaggggcaggcggtcgcaagctgcttcgcgccggtgtccttcagctcattgaagcggatcacgttgacacgctgggtcttgctgccatccgaccagaactggccgccgccggcgccgcagcagttggtgttctccttgcagaactgcggctcacgcatgtccgtcttcatcgaggcgagaatctcgcggggttcagacgagagaccgttatagcggctgagatagcagggatcctggtaagtcgtcgcgatatcgttttcgctcagattcggaagtttcccatcacggatgagattccggatcagctcaacgtgagaaatcacttcgaatttgccgccttcaaattccggatattcattttccagagtattgaagcagtgcgggcaggcgcaaagaatcttgccgaacttgtactgggaaagattggcgatattttcagcggccgcagtctggaagaggtactcctcaccgagacggcgggcgaaatccgcgtggcaccgctcctcggccatgacaccaaagctcagaccggaggctttcaggatctttaccatcgaacgggcaatcttctgggaccgcttatcaaaggaagccgagcagccgacccagtagagaatatcgacaggacgatccggatccatgatcgggagatcaagaccctcggcccagtcgagccgtgaatccggatccatcccccacggattgccgaccgaggcgatgttctgcagcgtcttcgcgacgccgggcgggaacttgccttcctcaagcgcatagtgggtacgcatcttcacgatggcatccggaagattgatgcgggaaggacaggcattggtgcaggcgccgcaggtggtgcacgcccagagttcgtcctcggaaataaatttttccgtcggttcgttttcaccgccgttcgcaaacgcgtgctgaagcttcagcacgacgttcttcggatcaagcggggttcccattttgactgccgggcagacagcggagcagcgggcgcactctgtgcaggaagcaaaatccagacggtctttccaggtgaactgcttcatctgggaaataccgaaagtttcctgctcttcaatgttgtcaatcttcggggcggcacccatcggttcgagcttctgctcaaagatgttccagggggtcttgaacatatgagagaagaagttaagcgggatcgacgcaatgaaagagagggagccaatgccgtgaatccaccagaggatcagatgagcggtttccagcttttcggcagagacaccggagaagagcgtggtagcgatgaagttgcccacaaaggaccagccagcccatgccggtttctgagcggcaagacggagagcctcgaggaagaagcccgtaatgatgatgagggcgagagacccgatcagcattgcgaaacggggagaggcttcaagtgacacactctttttgatccagcgggaccaggcggcgacaccgagaccggcgagagtcgcgagaccagcaaagtcgaggatcagcttatagaagaggtaaaagtccccctgaaggatccggaagccgaaaagcagacgggtgatatcccagtcaatcgtggcgagcgatgtaccgaagaaaaggaagatgaatccccagaaaagcgcgaaatgcgcttttccgacaggtgtgcgaacgatccgtttctgcacaaagccttcggtccacagtctgcgcatccgttccggaacatcttttttcagctgcgcggcggcacctgagcggatgaatttcaccgctttgacgattccccaggcacagagcagaacagacagtatgccgagaacataaatcagaacctgtccggagacaggcacgttccaaaatgtcggacgagaaggtattggggtcatggaatttaaatcctgagcaggctgcggccttttgggttggacaggaaggaaaagaccggccgggctgcgggtatcggcttcagagggtctgcatgccgagattgttttaacgggatcaaataataaaacaggggttcatgtttgccaatttgacggaacccaatagcattaccgcaagcacggggctatataaaaagctctgccccttaattggcaggggcagagcctttgatcggatgactgccgggctcaggctttgcggctgtggcgccagtcagcgatcgcttcggcagcggaagcgataagagcgggaccggagtaaataaagcccgtgtacagctgaacaaggcttgctccggcttccatcttggccacggcatcctcaggtgtcatgacgccgcctgacgcgataatcggcagtgttcccttcaggtgatcggaaaggacccgtacgaccgcagttgagcgttcaaagagcgggcgtccggagagaccgccgacctgatcggcattcggaagacctttgatgttgtcccgggcgagcgtggtgttggtggctgtgacagcatccatcccgtactccacgaactgatcagctgcgcggcggatagcgtcgtcatccagatccgggctgatctttacggtaatcggaacgaggcgtccggtgcggtccgcgagttcctttctcttatcagcgatccccttcagcagaggtccgagctcgtcctctccctgcagtttcgtgagttccggcgtattcgggcaggaaatgtcgattgccaggtaatccgcaagcggatagagcttatccatgcactcctggtagtcagcgagagcgccggaaagcggtgaggaattctgtttgccgatattgatacccaggatgccgccccgaagccggaaggcatccgcactcttcaggtttttaatggcctgatcggcgccgcagttattgaatcccatgtgattgatcacgcctttggcggggatgacacgccagcagcggggcttgggatttccagcctggggacggggcgtgattgttccgacctcaatatgaccgaaacccatgcctccgagagagctcacatgggagccggttttatccatgccggcggcaagcccgatggcgttagggaagcgcagtcccatgacggtgacgggatcatcctttgggatgtgggtcaccagtttgatcagtccgaaaggcacggcccagtcaatgttattcatgatcaccgcgtgggcggtttcaggggacaggcggaaaagaactgatcgagcgaggtcgtagagcatagggtaatttttatcggatcaaaaaagtcagctttattttagatacttacggacaaggttgttctcggacaggcggcaagttcacgggatcgatcgcgtgattcacggatttcatcctcgcagtcctcgagcagctgccaccggctgtcccagaacacctggaagggtttgaagagtcgcttatagtccatctgaggcaattcgtagagccagtagccgagatacaggtactgatgagcaccgcgggcacgggcaagaccgatctgcttcaggattgaaaaggtaccgaggctgcgggcagggtagtcgggggaaaagaatgtgtagaccgcggagacgccatgggtaaacagatcgacaatggcgagtgaaacgagttcacgtcccaggcgggtttcaagaagaatggtattcacattggtttcgaagagggcttccctgaattcaccgtagctgtattccgtcatcatggaaccgacatgccgggatgcttcatacctctgataaaggtcgtagtactcggaggtcggtttagggtcccgaatagggatcagcgtgagatcactgtttcgcttcaacagcttcctcatggtacggttcggacggaattcatcggcgggaacccggctggaaatgcagtcacggcactgaggacagcaggttttataaatgatcgtgccctgtcggcggcagccatggagagcaagatggttatagagctctgaggacgtgcaggatacggggtgctcaatcgccatcatcatgtctcttgagtcttcgtaataagagcaggggttcggcggggtcgtgtactccttgaaaatgatccgcttgatatgttcgtcagccatgtgtcccgaccagtgttggagaagttaaggttttctgaggatgatgtgatgcgtcctgaagagtcctgtacgcctgtcatcgaagaagaaacgcagcgtacgggtgatcgtcgggaaggcaatctgatcccaggggatatcttcttctttaaagaggcggcattcaagagattcaggtcccggggcaaaatccggtgaattcagatcagagagatagaagaaatgaatctggtccgcgaaaggaacatctattacggtaaacagcatccggggcagtaccctggcgcaagcttcttcctcagtttcacggatggcgccatcaaaagaggattcattgctttccagataccctcccgggagagtccagtaatttctccgtggttcgatggctctcagacacagaagcaccttatcctcccagacgggaatggttccgcatacaggaaggggattcacataatgaatatggccgcacctggggcaaactgcccggaggcggttttctccctcaggaatggcttcgataagaggatttccgcacattgcgcagaaatggggaatacgggattgagctgtcataaaaatattcgacctgattttttcttgacaattcgattagcatatgtataatgatacctgtttgatgcatttggttaccgcggggtggagcagctcggtagctcgtcgggctcataacccgaaggtcgtaggttcaaatcctgcccccgcaaccagtagcagataaccgctcagggttaagagcggtttttttattctcctaaaaatcctcaaaactgagggcttgacaagagaataaaaattcgtaaaataccaatctcgctgttcaacagcgacgttctttaaaaacacaataacgaaccgataagcgtgggcatctgattttgatcgagtttcaactcataaaaaatcaggtgcttgaaaagacgaatggaatgatgcagaagtgaataacttctgaaaaatt

SEQ ID NO: 1286 - DNA, 469 bp, Unknown
  gut microbiota DNA sequence
gaaggtggatcgtaaggtctgctggaggtatcagaagtgcgaatgctgacatgagtaacgataaagcgggtgaaaagcccgctcgccgcaaacccaaggtttcctgctctacgttaatcggagcagggtgagtcggttcctaaggccaggctgagaagcgtagctgatggaaatcaggttaatattcctgaaccggcgttgaatgcgatggggtgacggagcagccagagtggaccgggtgttggatgtcccggcttccgagcgatgggtgcctgcaggcaaatccgcaggcgtatacccaggacgaaggatcgggccttcttttgaaggcgaagccactggaagcgcttccaggaaaaacctctaagcttcagttcaacggcgaccgtaccgtaaaccgacacaggtgggtgagctgaatatgctcaggcgcttgagagaactcgggagaaggaactcggcaaattga

SEQ ID NO: 1287 - DNA, 20662 bp, Unknown
  gut microbiota DNA sequence
atgatcccagattgggctgaaaaataaccgaaactatcgactacgtatttttccagcccaatttagataataagtgcacttactggtcccttacggggcatggagcagagctggcgagactgaaatccttcagagcattcgagaagcttttcttttcgggactcccggtcctttatccctgttgctgcccgggatcacatttatttcgctttgaggaggggaccagttatcatcccaatacttcccctcggttttggacagcagcagtttgctgtcatttggttctacaggcagtgagacaggggagtcatcctgtattgatttataaggggatttttttactgtcgtgatttatcccctataaccctctctgaaagcccgcccggagaggaaccgacgctgaaatcttctgaggacagggacactcttttctgcgataatttcgctaatctcagtaaggtttttcgttaagcggttccggcaatcatgacaatacagaataaagagcagaacgagcagattatcgcggtactgaattaccttaaaaatctgcagtcactgctggcgaagaagaacctcaatatcaagggcgactccgagaactgcaaaaaattcgaagacttccggccgatcgataaaaccatgaccgtctgggatctcaaaaatcccgatgacgatgtcattctgagcgttgaataccgtacgcgtccgaggaaaccggcggttcctgagactatcaaagactgggttacctcggccggagaaaaccgaaagtcgcttgaaaatggcgatggcacgtcagaggttctcgagtggggcgacgatccaaaacgtcaggccacgtatgacgcctggctgaaagcggttgcggcctggcgggaagaagtccagcgtgtgaaggaaattcagaagtatttccataccgctcaggcgatttattccgcggtcgaaggatccggctatcagaaggaactggtgcttggcaccatgatttttgaaaactccacggacaccgattcaaaaaccaaaatctgctatccgctcctcacccgccggctttccatgtcgatggaggtgagtgtccggaataatccggtgattaccttcacgctggatgatgaatctccggcagtttttgagagtcttcctattctgaaagcggaatccgatcgctcaccccgggcacttcaggaattccgaaagaactttgtgggtgacgatgtcaatccgctcgacaccgtctcggttggcgttgatgagcagttcaaggcgcttcccgctcacctgggtgtccagtgccgctgggcggatgacccgaatagtctcccctttgatgaagacacggaattctgtgtctataagaaagcctatctcatcgtccgggataagaacaccgacctccgcgaggagattgatgactatatcgactctttgaaggaaggccgcggcgagcctccgacccacgtccgcgacattatctgcggtgtggagaaaaaggaacgcgcggaagagagtctcccgccggacgaagcgctggatcggaagcttgcggagaccgcgggcgaagaccagcggattctgcttgtgaagcccgcgaacttcgagcagcttgagatcgcgcgcgagatccgccaggactctgcggttgtggtccaggggccccccggcactggtaaaacgcacaccattgtgaatctcctcagcaacttcctcgccgagggtaaacgcgttctcgtgaccagcgcctcatcccacgccctgactgtgctgaaagaaaaaatgccggcgtcccttcagccgctctgcatcacgatgattgaggataagcgcgatctggagaagacctcgacatcgcttgtcaccaaactgaccgagctgaaggagtccacgctcaagaggcgcatcaccgaagctgaagaagaccgggtggagattcttaataagctccgccagtcacgccgcgcgctctatgaagcgcttgaagctgaaaagtgcaagtattccgaccatccgatcgcttataacaacgaagagtacaaactggacgaacttgcccagtggctgcacgagaacgatgacaccgcggacattattcctggtccggtttccggcaatgtggttccgctgaccgcggatgaaatgaagcggctctattcgacaaacggccgctggaccgcagatcagatcaagtactttaagtctgaccgtctggcagcggtggattttccgaaacctgaagagctttctttccagtttgatcgcgagaaagaaacccgtaaggaactggatggctacgggatcgaggagcagaaaacttttgtttccggcgtcgttacgcgctccttcaagcgccctgaagagaatgacttctacctccggttccccgaagaccgtagcagcgacttcctctcgtttggcgaaaaaattgatcctgagctgcttcgggaaatcgcgggggatcccttcctgatccagctgatcacgatcggccgtacggaaaattccacgaaggaacgctttaagactctggcctccaagatccgggattcgctgaaccttctcgaagtggttcggaaggatcttgatcacacggtttcgatcccggacgggatgagtgaccaagaaatcaaaaattcgatcggctgggtagagacgaactgtccaacgggcgaactgaccgtcaagcagaaaatcagggccaagtttttaaacgataagccgtggtccacgcttgaaaagatccggatcgcccggaacaacgcgaatccgtttgacgccgaaacgcggcgcttgatccagcgtgagcttcaggtacgggagaaccgtgacaatctgaagttcctctggaatgagatcaccgaggggctcaaagtgcccgagggtcggtttgatttttcaaaaaatgacccgaaagagctgcagacgctttatgacggcatcacgaaaagcctcgagtggtggaaagaaatctatgagccgttcttcagtcaggtgactgaaaggaagttcacaacccgcctaacaccgagaaccgaaaccgaggaagcgctgaagatcattctggaggacattgttcccacagtggcgttcatgaaggagcagcaggtcttcgattccgtgcatcagggtatccgggatattgagaaacggtttgaaccggaacagcagctgacagtggggcagaagttcctttccgctatccggaaccgggatgtcagcgcgttccgagacgctttggagtttaaagagaaggaggacgccgagtacaaggtctactcggatcgcgaacgtcttctccaaaagcttgccatgagcgcccagacctgggccgcccagatccggacggaggccagcaccgtacctccggaacactatgagacgagctggaaatggaagcggctgaatgagatctatacgaagatcgtctcggcgaacgtttccgctctgatcgacgaaacccgtcagggctccagagacctgagaaaaaacacgactgagctcgttgaagcgaaggcctggaattatctcaagcagacccttgagaattcgcgggaaatgcagtcgctccgcaccgtggccgtttgctataagcagcttgggaagggaacggggaagagcaaaaaggccgcggaagcccgccgcacgatccgtgctctgatgccggactgccagaaagcgattccggtctggatcatgccgattgatgacgcactcgcgagtttccacctgaagcagagtttcgactgcctcatcattgacgaagcgagtcaggctgacatttcgaagctcccgattcttcttaccgcgaagaaagcgatcatcgtgggcgacgataaacaggtgagcccgatttcgttcgcgaagacggaccagattcttgccctgaagaaagagcagctcggcggcaaagtgccccgcgactctctctatatgccgggaatctcgctttacgatatctgccagacggcgtttaaagtcatcatgctgcgggagcatttccgctgtgttccggacattattggattctcaaatcagctgagctacgacggtcagatcaagccgcttcgggatgccgcctctacgaacctgcttcccgctcttgttgactaccgcgtgccaggactccgtgaccataacctgaataagcttgaagcccacaccgcgatccggattatccgggcctgcctgacgcagcccgagtatcaggacaagactttcggcattatcccgatgctgagcgccggggatgaccaggtgacgctcatcaatcagctgatttcctctgatattccagcaaaggaagtgaagaagcataagatccactgcggtctctcaaaagacttccagggcgacgaacgagatgtgatcattctttccctcattgacagtgtgacggatgaaaagcaggtgatgctccgcacgctcggtgagggtaaagacgacatgatgaaaaagcgctacaacgtcgctgtgagccgagcgaaggatcagctttgggttgtgcactccattgactggaggaagcagctcaccgagcgcgatctccgatggaagctgctttcctatatgaatggcgtcaacacgcgcacccgttccgatcaggaaattgagcgggattcagactctgtctttgaaaaccgggtcgcgaaacacctccgctcgaaggggtacgaattcacgcagcagtatccggtcggcgcatatcggatcgacattgtcgtggcgttcaatgggaagaagatcgcgttggagtgcgatggcgaggaattccactcacgcccggaagatgtcatgaatgatatgagccggcagagcgtgctcgaacgaaacggctggcgtttcatccggctgcgcggcagtgagttcttccggaatgaagaaaaggccatggagcgggtctatcgggaacttgccggctttggaatttacccgaaggacgagaaggagaaagcggtcaaaaatacgctcttcgcccgggtcaatgacaaaattgccgcgatccggaaggcggacgaagaggccagggaacgtgatcaggcttcagaaaccgaggacgacgcgatactggcggttgaggtggagaaaatcgctgatgctgctgaaaccgctaaaacagctgaaaccgccaaagctgcagaaaccgctgtggtcacaggagttacatccggcaatatgacggaaaaagaaggggaggcggttaaatccgagaatggtccgctttcctatcagacaccaggcgctgaggtgactattgaaaccgatcttctcggtgacccagtgaaacctgccgttcatcacgagcggcaagaggatgataagaatacccagctgagttttgggtttgccgaggatgatgatctgaacctcaggaaaaagccccagcactccgcaaggaaaacggcatccagccaccggcatgggaaagccgctaaggcggttccagccaaaaaggcaccgtcacccgtcaacatggcaaacgtccggaaggtcgatatcagcgatctggagaaccagctgaagggatatctggattaagacggaacctaaaaaaatcgcctcctttgatttctcaaaaggaggcaattttttcagggcgaagaaaccttattacttcttcgcggttttcttttctgctttcttttcagtggatttcgcgggagtgtcgtacacctcgaaagtgttggggtcttcctttgacacgttgataatcccggccagaacctgcttggtgatctcttcatcgagagggaaggacacgttattccttccgaacatccactcgtcgcccttcttatagagcgagttgatggagatcttgtcgtgcccgttaacccgggttcccttaatcagaagggctaatttctctgatacttcaatgagatattgctcagccatgatcttcccttttctgtgagcgttttggcgttacatctaattgtactgacgccccagtgtgtttcaaaaaaagatcagtctgatatgatgaattgccttttttgacgcagatcgaattataaaaacctgtgagggattgcgtttctccctttctctggggaagggggatcgggattttccccttaaaccatcagaagtacctccgccactaaccaactgtaaccgtgacaaatgtcatagcaatgacgtttttttaggcaaaaaacgagaacttttttagatctgtgtcaacccttaaacgaaccttaaagttctctttttcagaatcacgcaaattgcattaaagccaattacggcgggaaacattccgacaatatcgtggtcttgcaaagttaaaaaatacttgatatagtgttcctcatcaacaacgaaataacagtcattctcattcgtatctgtgcatgacggttatttgtcaaacaatatatgaggaattaaccatgtctcttaatggaaagaaagtcggcgaatttgctctgaaggcttacaagaacggtgagtttatcgatgtgaccgataaggacctgcagggtaagtggagcgtcctcttcttctatccggctgacttcacctttgtctgcccgaccgaactcgaggatctgcagaacaagtacgctgaattccagaagatcggcgctgagatctactccgtttcgtgtgacacgcacttcgttcacaaggcctggcacgaatcctccgagcgtatcggcaaggttcagtacccgatgatcggtgacccgaccggccgtctcgcgaaggaactcgatgtctacattgaggacgcgggtcaggctgaacgcggcaccttcgtgatcaatccggaaggcgaagtggtgctttacgaagtgagcgccggcaacatcggccgcaacgctgatgaactcttccgcaaggtccaggccgctcagttcgtgcacgagcacggtgacgaggtctgcccggccaagtggcagccgggtgaaaagaccctcaagccctctttcgacctggtcggcaagctttaatggggatatggcatcttggcagaaattaaaacctacgatgccatagtagtcggcggaggtcctgcaggactctccgccgctatttatttggcacgtgctcgtttccgcgttcttgtccttgaaaaggaaaagatcggcggtcagatcaccatcacggcagaggtcgtgaattatcccggcatcgtgaagacgaacggggagaagctcacctgtgacatgacacgccaggctcagaatttcggcgcggaattcctcgcggctgaagtgacggggcttgagcttgagggtgactggaagatcgtacacacgaaccgcggcgactttaagacgctcggcgtggtgtacgcggccggggctcatccgagactcgccgggtttaccggcgaatccgaattccggggccacggtgtcgcctactgcgcgacctgcgacggtgaattctttaccgaccgcacgatcttcgtgatcggcggcggatacgcttcggtggaggaggggctcttcctcacgaagtacggtaagaaaatcatcatggtggtccgccgtgacgacttctcgatcaactccgccgcggttgaggagctgaaggagaatccgaaggtcgagctgcacttcaatacggaagtcgctcgggttgaaggcgacagcgctgtccgacgggtggtgctgaaggatcggaagacgggagaagaaaccgtttacgagtccggtccggatgacttctacggcgtcttcgtgttcgtgggctatacgcctgagaatgaactgatcaaaggccaggtggaactgaacccgcaggggtatgtgatcgccgaccggaatcagaagacgaatattgacggcgtctacgcggcgggtgacatctgcgtgaaggaacttcgccaggtggtgaccgcggtgtcagacggcgcagtcgctgcgacgtcgctcgagaagtatctcggaagccagtaccggaagcttcagctgaagcggacgtacgtgaagaagcttgaaccgaaggaagagccgaagcctgaagccgcacccgcggcggacgacaattcgttcctcgacgcggatacccgcgcggcgctcgctccggtgctcggccgcttcacgaatccgattacgctgaggctctacgacgatcactcggatctcgcgcgtgaagacgcggagatgatcaaggaacttgccggtctctctgacaaggtctcctacgaagtggtcgactcggttccgggtaaggaacacacgatcgcgattctgaacgataagaaggaagagacggggctccgcttccacggggtgcctggcggtcacgaattcaattcgttcatcctcgcgatgtataacgtcgcgggtccggggcaggacgtgggtgaggcgctgcagaagcggatcgactcgatcgacacgccgaaagcgctcacgatcgccgtgtcgctctcctgcacgatgtgtccggatctcgttgccgcggctgaacggatcgcggccgataacccgaatgtgacggtcgatgtctatgacctcgcgcactatccggagcttcagaagaagtggaacatcatgagcgttccgtgcctcatcgtgaacgataaggacgtccacttcgggaagaagggggtcgaagagatcctcgacatgctgaagtaacctttctagcttgccccacgaaccgcttgtcttttgggcttctaaacccaggaggcaggcggtttttcttttgcccgaaatgaagaatccctccagcggggaagtgctggagggagtcggaatcagtcgttcgcttcctgcttatagctttccgaattctgaatgatgcggttcgcgagatccatcgcttcattcatcttgtcgttcggcgtgaagctgcggtcaagtgactcgatcagtttctcggattctttccgggtctgtaccaccgattcctcgcgggagacttcagagcgtttcgcgagtttctccgcttcccggagcgccgcgacccggataaaaccggcgagcgatacaccgcttttttcagccgcgtcccgcagcagatgctgctctccggaactgaggcatatattgaattcaccagaagcattagcagacatagatttctccaatatgaggtgttgcgccggagaggaaatcagttttttatctttatttcgtctgttcttagtgcgcgttattcattttacggctaagcggtgcttttttccctactttgttgaaattatttctgccagcattcatgggaaatgaaatcgattttgagaatcagatacatcgattgtttttactgaccttttgccggcagactgatggagtgccgggtgtccgtgtcggtttcactgccaactgaaactcactttctcacgtacaccgaattgaaaaccagactcgcgaggccccggtacttccgggcggcctcttctgtcgttttcagatcctcagatccgatcgtgaactgcacattcacgaccttgttatccacgaggaagagcaggtagtcgatatggagatagaggacctttccgagccgctcggccttcacggtcgcgtccgcgagaagcgcggggtaagagtcgagcatcgtggctctcgcgttctcggttttcacgatctcaccgaccgcgggaaagaaagttatccagaaatcaggcgacttcaccacctcttttaggaccggcagtgtccagttttcctttaaggcgggatcgggattctcgtccgctccaatcgcggaaatcaaaacggttttttcatccgctttcatccactggcttacgacatgcggccggacggttttcggtttctgcacccaggagagcgggaaagaaatttcgatattgagtccctgggctttggggttacctttcgtcgaataggtttccttattcctcgcgaactcttcagacggattgtgggtgaaggagacatcggatagcgtccggaaaatccggtcagtctgttctgtcggctgatcaagcgtggatttaaaaagatcgagctgcttctccgcgaggtcctccgtccggaatttcacctccggcatcagttttccgatccgttcgttcgatttcgcgagcaccttgactccaaattccccaaagcatgcaaagtgttccctcaccgcggcttcggcccccgggaaacggtcccggaaacggcgctgaaagcgaagaacatccggcgcgagagcggggtaggaatgagcgatttcagtgaacgcggtcttctgatactccacgtagccataggcttcggcgagattccggatatcggcttctccgagaccgtgagcggacgccgctccgctaaacgatgcgaagatcaaggaggcgagaagcagggcggcggttttcatggtgagggtctcaaagatgcagcgcgttacggaattattcattgattctgatcgcattgagactgaaactcaatggagctccggcagtctgaaaaccgcgaggcaagctctatccgtcctcagagttttagacgcacttcttgacgtcctccggactcccgtgagtagaattaccgcgaatccagatcacttcagagcagcaaagatttcctatggcacttcagaccgacaccccggcacttcctccgcttatccgcatcgtggacgataacgatacgctgcggcagtcacttgaattcatgcttcagtgcgaggggtatgaagtcgtgtcgtacgcgagcgccatggagtttctgaagtccgacaccccgagccgccctgggtgcctgattctcgatatccagatgccggagatgagcgggcttgatctctttgaccggctgaatcaccgggggtatgaagtcccggtgatcttcctcacggcgcacggcgacatcgatatggcggtgggcgcgatgcgggacggagcgtgtgacttccagacgaaaccgatcaacgtcgagaagttcctcccggcggtcgcgcgggcgctggaaaatgaccgcctgcggcgcgaaggcatcagccgcgatatccgggaagaggtgaagctcttccagagtctttcagaacgagaggaaaaaatctgccgcctcacgatccagggctttgtgagccgcgcgatcggggagcggcttgagatctcacaccgcacggtggagcactaccggggatcagcgcttaagaaactcggcctccattcatccgccgacctcgcgcagtttttcgctcgggtcgacgcgttcctcgccgcgaaccctgagcgatagagcgagttttatacgcctttcggcatagtctttctgactattttctgatttcgatgggggtcacctaggtagacccccgaaacacaatttctcctgagaagaggggattcggctgaccggatgtcctcaaaagaccaagaactcactcatggagagatatgtatgctgactcggagaaattggctgaaagccggtgtcgcggcagcggccgcgggaaccgcgagtgtcgcgcaggctgcgactggaaaagctgccccgtcccagaagtcaaacatcaataagacgctgccgtccgaaacctttgactgcgtcattctcggcgcgggcaccggaagccttgtcaccgcgatcgaggcctttgaccgcggactgaagcctgtggtgctagaaaaaatgtcctgggccgccgggaattccattttcgcgtccggcggtatcgccgcctggggcaccgaccttcagaaggctcaggggttcaacgaaacgaaagaagcgttccgcgctgacatgatgaaagtgtcgcagaaccgtgcggaccccgctctcgtcgatacctatgttgagaacatcggacccgatatcgagtggctgcagaagaagatcggcgtgaagttcgagaagatccgcaccctcccgtggccgcttcttcaccgcatgattccggtggatggccaggggttgaccggcggcagccgcctgatccggtatctgctcgccgcgtgcgacgcccgtaagatcccggtccgcttcaatacgaagggtctgaaactcatcactgataaccagtatcggatcgtgggcgttgagtgcctgacggacgacggtctcaagaactacatggcgcgtgacggtgtcgtgatcggcaccggcggcttctccgcgaaccgcgcgatgctctgccgctatatgggcggtccgctttcccgcctcgtgctgcgcggttctcagtatgtcacgggtgaaaacgtctcgatgacggagccgctcggcgcgatgctcgttcatacggatcagttccactgcggcccgatcgttgagaacacccacgcgaatccgaacttcgtgattgatgccggcacggggcttgatgtgaactgccagggccagcgcttcatggatgaagtgttcacgtacacgcagaagtcgatggcgactgccacaaagacggcggaaaacaaggcttatcacatcatcgacgcgaactggccgcgctccgaaatggcggcgaagaagttcctcggaatgaacagcgaagtgatcattgcgaacaccccggaagaactcgcgcggaagatgggcctgaagcctgaagtcttcacgaagcttttcgccgaatacaacaaggcgctcgcggacgggaagctgaaggacatgaatccgccgtgctccctcaaggatccgaagccccttaataagcccccgtactacgcgttcccgttccagggcggcattacggccacgttcggcggcccgaagatcaactcgaaggctcagattgtgagtaacgaaggcgtcccgttcaaggggctctacgcggtcggaaacgccgcgggcggtctcttcttcggaaactatatcggcggctcgcagcttggcgctgccactgtgttcggccgtattgccgcggctgatatggcttcaaagcataagaacgcttaaccgaaggggagataccgatatgaaaaacttaatcgttatgacgctcgccatgctgatcgcgggcaccgccgcggctgccggaacgactgaccacttcctcgcggatcgccacgtcgagcgcggcgtgaagtgtgagtcctgccacgtgaatggcgacacctcgaaaccggtccgcaaggcgcagtgcctcgcgtgccacaagtcttacgaggaactcgcgaagaagaccgcgaacgttcacccgaacccgcacttcaaccactacggggagcgcgactgcacgacgtgccacaagggtcaccagcagagcacgctttcctgcagccagtgccacaagttcaatctgaagacgccgtaaggcgggaagcaatacttccaatcttcctttgacttctcctcattcttgaggttcaccggaaatcctcccctttctctctccgagggtgatggatttccggtttttttcttatctatatagagaagagaagcagaatggccgaagagtggagggaagaaaacgaaagaatcaggaaatcgggtgcgacggagccggaatcgtcacggtgacagccagccccccggcttctctcgggttaaacgcgatcgagcccgagtggttctggatgatggtgcggacgatggcgagcccaagcccaaggccctcaggcttcgcgctcttcgtcgcgtacccgagactctcgagccgctcttttgtgaggacgtcaccggtgttctcaattgtgaggcggatcgattccccgtccgccgtttcaaagcggtcaagcaccacagagacccgcgcgtccgatcctcccttccggtccgcggcttcgagcgcgttcttgatgaggtttacgaccgcgacttcaatttcaaggcggtccccctcaatcaggcacccagggcggatatcagagtgaatcggggtccggtagcggctggagtcctcgagattcgcgacagagcgatttacgagctctgtgagatcaatcacggtccgggtgtccgaaccgctcgaccgcttcgcgtagtcccggactttggtcacaatctcgtccgccttcaaggcttcgcttcggatcgtggtgagacctttctgcatcatggcttcagaattcggccgatgcatgtcactgagtcttaagaggctctgcacataattcacgatcgttgcgagcggctgccggagctcatgaacgaccatggagctcatctgcccgatcatgccgtttttctgcagcgccgcgagatgctcgttcgcccggcgcgtcctttcctcaagttccttctgtttcgcgtacgccttcgtgagttcccgggttctccgttcgaccagccggtcactccggacggaatgaagaaggagcccgatcaccgcggcgataaagagcgtgagaaacggccagtattcggaaaggaaccgtctcagcgtccaatgccgcagatattcatacggcccgattttgagttccttgaagagggtgtcgactggcgtgaagtccgtcgccatcccccagtggaggttccccgggatcggtttcatcgagaggagggtggatgcggcaagccgcgcgacatccggggtcgcgtgaggcgtgatcgtcacggtccagttcgggtaaagcgccgtgctgcgaacgcagcggaagtctttggtttccggtttcgctccgacaaccgcgagatccgaaatgtccttgccttcggccgccatatcttcaaggaaacaggtgcggagcacaccgacatccgcctctcccttccggagcgccgtgacgactgacggcatatcgttcagtttcacgatctgatcggaaaagaaccggtccgggttgatgccctcccgcagcagctcccccatcgcgacctggtaccctgtgaaggctttcgggccgctcgtcacgagccttaggcctttgagatctttgaggctctggtacgtccggttcccttttcgaaccacaaagaccgatccttccgcgtgattcgggtccggaaagcgatccgaaacgagtgacccaatatcgcggcttccgacatccgccgcacgccggtacgtgccggccgaactcagcaccagatccgttttcttcgggttgatccgttcgccagaaaacacctcagcatagaagtgatcccgcccaaacgctttttgaaacgcccggacggtcggcatgatgatcgcgtcattctggtttggctgcgagaagtgcgagacctgcatccggaccatgtccggggcgtctttccgagccgcggtttcgggcgtcaatacccgcccgatcgggtacggctcatcaatttccgtagctcccgcggccggcgtgagaagcaggagagcgacgagccccgcgatcaggatgagactcacaggtttcagacggtacctcgcgcggcgcatgggaataaacggataaaggttcacggtgatgtctctaagtatagggaaggggactcgcggcagaaaataaaaaaacacgctcttcaccaggaatctgaggaagagcgtgaaaacgtcgtacgttcaaacgaagaccaaagagagaatcgccgctcccggatcgggaggatccaggagcgggtactgcaattaagctcaggcgttcttcgcctttgcctggttctgggcgcggagcatgttaagcgacgacccataacggaaccactcgatctggcgatcggtgtaggtgtggttcacctggacgcggtcctgagacccatccgcgtgactgaggatcacggtgaggggcttcccgggcttgaagtccttcatcccaaccaccgagatgcggtccttctcctgcaccttgttccagtcatccggattcgcgaaggtgagggcgaggatcccctgcttcttgaggttcgtctcgtgaattcgggcgaagctccgggcgatgatcacctggacattgaggtagcgaggctgcatggcagcctgttcgcgggacgacccttcaccgtagttttcgtccgccacgacgcaggagaactggttcgcggccttatagctcttcgcgaccgagctcaccttgtcgtacgttccggtcttctgattgaagacgtggtcgagtttcccgggctggaaggcgttatcggcgacagaaagcgtgttatccgaaatccgggagatgttcccgacgtagtgaatccatttgccggctggcgaaatgtggtccgtcgtgcacttacccttcactttgatgagaagcgggagcccctggatatccttcccgttccaggcggggaatgggtcgaggagccgcagacggtcgtagctcgggtcgatcttgatcacctttgtcttaaaggtcgccgtgtggcagcccgtgccggcacgggcaaagcccttcggcggaagctcatttccgtgcgggacttcgagcttcaccgcctttccgtccttccccgtcacggtatccgtcatcgggttgaaggaaagacggccgccgagcgcgtaagcgaccgcgatatcaggcgacacgaggaacgcttcagtgagcggattcccgtcgttacgcttccggaagttgcggttgaagccgtgaacaatcgtgttcttacgcttcgggttatttttgcggttccacatgccgacgcacgggccgcaggcgttcgcgagcaccgtgacaccgagcttctggaagacctgcgtgagaccgtcgcggtccatcgtggccttcacgaggttggagccaggagagaggaacatcgggcacttcacagaaatcccgtgatcgagcgcctgctgcgcgatggaggcggcgcgtgaaatgtcttcataagacgaattcgtgcaggaaccgatcagcaccgcttcaatcttgtcggagagccccttcttcttcacgttctccttcatttcggagaggttcatgtcagcgtccggtgaaaacggcccggatacctggggttcaagggtcgagaggtcgatcgtgatcacctggtcatagaatttcgaggggttctcgtagaccgccttatcggctctgaggtcgcccgcgatcttatttgccatcaggacgatctcttcgcggcccgtcttccggaggtaatccatcatgtgggagtcatagggaaaaaccgagctcgtcgcgccgagttccgcgcccatgttcgcgatcgtcgctttgccggtcgcggaaagagtgtcggtgcccggaccgaagtattcaataatggcgttcgtgccgcctttgacggagagaattccgaggagcttcaggatgacgtccttcggcgtggaccaccccttcagttccccggtgagcttcacgccgatcaccttcggcacggggagctcccattccacacccgacatgcagtccacggcgtccgcgccgccgataccgatcgcgatgccgccaagccccgagccattcggcgtgtgggagtcgcacccgacgatgaggcagcccggatacgcgtagttctccagcgtttcctgatgaataatgcccgcgcccggttcccagaagtcgataccgagcttatcactcacgtcgctcaggaacttgtaggtcacgcggttatcgtagtttgagaccttcagatccttgatcgcgccctcgctcgcgagcgtcaggtgatcgcagtggatggaggaggggagctgcaccttcgggaactccgcgacgaggaactgctgcatcgcggactgcgcggtgaggtcttccatcacgagctgatccggacggaaattcgcgaattcgtgtccgcgcttgaagtccctcgcatcctcgatgtgatagagatgcgtgtagaggatcttttcagaaagcgtgagcggacggttgaaccccttccgcacagcggcgagccgcgtcgggaaattcttatagaacgcgcggatgtgctcgatattcctgatcgggtgctggacgttgatgtccttcgtcgctgcggaagcgaccgcggacgctgcgccattcacactcaccgcggcggcggtaagacctgaggcttttaagaggctgcggcttgaaaccgaaacgggcatggtcaaaatctccttttttggttgtatgcgtactgagagaccgccgcgtttttctttgcggctctctatgtctctcgacgtagtaagtttggattagatctttgcctaggtagcccggtcacatgtcaaaaaaatgacacttgggtgacacataaatccgaagaacaggcccgtttctgcccctcggaaaaaggaaaagcccgcggaatcagcgggcttcggagattatttgtcagcggaaactaaccggatagaactgaggatctggtctctcagcatctggtacttgttacccgcccgcttcgctgcctcgggatcgcgtgacgccacataaaattccacatccacgtactgcgatccatcctgatagatcgctgaagtggtgtgcgtgtagaaaggcgtattgtctctcgcaaattttccgtcccactcgagaaggatcaccggtgtccgatcgaagatcacgaccttcgaagggcccttcttaacgagctcgctttcaagcggtccgaaccgcttcccgatttccggcgtcccttcgatggccttcaggttccggtaaataaaatcggcagggttgtactcatcgtcgacaggccgcctcgcgccgatcgagacgacgacgtcctcatcattcttcgtccagtagccaagatgccccggaaaactcgtcggcgtttcttcccaggaatccgggatcaggattcggaattttttctcacccgcggtattccgaagcggatatttgatttcgtgcgctgtccgatggaacgcgaactcttcttccgggtaggccgagaaggcggcatccgatagtgtccggcggacccggttttccttctcagtcggactcttggacaccaggctgtagtgcagcaccacggctttggcctggatcgcgtcccggaatcggagattcttgtccgacgctccgagcgtttccgcggtgagcttcgcgatatccgcccgactgagaccgaagtgtcccagatgcgtgatcagcgcgttttccgcgtccggatagatgagattccaggtgagacgcgaggtatcaaccacgcccagcaccccaacgtcgttcccgaattgcttctccgccgccgcgagcacctgctgccgctgatagacataggcatacgcttctgtcagattcatcaggtcgttctgggtcatgccgtgagccgacaccccttggctcataagagccgtaacagcggagcagagagccaatgcgattttcttcatagcaagataagaggggatcaggaaacacagttccgggcccacttcagtttgagttatgaaaacatcatactgctatcaacgttaaacagcgctatagatcgccagaaacccgagatcctggcgagttccagacgattcccataacggtctttttgatcaaccgtaatgccgtattctttctctttggaagggctgaccgcagggatacttgatttcgatatatcgatttcaagatgattttttcatggcttcagtcgctacttgatttcggtatatcgaaatcaagatgaaattttcatcgaaatggaggaaaaacagaggccggaaacctcaaaatggactttttaagtcccaaagtcggtaccggcagcctcgaaattaccgaaaaacgccgctcggaactgtctcttgatttcagtatgagagaatcaagagcgatctctccgcgtcagggtaggggagaccacagaaaagcaccgtaatttccggaatcggacgcttaaaacttgcctgattttctcacgactgcctaacaaataagcaaaaaatgccgaaaaacccggtgaaataccttttacggtctcaaacttgatttccgtataagaaaatcaaaaagaggggttaagaagcgattctgacctcaaaaaagacctacaaaaagtcacttcaagagtcaaaagagggagaaaaagtacgctgagagttccgcttcagcgtttccgacgttcgagccccgcagcccgccccaatgtcgggttcagaacgggccgttttgccttccaccgccctgagatgcacagcttccagcgactctcttccctggtaaaaaccgccccaaaagtctccgttttcctcggaaaataccatttttcccataaaacttgatatcggtatatgaaaatcaagtgaggtattcaaaagggagacgggtgacgaggcaggcgctttcaaggcaaaaataaacggacccgcgcaggagagagagctcgcgggtccgtcggagagcaaccaaaggagagaaaagcccgctgctcatccggtggagagagtccggatctggcagcggtaaatgtaaaaacacctagttctgggagcggcgcacctatcaagccgctgttgcttcccggaacagagttaaggatacgaatccgagtacgtaagtagttgaacttagattaaacattagttcagttatagataaaggtttttctagtttgaacaggatgtgcaaccggaataatcctttgtatcttttatcaaattattgatgaaaatctgagatgctttagaaagataccgttccttgctccaggcaacaacgacaggattttcaggcagctcttcagaaagatcgaaataataagggcgacattctgctgtacacgtacagtatgcgagttcttctggaaccagcgagcagccgaggccatgagataccacgtcatgaacgatattgatcgattcggactgcagaataaccttgggttcaacaccatatttctggcacaggctgaagtaaagctcattgaacttcatcccgtgatttaccagcacgaaaggctcggagggtgaggaaaattttgtgggt
